United States Patent Application Publication US 2024/0066114 A1 - sequence listing, part 2

SEQ ID NO: 1527 - protein, 666 aa, Artificial Sequence
  SARS-CoV-2/USA/WA-UW261/2020__EPI_ISL_418046 spike protein (16-681)
VNLTTRTQLPPAYTNSFTRGVYYPDKVFRSSVLHSTQDLFLPFFSNVTWFHAIHVSGTNGTKRFDNPVLPFNDGVYFASTEKSNIIRGWIFGTTLDSKTQSLLIVNNATNVVIKVCEFQFCNDPFLGVYYHKNNKSWMESEFRVYSSANNCTFEYVSQPFLMDLEGKQGNFKNLREFVFKNIDGYFKIYSKHTPINLVRDLPQGFSALEPLVDLPIGINITRFQTLLALHRSYLTPGDSSSGWTAGAAAYYVGYLQPRTFLLKYNENGTITDAVDCALDPLSETKCTLKSFTVEKGIYQTSNFRVQPTESIVRFPNITNLCPFGEVFNATRFTSVYAWNRKRISNCVADYSVLYNSASFSTFKCYGVSPTKLNDLCFTNVYADSFVIRGDEVRQIAPGQTGKIADYNYKLPDDFTGCVIAWNSNNLDSKVGGNYNYLYRLFRKSNLKPFERDISTEIYQAGSTPCNGVEGFNCYFPLQSYGFQPTNGVGYQPYRVVVLSFELLHAPATVCGPKKSTNLVKNKCVNFNFNGLTGTGVLTESNKKFLPFQQFGRDIADTTDAVRDPQTLEILDITPCSFGGVSVITPGTNTSNQVAVLYQDVNCTEVPVAIHADQLTPTWRVYSTGSNVFQTRAGCLIGAEHVNNSYECDIPIGAGICASYQTQTNSP

SEQ ID NO: 1528 - protein, 666 aa, Artificial Sequence; identical to SEQ ID NO: 29
  SARS-CoV-2/Portugal/PT0035/2020__EPI_ISL_418020 spike protein (16-681)

SEQ ID NO: 1529 - protein, 666 aa, Artificial Sequence
  SARS-CoV-2/USA/NY-NYUMC7/2020__EPI_ISL_418192 spike protein (16-681)
VNLTTRTQLPPAYTNSFTRGVYYPDKVFRSSVLHSTQDLFLPFFSNVTWFHAIHVSGTNGTKRFDNPVLPFNDGVYFASTEKSNIIRGWIFGTTLDSKTQSLLIVNNATNVVIKVCEFQFCNDPFLGVYHHKNNKSWMESEFRVYSSANNCTFEYVSQPFLMDLEGKQGNFKNLREFVFKNIDGYFKIYSKHTPINLVRDLPQGFSALEPLVDLPIGINITRFQTLLALHRSYLTPGDSSSGWTAGAAAYYVGYLQPRTFLLKYNENGTITDAVDCALDPLSETKCTLKSFTVEKGIYQTSNFRVQPTESIVRFPNITNLCPFGEVFNATRFASVYAWNRKRISNCVADYSVLYNSASFSTFKCYGVSPTKLNDLCFTNVYADSFVIRGDEVRQIAPGQTGKIADYNYKLPDDFTGCVIAWNSNNLDSKVGGNYNYLYRLFRKSNLKPFERDISTEIYQAGSTPCNGVEGFNCYFPLQSYGFQPTNGVGYQPYRVVVLSFELLHAPATVCGPKKSTNLVKNKCVNFNFNGLTGTGVLTESNKKFLPFQQFGRDIADTTDAVRDPQTLEILDITPCSFGGVSVITPGTNTSNQVAVLYQGVNCTEVPVAIHADQLTPTWRVYSTGSNVFQTRAGCLIGAEHVNNSYECDIPIGAGICASYQTQTNSP

SEQ ID NO: 1530 - protein, 666 aa, Artificial Sequence; identical to SEQ ID NO: 1488
  SARS-CoV-2/Iceland/189/2020__EPI_ISL_417709 spike protein (16-681)

SEQ ID NO: 1531 - protein, 666 aa, Artificial Sequence; identical to SEQ ID NO: 29
  SARS-CoV-2/Australia/NSW56/2020__EPI_ISL_417408 spike protein (16-681)

SEQ ID NO: 1532 - protein, 666 aa, Artificial Sequence
  SARS-CoV-2/Iceland/280/2020__EPI_ISL_417608 spike protein (16-681)
VNLTTRTQLPPAYTNSFTRGVYYPDKVFRSSVLHSTQDLFLPFFSNVTWFHAIHVSGTNGTKRFDNPVLPFNDGVYFASTEKSNIIRGWIFGTTLDSKTQSLLIVNNATNVVIKVCEFQFCNDPFLGVYYHKNNKSWMESEFRVYSSANNCTFEYVSQPFLMDLEGKQGNFKNLREFVFKNIDGYFKIYSKHTPINLVRDLPQGFSALEPLVDLPIGINITRFQTLLALHRSYLTPGDSSSGWTAGAAAYYVGYLQPRTFLLKYNENGTITDAVDCALDPLSETKCTLKSFTVEKGIYQTSNFRVQPTESIVRFPNITNLCPFGEVFNATRFASVYAWNRKRISNCVADYSVLYNSASFSTFKCYGVSPTKLNDLCFTNVYADSFVIRGDEVRQIAPGQTGKIADYNYKLPDDFTGCVIAWNSNNLDSKVGGNYNYLYRLFRKSNLKPFERDISTEIYQAGSTPCNGVEGFNCYFPLQSYGFQPTNGVGYQPYRVVVLSFELLHAPATVCGPKKSTNLVKNKCVNFNFNGLTGTGVLTESNKKFLPFQQFGRDIADTTDAVRDPQTLEILDITPCSFGGVSVITPGTNTSNQVAVLYQGVNCTEVPVAIHADQLTPTWRVYSTGSNVFQTRAGCLIGAEHVNNSYECDIPIGAGICASYHTQTNSP

SEQ ID NO: 1533 - protein, 666 aa, Artificial Sequence; identical to SEQ ID NO: 1488
  SARS-CoV-2/Iceland/247/2020__EPI_ISL_417575 spike protein (16-681)

SEQ ID NO: 1534 - protein, 666 aa, Artificial Sequence; identical to SEQ ID NO: 1488
  SARS-CoV-2/Iceland/238/2020__EPI_ISL_417566 spike protein (16-681)

SEQ ID NO: 1535 - protein, 666 aa, Artificial Sequence
  SARS-CoV-2/Greece/16/2020__EPI_ISL_418265 spike protein (16-681)
VNLTTRTQLPPAYTNSFTRGVYYPDKVFRSSVLHSTQDLFLPFFSNVTWFHAIHVSGTNGTKRFDNPVLPFNDGVYFASTEKSNIIRGWIFGTTLDSKTQSLLIVNNATNVVIKVCEFQFCNDPFLGVYYHKNNKSWMESEFRVYSSANNCTFEYVSQPFLMDLEGKQGNFKNLREFVFKNVDGYFKIYSKHTPINLVRDLPQGFSALEPLVDLPIGINITRFQTLLALHRSYLTPGDSSSGWTAGAAAYYVGYLQPRTFLLKYNENGTITDAVDCALDPLSETKCTLKSFTVEKGIYQTSNFRVQPTESIVRFPNITNLCPFGEVFNATRFASVYAWNRKRISNCVADYSVLYNSASFSTFKCYGVSPTKLNDLCFTNVYADSFVIRGDEVRQIAPGQTGKIADYNYKLPDDFTGCVIAWNSNNLDSKVGGNYNYLYRLFRKSNLKPFERDISTEIYQAGSTPCNGVEGFNCYFPLQSYGFQPTNGVGYQPYRVVVLSFELLHAPATVCGPKKSTNLVKNKCVNFNFNGLTGTGVLTESNKKFLPFQQFGRDIADTTDAVRDPQTLEILDITPCSFGGVSVITPGTNTSNQVAVLYQDVNCTEVPVAIHADQLTPTWRVYSTGSNVFQTRAGCLIGAEHVNNSYECDIPIGAGICASYQTQTNSP

SEQ ID NO: 1536 - protein, 666 aa, Artificial Sequence
  SARS-CoV-2/Iceland/319/2020__EPI_ISL_417648 spike protein (16-681)
VNLTTRTQLPPAYTNSFTRGVYYPDKVFRSSVLHSTQDLFLPFFSNVTWFHAIHVSGTNGTKRFDNPVLPFNDGVYFASTEKSNIIRGWIFGTTLDSKTQSLLIVNNATNVVIKVCEFQFCNDPFLGVYYHKNNKSWMESEFRVYSSANNCTFEYVSQPFLIDLEGKQGNFKNLREFVFKNIDGYFKIYSKHTPINLVRDLPQGFSALEPLVDLPIGINITRFQTLLALHRSYLTPGDSSSGWTAGAAAYYVGYLQPRTFLLKYNENGTITDAVDCALDPLSETKCTLKSFTVEKGIYQTSNFRVQPTESIVRFPNITNLCPFGEVFNATRFASVYAWNRKRISNCVADYSVLYNSASFSTFKCYGVSPTKLNDLCFTNVYADSFVIRGDEVRQIAPGQTGKIADYNYKLPDDFTGCVIAWNSNNLDSKVGGNYNYLYRLFRKSNLKPFERDISTEIYQAGSTPCNGVEGFNCYFPLQSYGFQPTNGVGYQPYRVVVLSFELLHAPATVCGPKKSTNLVKNKCVNFNFNGLTGTGVLTESNKKFLPFQQFGRDIADTTDAVRDPQTLEILDITPCSFGGVSVITPGTNTSNQVAVLYQGVNCTEVPVAIHADQLTPTWRVYSTGSNVFQTRAGCLIGAEHVNNSYECDIPIGAGICASYQTQTNSP

SEQ ID NO: 1537 - protein, 666 aa, Artificial Sequence; identical to SEQ ID NO: 1488
  SARS-CoV-2/Congo/94/2020__EPI_ISL_417947 spike protein (16-681)

SEQ ID NO: 1538 - protein, 666 aa, Artificial Sequence; identical to SEQ ID NO: 29
  SARS-CoV-2/Congo/158/2020__EPI_ISL_417950 spike protein (16-681)

SEQ ID NO: 1539 - protein, 666 aa, Artificial Sequence
  SARS-CoV-2/USA/UT-00034/2020__EPI_ISL_417977 spike protein (16-681)
VNLTTRTQLPPAYTNSFTRGVYYPDKVFRSSVLHSTQDLFLPFFSNVTWFHAIHVSGTNGTKRFDNPVLPFNDGVYFASTEKSNIIRGWIFGTTLDSKTQSLLIVNNATNVVIKVCEFQFCNDPFLGVYYYKNNKSWMESEFRVYSSANNCTFEYVSQPFLMDLEGKQGNFKNLREFVFKNIDGYFKIYSKHTPINLVRDLPQGFSALEPLVDLPIGINITRFQTLLALHRSYLTPGDSSSGWTAGAAAYYVGYLQPRTFLLKYNENGTITDAVDCALDPLSETKCTLKSFTVEKGIYQTSNFRVQPTESIVRFPNITNLCPFGEVFNATRFASVYAWNRKRISNCVADYSVLYNSASFSTFKCYGVSPTKLNDLCFTNVYADSFVIRGDEVRQIAPGQTGKIADYNYKLPDDFTGCVIAWNSNNLDSKVGGNYNYLYRLFRKSNLKPFERDISTEIYQAGSTPCNGVEGFNCYFPLQSYGFQPTNGVGYQPYRVVVLSFELLHAPATVCGPKKSTNLVKNKCVNFNFNGLTGTGVLTESNKKFLPFQQFGRDIADTTDAVRDPQTLEILDITPCSFGGVSVITPGTNTSNQVAVLYQGVNCTEVPVAIHADQLTPTWRVYSTGSNVFQTRAGCLIGAEHVNNSYECDIPIGAGICASYQTQTNSP

SEQ ID NO: 1540 - protein, 666 aa, Artificial Sequence
  SARS-CoV-2/USA/UT-00033/2020__EPI_ISL_417976 spike protein (16-681)
VNLTTRTQLPPAYTNSFTRGVYYPDKVFRSSVLHSTQDLFLPFFSNVTWFHAIHVSGTNGTKRFDNPVLPFNDGVYFASTEKSNIIRGWIFGTTLDSKTQSLLIVNNATNVVIKVCEFQFCNDPFLGVYYHKNNKSWMESEFRVYSSANNCTFEYVSQPFLMDLEGKQGNFKNLREFVFKNIDGYFKIYSKHTPINLVRDLPQGFSALEPLVDLPIGINITRFQTLLALHRSYLTPGDSSSGLTAGAAAYYVGYLQPRTFLLKYNENGTITDAVDCALDPLSETKCTLKSFTVEKGIYQTSNFRVQPTESIVRFPNITNLCPFGEVFNATRFASVYAWNRKRISNCVADYSVLYNSASFSTFKCYGVSPTKLNDLCFTNVYADSFVIRGDEVRQIAPGQTGKIADYNYKLPDDFTGCVIAWNSNNLDSKVGGNYNYLYRLFRKSNLKPFERDISTEIYQAGSTPCNGVEGFNCYFPLQSYGFQPTNGVGYQPYRVVVLSFELLHAPATVCGPKKSTNLVKNKCVNFNFNGLTGTGVLTESNKKFLPFQQFGRDIADTTDAVRDPQTLEILDITPCSFGGVSVITPGTNTSNQVAVLYQGVNCTEVPVAIHADQLTPTWRVYSTGSNVFQTRAGCLIGAEHVNNSYECDIPIGAGICASYQTQTNSP

SEQ ID NO: 1541 - protein, 666 aa, Artificial Sequence
  SARS-CoV-2/USA/WI-13/2020__EPI_ISL_417516 spike protein (16-681)
VNLTTRTQLPPAYTNSFTRGVYYPDKVFRSSVLHSTQDLFLPFFSNVTWFHAIHVSGTNGTKRFDNPVLPFNDGVYFASTEKSNIIRGWIFGTTLDSKTQSLLIVNNATNVVIKVCEFQFCNDPFLGVYYHKNNKSWMESEFRVYSSANNCTFEYVSQPFLMDLEGKQGNFKNLREFVFKNIDGYFKIYSKHTPINLVRDLPQGFSALEPLVDLPIGINITRFQTLLALHRSYLTPGDSSSGWTAGAAAYYVGYLQPRTFLLKYNENGTITDAVDCALDPLSETKCTLKSFTVEKGIYQTSNFRVLPTESIVRFPNITNLCPFGEVFNATRFASVYAWNRKRISNCVADYSVLYNSASFSTFKCYGVSPTKLNDLCFTNVYADSFVIRGDEVRQIAPGQTGKIADYNYKLPDDFTGCVIAWNSNNLDSKVGGNYNYLYRLFRKSNLKPFERDISTEIYQAGSTPCNGVEGFNCYFPLQSYGFQPTNGVGYQPYRVVVLSFELLHAPATVCGPKKSTNLVKNKCVNFNFNGLTGTGVLTESNKKFLPFQQFGRDIADTTDAVRDPQTLEILDITPCSFGGVSVITPGTNTSNQVAVLYQGVNCTEVPVAIHADQLTPTWRVYSTGSNVFQTRAGCLIGAEHVNNSYECDIPIGAGICASYQTQTNSP

SEQ ID NO: 1542 - protein, 665 aa, Artificial Sequence
  SARS-CoV-2/India/1-27/2020__EPI_ISL_413522 spike protein (16-680)
VNLTTRTQLPPAYTNSFTRGVYYPDKVFRSSVLHSTQDLFLPFFSNVTWFHAIHVSGTNGTKRFDNPVLPFNDGVYFASTEKSNIIRGWIFGTTLDSKTQSLLIVNNATNVVIKVCEFQFCNDPFLGVYHKNNKSWMESEFRVYSSANNCTFEYVSQPFLMDLEGKQGNFKNLREFVFKNIDGYFKIYSKHTPINLVRDLPQGFSALEPLVDLPIGINITRFQTLLALHRSYLTPGDSSSGWTAGAAAYYVGYLQPRTFLLKYNENGTITDAVDCALDPLSETKCTLKSFTVEKGIYQTSNFRVQPTESIVRFPNITNLCPFGEVFNATRFASVYAWNRKRISNCVADYSVLYNSASFSTFKCYGVSPTKLNDLCFTNVYADSFVIRGDEVIQIAPGQTGKIADYNYKLPDDFTGCVIAWNSNNLDSKVGGNYNYLYRLFRKSNLKPFERDISTEIYQAGSTPCNGVEGFNCYFPLQSYGFQPTNGVGYQPYRVVVLSFELLHAPATVCGPKKSTNLVKNKCVNFNFNGLTGTGVLTESNKKFLPFQQFGRDIADTTDAVRDPQTLEILDITPCSFGGVSVITPGTNTSNQVAVLYQDVNCTEVPVAIHADQLTPTWRVYSTGSNVFQTRAGCLIGAEHVNNSYECDIPIGAGICASYQTQTNSP

SEQ ID NO: 1543 - protein, 662 aa, Artificial Sequence
  SARS-CoV-2/pangolin/Guangxi/P4L/2017__EPI_ISL_410538 spike protein (16-677)
VNLTTRTGIPPGYTNSSTRGVYYPDKVFRSSILHLTQDLFLPFFSNVTWFNTINYQGGFKKFDNPVLPFNDGVYFASTEKSNIIRGWIFGTTLDARTQSLLIVNNATNVVIKVCEFQFCTDPFLGVYYHNNNKTWVENEFRVYSSANNCTFEYISQPFLMDLEGKQGNFKNLREFVFKNVDGYFKIYSKHTPIDLVRDLPRGFAALEPLVDLPIGINITRFQTLLALHRSYLTPGNLESGWTTGAAAYYVGYLQQRTFLLSYNQNGTITDAVDCSLDPLSETKCTLKSLTVEKGIYQTSNFRVQPTISIVRFPNITNLCPFGEVFNASKFASVYAWNRKRISNCVADYSVLYNSTSFSTFKCYGVSPTKLNDLCFTNVYADSFVVKGDEVRQIAPGQTGVIADYNYKLPDDFTGCVIAWNSVKQDALTGGNYGYLYRLFRKSKLKPFERDISTEIYQAGSTPCNGQVGLNCYYPLERYGFHPTTGVNYQPFRVVVLSFELLNGPATVCGPKLSTTLVKDKCVNFNFNGLTGTGVLTTSKKQFLPFQQFGRDISDTTDAVRDPQTLEILDITPCSFGGVSVITPGTNTSNQVAVLYQDVNCTEVPMAIHAEQLTPAWRVYSAGANVFQTRAGCLVGAEHVNNSYECDIPVGAGICASYHSMSS

SEQ ID NO: 1544 - protein, 662 aa, Artificial Sequence
  SARS-CoV-2/pangolin/Guangxi/P5L/2017__EPI_ISL_410540 spike protein (16-677)
VNLTTRTGIPPGYTNSSTRGVYYPDKVFRSSILHLTQDLFLPFFSNVTWFNTINYQGGFKKFDNPVLPFNDGVYFASTEKSNIIRGWIFGTTLDARTQSLLIVNNATNVVIKVCEFQFCTDPFLGVYYHNNNKTWVENEFRVYSSANNCTFEYISQPFLMDLEGKQGNFKNLREFVFKNVDGYFKIYSKHTPIDLVRDLPRGFAALEPLVDLPIGINITRFQTLLALHRSYLTPGKLESGWTTGAAAYYVGYLQQRTFLLSYNQNGTITDAVDCSLDPLSETKCTLKSLTVEKGIYQTSNFRVQPTISIVRFPNITNLCPFGEVFNASKFASVYAWNRKRISNCVADYSVLYNSTSFSTFKCYGVSPTKLNDLCFTNVYADSFVVKGDEVRQIAPGQTGVIADYNYKLPDDFTGCVIAWNSVKQDALTGGNYGYLYRLFRKSKLKPFERDISTEIYQAGSTPCNGQVGLNCYYPLERYGFHPTTGVNYQPFRVVVLSFELLNGPATVCGPKLSTTLVKDKCVNFNFNGLTGTGVLTTSKKQFLPFQQFGRDISDTTDAVRDPQTLEILDITPCSFGGVSVITPGTNTSNQVAVLYQDVNCTEVPMAIHAEQLTPAWRVYSAGANVFQTRAGCLVGAEHVNNSYECDIPVGAGICASYHSMSS

SEQ ID NO: 1545 - protein, 662 aa, Artificial Sequence
  SARS-CoV-2/pangolin/Guangxi/P5E/2017__EPI_ISL_410541 spike protein (16-677)
VNLTTRTGIPPGYTNSSTRGVYYPDKVFRSSILHLTQDLFLPFFSNVTWFNTITYQGGSKKFDNPVLPFNDGVYFASTEKSNIIRGWIFGTTLDARTQSLLIVNNATNVVIKVCEFQFCTDPFLGVYYHNNNKTWVENEFRVYSSANNCTFEYISQPFLMDLEGKQGNFKNLREFVFKNVDGYFKIYSKHTPIDLVRDLPRGFAALEPLVDLPIGINITRFQTLLALHRSYLTPGKLESGWTTGAAAYYVGYLQQRTFLLSYNQNGTITDAVDCSLDPLSETKCTLKSLTVEKGIYQTSNFRVQPTISIVRFPNITNLCPFGEVFNASKFASVYAWNRKRISNCVADYSVLYNSTSFSTFKCYGVSPTKLNDLCFTNVYADSFVVKGDEVRQIAPGQTGVIADYNYKLPDDFTGCVIAWNSVKQDALTGDNYGYLYRLFRKSKLKPFERDISTEIYQAGSTPCNGQVGLNCYYPLERYGFHPTTGVNYQPFRVVVLSFELLNGPATVCGPKLSTTLVKDKCVNFNFNGLTGTGVLTTSKKQFLPFQQFGRDISDTTDAVRDPQTLEILDITPCSFGGVSVITPGTNTSNQVAVLYQDVNCTEVPMAIHAEQLTPAWRVYSAGANVFQTRAGCLVGAEHVNNSYECDIPVGAGICASYHSMSS

SEQ ID NO: 1546 - protein, 660 aa, Artificial Sequence
  SARS-CoV-2/pangolin/Guangxi/P1E/2017__EPI_ISL_410539 spike protein (16-675)
VNLTTRTGIQPGYTNSSTRGVYYPDKVFRSSILHLTQDLFLPFFSNVTWFNTINYQGGFKKFDNPVLPFNDGVYFASTEKSNIIRGWIFGTTLDARTQSLLIVNNATNVVIKVCEFQFCTDPFLGVYYHNNNKTWVENEFRVYSSANNCTFEYISQPFLMDLEGKQGNFKNLREFVFKNVDGYFKIYSKHTPIDLVRDLPRGFAALEPLVDLPIGINITRFQTLLALHRSYLTPGKLESGWTTGAAAYYVGYLQQRTFLLSYNQNGTITDAVDCSLDPLSETKCTLKSLTVEKGIYQTSNFRVQPTISIVRFPNITNLCPFGEVFNASKFASVYAWNRKRISNCVADYSVLYNSTSFSTFKCYGVSPTKLNDLCFTNVYADSFVVKGDEVRQIAPGQTGVIADYNYKLPDDFTGCVIAWNSVKQDALTGGNYLYRLFRKSKLKPFERDISTEIYQAGSTPCNGQVGLNCYYPLERYGFHPTTGVNYQPFRVVVLSFELLNGPATVCGPKLSTTLVKDKCVNFNFNGLTGTGVLTTSKKQFLPFQQFGRDISDTTDAVRDPQTLEILDITPCSFGGVSVITPGTNTSNQVAVLYQDVNCTEVPMAIHAEQLTPAWRVYSAGANVFQTRAGCLVGAEHVNNSYECDIPVGAGICASYHSMSS

SEQ ID NO: 1547 - protein, 62 aa, Artificial Sequence; identical to SEQ ID NO: 49
  SARS-CoV-2/Wuhan/WIV05/2019__EPI_ISL_402128 spike protein (1212-1273)

SEQ ID NO: 1548 - protein, 62 aa, Artificial Sequence; identical to SEQ ID NO: 50
  SARS-CoV-2/bat/Yunnan/RaTG13/2013__EPI_ISL_402131 spike protein (1208-1269)

SEQ ID NO: 1549 - protein, 62 aa, Artificial Sequence; identical to SEQ ID NO: 49
  SARS-CoV-2/Wuhan/HBCDC-HB-01/2019__EPI_ISL_402132 spike protein (1212-1273)

SEQ ID NO: 1550 - protein, 62 aa, Artificial Sequence; identical to SEQ ID NO: 49
  SARS-CoV-2/Guangdong/20SF028/2020__EPI_ISL_403936 spike protein (1212-1273)

SEQ ID NO: 1551 - protein, 62 aa, Artificial Sequence; identical to SEQ ID NO: 53
  SARS-CoV-2/Shenzhen/SZTH-001/2020__EPI_ISL_406592 spike protein (1212-1273)

SEQ ID NO: 1552 - protein, 62 aa, Artificial Sequence; identical to SEQ ID NO: 49
  SARS-CoV-2/Shenzhen/SZTH-004/2020__EPI_ISL_406595 spike protein (1212-1273)

SEQ ID NO: 1553 - protein, 62 aa, Artificial Sequence; identical to SEQ ID NO: 49
  SARS-CoV-2/France/IDF0372/2020__EPI_ISL_406596 spike protein (1212-1273)

SEQ ID NO: 1554 - protein, 62 aa, Artificial Sequence; identical to SEQ ID NO: 49
  SARS-CoV-2/Australia/VIC01/2020__EPI_ISL_406844 spike protein (1212-1273)

SEQ ID NO: 1555 - protein, 62 aa, Artificial Sequence; identical to SEQ ID NO: 49
  SARS-CoV-2/Germany/BavPat1/2020__EPI_ISL_406862 spike protein (1212-1273)

SEQ ID NO: 1556 - protein, 62 aa, Artificial Sequence; identical to SEQ ID NO: 49
  SARS-CoV-2/Wuhan/HBCDC-HB-02/2020__EPI_ISL_412978 spike protein (1212-1273)

SEQ ID NO: 1557 - protein, 62 aa, Artificial Sequence; identical to SEQ ID NO: 49
  SARS-CoV-2/Australia/QLD02/2020__EPI_ISL_407896 spike protein (1212-1273)

SEQ ID NO: 1558 - protein, 62 aa, Artificial Sequence; identical to SEQ ID NO: 49
  SARS-CoV-2/India/1-31/2020__EPI_ISL_413523 spike protein (1212-1273)

SEQ ID NO: 1559 - protein, 62 aa, Artificial Sequence; identical to SEQ ID NO: 49
  SARS-CoV-2/Guangdong/GD2020087-P0008/2020__EPI_ISL_413863 spike protein (1212-1273)

SEQ ID NO: 1560 - protein, 62 aa, Artificial Sequence; identical to SEQ ID NO: 49
  SARS-CoV-2/Sweden/01/2020__EPI_ISL_411951 spike protein (1212-1273)

SEQ ID NO: 1561 - protein, 62 aa, Artificial Sequence; identical to SEQ ID NO: 49
  SARS-CoV-2/Tianmen/HBCDC-HB-07/2020__EPI_ISL_412983 spike protein (1212-1273)

SEQ ID NO: 1562 - protein, 62 aa, Artificial Sequence; identical to SEQ ID NO: 49
  SARS-CoV-2/Hong Kong/case42_VM20002493/2020__EPI_ISL_414527 spike protein (1212-1273)

SEQ ID NO: 1563 - protein, 62 aa, Artificial Sequence; identical to SEQ ID NO: 49
  SARS-CoV-2/USA/CruiseA-23/2020__EPI_ISL_414482 spike protein (1212-1273)

SEQ ID NO: 1564 - protein, 62 aa, Artificial Sequence; identical to SEQ ID NO: 49
  SARS-CoV-2/Hong Kong/case85_VM20002868/2020__EPI_ISL_414519 spike protein (1212-1273)

SEQ ID NO: 1565 - protein, 62 aa, Artificial Sequence
  SARS-CoV-2/England/200990660/2020__EPI_ISL_414523 spike protein (1212-1273)
WPWYIWLGFIAGLIAIVMVTIMLCCMTSCCSCLKGCCSCGSCCKFDEDDSELVLKGVKLHYT

SEQ ID NO: 1566 - protein, 62 aa, Artificial Sequence; identical to SEQ ID NO: 49
  SARS-CoV-2/Australia/NSW09/2020__EPI_ISL_413595 spike protein (1212-1273)

SEQ ID NO: 1567 - protein, 62 aa, Artificial Sequence
  SARS-CoV-2/Australia/NSW10/2020__EPI_ISL_413596 spike protein (1212-1273)
WPWYIWLGFIAGLIAIVMVTIMLCCMTSCCSCLKGCCSCGSCFKFDEDDSEPVLKGVKLHYT

SEQ ID NO: 1568 - protein, 62 aa, Artificial Sequence; identical to SEQ ID NO: 49
  SARS-CoV-2/Switzerland/1000477797/2020__EPI_ISL_413023 spike protein (1212-1273)

SEQ ID NO: 1569 - protein, 62 aa, Artificial Sequence; identical to SEQ ID NO: 49
  SARS-CoV-2/Belgium/BA-02291/2020__EPI_ISL_415159 spike protein (1212-1273)

SEQ ID NO: 1570 - protein, 62 aa, Artificial Sequence; identical to SEQ ID NO: 49
  SARS-CoV-2/USA/WA8-UW5/2020__EPI_ISL_413486 spike protein (1212-1273)

SEQ ID NO: 1571 - protein, 62 aa, Artificial Sequence; identical to SEQ ID NO: 49
  SARS-CoV-2/England/20102000506/2020__EPI_ISL_415147 spike protein (1212-1273)

SEQ ID NO: 1572 - protein, 62 aa, Artificial Sequence; identical to SEQ ID NO: 49
  SARS-CoV-2/Belgium/VAG-03013/2020__EPI_ISL_415155 spike protein (1212-1273)

SEQ ID NO: 1573 - protein, 62 aa, Artificial Sequence; identical to SEQ ID NO: 49
  SARS-CoV-2/Belgium/BC-03016/2020__EPI_ISL_415157 spike protein (1212-1273)

SEQ ID NO: 1574 - protein, 62 aa, Artificial Sequence; identical to SEQ ID NO: 49
  SARS-CoV-2/Germany/BavPat3/2020__EPI_ISL_414521 spike protein (1212-1273)

SEQ ID NO: 1575 - protein, 62 aa, Artificial Sequence; identical to SEQ ID NO: 49
  SARS-CoV-2/France/HF1805/2020__EPI_ISL_414628 spike protein (1212-1273)

SEQ ID NO: 1576 - protein, 62 aa, Artificial Sequence; identical to SEQ ID NO: 49
  SARS-CoV-2/Netherlands/ZuidHolland_9/2020__EPI_ISL_414445 spike protein (1212-1273)

SEQ ID NO: 1577 - protein, 62 aa, Artificial Sequence; identical to SEQ ID NO: 49
  SARS-CoV-2/Finland/FIN03032020A/2020__EPI_ISL_413602 spike protein (1212-1273)

SEQ ID NO: 1578 - protein, 62 aa, Artificial Sequence; identical to SEQ ID NO: 49
  SARS-CoV-2/France/GE1977/2020__EPI_ISL_414632 spike protein (1212-1273)

SEQ ID NO: 1579 - protein, 62 aa, Artificial Sequence; identical to SEQ ID NO: 49
  SARS-CoV-2/Finland/FIN-313/2020__EPI_ISL_414641 spike protein (1212-1273)

SEQ ID NO: 1580 - protein, 62 aa, Artificial Sequence; identical to SEQ ID NO: 49
  SARS-CoV-2/Netherlands/ZuidHolland_2/2020__EPI_ISL_414556 spike protein (1212-1273)

SEQ ID NO: 1581 - protein, 62 aa, Artificial Sequence; identical to SEQ ID NO: 49
  SARS-CoV-2/USA/WA-UW31/2020__EPI_ISL_414618 spike protein (1212-1273)

SEQ ID NO: 1582 - protein, 62 aa, Artificial Sequence; identical to SEQ ID NO: 49
  SARS-CoV-2/South Korea/SNU01/2020__EPI_ISL_411929 spike protein (1212-1273)

SEQ ID NO: 1583 - protein, 62 aa, Artificial Sequence; identical to SEQ ID NO: 49
  SARS-CoV-2/China/WF0004/2020__EPI_ISL_413694 spike protein (1212-1273)

SEQ ID NO: 1584 - protein, 62 aa, Artificial Sequence; identical to SEQ ID NO: 49
  SARS-CoV-2/China/WF0028/2020__EPI_ISL_413791 spike protein (1212-1273)

SEQ ID NO: 1585 - protein, 62 aa, Artificial Sequence; identical to SEQ ID NO: 49
  SARS-CoV-2/2019-nCoV/USA-CruiseA-18/2020__MT159716.1 spike protein (1212-1273)

SEQ ID NO: 1586 - protein, 62 aa, Artificial Sequence; identical to SEQ ID NO: 49
  SARS-CoV-2/SARS-CoV-2/Yunnan-01/human/2020/CHN__MT049951.1 spike protein (1212-1273)

SEQ ID NO: 1587 - protein, 62 aa, Artificial Sequence; identical to SEQ ID NO: 49
  SARS-CoV-2/USA/WA-UW292/2020__EPI_ISL_418077 spike protein (1212-1273)

SEQ ID NO: 1588 - protein, 62 aa, Artificial Sequence; identical to SEQ ID NO: 49
  SARS-CoV-2/Iceland/192/2020__EPI_ISL_417819 spike protein (1212-1273)

SEQ ID NO: 1589 - protein, 62 aa, Artificial Sequence; identical to SEQ ID NO: 49
  SARS-CoV-2/Belgium/ULG-6939/2020__EPI_ISL_417020 spike protein (1212-1273)

SEQ ID NO: 1590 - protein, 62 aa, Artificial Sequence; identical to SEQ ID NO: 49
  SARS-CoV-2/France/HF2496/2020__EPI_ISL_418231 spike protein (1212-1273)

SEQ ID NO: 1591 - protein, 62 aa, Artificial Sequence; identical to SEQ ID NO: 49
  SARS-CoV-2/USA/WA-UW291/2020__EPI_ISL_418076 spike protein (1212-1273)

SEQ ID NO: 1592 - protein, 62 aa, Artificial Sequence
  SARS-CoV-2/Portugal/PT0034/2020__EPI_ISL_418019 spike protein (1212-1273)
WPWYIWLGFIAGLIAIVMVTIMLCCITSCCSCLKGCCSCGSCCKFDEDDSEPVLKGVKLHYT

SEQ ID NO: 1593 - protein, 62 aa, Artificial Sequence; identical to SEQ ID NO: 49
  SARS-CoV-2/Iceland/202/2020__EPI_ISL_417750 spike protein (1212-1273)

SEQ ID NO: 1594 - protein, 62 aa, Artificial Sequence; identical to SEQ ID NO: 49
  SARS-CoV-2/USA/WA-UW261/2020__EPI_ISL_418046 spike protein (1212-1273)

SEQ ID NO: 1595 - protein, 62 aa, Artificial Sequence; identical to SEQ ID NO: 49
  SARS-CoV-2/Portugal/PT0035/2020__EPI_ISL_418020 spike protein (1212-1273)

SEQ ID NO: 1596 - protein, 62 aa, Artificial Sequence; identical to SEQ ID NO: 49
  SARS-CoV-2/USA/NY-NYUMC7/2020__EPI_ISL_418192 spike protein (1212-1273)

SEQ ID NO: 1597 - protein, 62 aa, Artificial Sequence; identical to SEQ ID NO: 49
  SARS-CoV-2/Iceland/189/2020__EPI_ISL_417709 spike protein (1212-1273)

SEQ ID NO: 1598 - protein, 62 aa, Artificial Sequence; identical to SEQ ID NO: 49
  SARS-CoV-2/Australia/NSW56/2020__EPI_ISL_417408 spike protein (1212-1273)

SEQ ID NO: 1599 - protein, 62 aa, Artificial Sequence; identical to SEQ ID NO: 49
  SARS-CoV-2/Iceland/280/2020__EPI_ISL_417608 spike protein (1212-1273)

SEQ ID NO: 1600 - protein, 62 aa, Artificial Sequence
  SARS-CoV-2/Iceland/247/2020__EPI_ISL_417575 spike protein (1212-1273)
WPWYIWLGFIAGLIAIVIVTIMLCCMTSCCSCLKGCCSCGSCCKFDEDDSEPVLKGVKLHYT

SEQ ID NO: 1601 - protein, 62 aa, Artificial Sequence; identical to SEQ ID NO: 49
  SARS-CoV-2/Iceland/238/2020__EPI_ISL_417566 spike protein (1212-1273)

SEQ ID NO: 1602 - protein, 62 aa, Artificial Sequence; identical to SEQ ID NO: 49
  SARS-CoV-2/Greece/16/2020__EPI_ISL_418265 spike protein (1212-1273)

SEQ ID NO: 1603 - protein, 62 aa, Artificial Sequence; identical to SEQ ID NO: 49
  SARS-CoV-2/Iceland/319/2020__EPI_ISL_417648 spike protein (1212-1273)

SEQ ID NO: 1604 - protein, 62 aa, Artificial Sequence; identical to SEQ ID NO: 49
  SARS-CoV-2/Congo/94/2020__EPI_ISL_417947 spike protein (1212-1273)

SEQ ID NO: 1605 - protein, 62 aa, Artificial Sequence; identical to SEQ ID NO: 49
  SARS-CoV-2/Congo/158/2020__EPI_ISL_417950 spike protein (1212-1273)

SEQ ID NO: 1606 - protein, 62 aa, Artificial Sequence; identical to SEQ ID NO: 49
  SARS-CoV-2/USA/UT-00034/2020__EPI_ISL_417977 spike protein (1212-1273)

SEQ ID NO: 1607 - protein, 62 aa, Artificial Sequence; identical to SEQ ID NO: 49
  SARS-CoV-2/USA/UT-00033/2020__EPI_ISL_417976 spike protein (1212-1273)

SEQ ID NO: 1608 - protein, 62 aa, Artificial Sequence; identical to SEQ ID NO: 49
  SARS-CoV-2/USA/WI-13/2020__EPI_ISL_417516 spike protein (1212-1273)

SEQ ID NO: 1609 - protein, 62 aa, Artificial Sequence; identical to SEQ ID NO: 49
  SARS-CoV-2/India/1-27/2020__EPI_ISL_413522 spike protein (1211-1272)

SEQ ID NO: 1610 - protein, 62 aa, Artificial Sequence; identical to SEQ ID NO: 50
  SARS-CoV-2/pangolin/Guangxi/P4L/2017__EPI_ISL_410538 spike protein (1206-1267)

SEQ ID NO: 1611 - protein, 62 aa, Artificial Sequence; identical to SEQ ID NO: 50
  SARS-CoV-2/pangolin/Guangxi/P5L/2017__EPI_ISL_410540 spike protein (1206-1267)

SEQ ID NO: 1612 - protein, 62 aa, Artificial Sequence; identical to SEQ ID NO: 50
  SARS-CoV-2/pangolin/Guangxi/P5E/2017__EPI_ISL_410541 spike protein (1206-1267)

SEQ ID NO: 1613 - protein, 62 aa, Artificial Sequence; identical to SEQ ID NO: 50
  SARS-CoV-2/pangolin/Guangxi/P1E/2017__EPI_ISL_410539 spike protein (1204-1265)

SEQ ID NO: 1614 - protein, 1211 aa, Artificial Sequence; identical to SEQ ID NO: 31
  SARS-CoV-2/Wuhan/WIV05/2019__EPI_ISL_402128 spike protein (1-1211)

SEQ ID NO: 1615 - protein, 1207 aa, Artificial Sequence; identical to SEQ ID NO: 32
  SARS-CoV-2/bat/Yunnan/RaTG13/2013__EPI_ISL_402131 spike protein (1-1207)

SEQ ID NO: 1616 - protein, 1211 aa, Artificial Sequence; identical to SEQ ID NO: 33
  SARS-CoV-2/Wuhan/HBCDC-HB-01/2019__EPI_ISL_402132 spike protein (1-1211)

SEQ ID NO: 1617 - protein, 1211 aa, Artificial Sequence; identical to SEQ ID NO: 34
  SARS-CoV-2/Guangdong/20SF028/2020__EPI_ISL_403936 spike protein (1-1211)

SEQ ID NO: 1618 - protein, 1211 aa, Artificial Sequence; identical to SEQ ID NO: 35
  SARS-CoV-2/Shenzhen/SZTH-001/2020__EPI_ISL_406592 spike protein (1-1211)

SEQ ID NO: 1619 - protein, 1211 aa, Artificial Sequence; identical to SEQ ID NO: 36
  SARS-CoV-2/Shenzhen/SZTH-004/2020__EPI_ISL_406595 spike protein (1-1211)

SEQ ID NO: 1620 - protein, 1211 aa, Artificial Sequence; identical to SEQ ID NO: 37
  SARS-CoV-2/France/IDF0372/2020__EPI_ISL_406596 spike protein (1-1211)

SEQ ID NO: 1621 - protein, 1211 aa, Artificial Sequence; identical to SEQ ID NO: 38
  SARS-CoV-2/Australia/VIC01/2020__EPI_ISL_406844 spike protein (1-1211)

SEQ ID NO: 1622 - protein, 1211 aa, Artificial Sequence; identical to SEQ ID NO: 39
  SARS-CoV-2/Germany/BavPat1/2020__EPI_ISL_406862 spike protein (1-1211)

SEQ ID NO: 1623 - protein, 1211 aa, Artificial Sequence
  SARS-CoV-2/Wuhan/HBCDC-HB-02/2020__EPI_ISL_412978 spike protein (1-1211)
MFVFLVLLPLVSSQCVNLTTRTQLPPAYTNSFTRGVYYPDKVFRSSVLHSTQDLFLPFFSNVTWFHAIHVSGTNGTKRFDNPVLPFNDGVYFASTEKSNIIRGWIFGTTLDSKTQSLLIVNNATNVVIKVCEFQFCNDPFLGVYYHKNNKSWMESEFRVYSSANNCTFEYVSQPFLMDLEGKQGNFKNLREFVFKNIDGYFKIYSKHTPINLVRDLPQGFSALEPLVDLPIGINITRFQTLLALHRSYLTPGDSSSGWTAGAAAYYVGYLQPRTFLLKYNENGTITDAVDCALDPLSETKCTLKSFTVEKGIYQTSNFRVQPTESIVRFPNITNLCPFGEVFNATRFASVYAWNRKRISNCVADYSVLYNSASFSTFKCYGVSPTKLNDLCFTNVYADSFVIRGDEVRQIAPGQTGKIADYNYKLPDDFTGCVIAWNSNNLDSKVGGNYNYLYRLFRKSNLKPFERDISTEIYQAGSTPCNGVEGFNCYFPLQSYGFQPTNGVGYQPYRVVVLSFELLHAPATVCGPKKSTNLVKNKCVNFNFNGLTGTGVLTESNKKFLPFQQFGRDIADTTDAVRDPQTLEILDITPCSFGGVSVITPGTNTSNQVAVLYQDVNCTEVPVAIHADQLTPTWRVYSTGSNVFQTRAGCLIGAEHVNNSYECDIPIGAGICASYQTQTNSPRRARSVASQSIIAYTMSLGAENSVAYSNNSIAIPTNFTISVTTEILPVSMTKTSVDCTMYICGDSTECSNFLLQYGSFCTQLNRALTGIAVEQDKNTQEVFAQVKQIYKTPPIKDFGGFNFSQILPDPSKPSKRSFIEDLLFNKVTLADAGFIKQYGDCLGDIAARDLICAQKFNGLTVLPPLLTDEMIAQYTSALLAGTITSGWTFGAGAALQIPFAMQMAYRFNGIGVTQNVLYENQKLIANQFNSAIGKIQDSLSSTASALGKLQDVVNQNAQALNTLVKQLSSNFGAISSVLNDILSRLDKVEAEVQIDRLITGRLQSLQTYVTQQLIRAAEIRASANLAATKMSECVLGQSKRVDFCGKGYHLMSFPQSAPHGVVFLHVTYVPAQEKNFTTAPAICHDGKAHFPREGVFVSNGTHWFVTQRNFYEPQIITTDNTFVSGNCDVVIGIVNNTVYDPLQPELDSFKEELDKYFKNHTSPDVDLGDISGINASVVNIQKEIDRLNEVAKNLNESLIDLQELGKYEQYIK

SEQ ID NO: 1624 - protein, 1211 aa, Artificial Sequence
  SARS-CoV-2/Australia/QLD02/2020__EPI_ISL_407896 spike protein (1-1211)
MFVFLVLLPLVSSQCVNLTTRTQLPPAYTNSFTRGVYYPDKVFRSSVLHSTQDLFLPFFSNVTWFHAIHVSGTNGTKRFDNPVLPFNDGVYFASTEKSNIIRGWIFGTTLDSKTQSLLIVNNATNVVIKVCEFQFCNDPFLGVYYHKNNKSWMESEFRVYSSANNCTFEYVSQPFLMDLEGKQGNFKNLREFVFKNIDGYFKIYSKHTPINLVRDLPQGFSALEPLVDLPIGINITRFQTLLALHRSYLTPGDSSSGWTAGAAAYYVGYLQPRTFLLKYNENGTITDAVDCALDPLSETKCTLKSFTVEKGIYQTSNFRVQPTESIVRFPNITNLCPFGEVFNATRFASVYAWNRKRISNCVADYSVLYNSASFSTFKCYGVSPTKLNDLCFTNVYADSFVIRGDEVRQIAPGQTGKIADYNYKLPDDFTGCVIAWNSNNLDSKVGGNYNYLYRLFRKSNLKPFERDISTEIYQAGSTPCNGVEGFNCYFPLQSYGFQPTNGVGYQPYRVVVLSFELLHAPATVCGPKKSTNLVKNKCVNFNFNGLTGTGVLTESNKKFLPFQQFGRDIADTTDAVRDPQTLEILDITPCSFGGVSVITPGTNTSNQVAVLYQDVNCTEVPVAIHADQLTPTWRVYSTGSNVFQTRAGCLIGAEHVNNSYECDIPIGAGICASYQTQTNSPRRARSVASQSIIAYTMSLGAENSVAYSNNSIAIPTNFTISVTTEILPVSMTKTSVDCTMYICGDSTECSNLLLQYGSFCTQLNRALTGIAVEQDKNTQEVFAQVKQIYKTPPIKDFGGFNFSQILPDPSKPSKRSFIEDLLFNKVTLADAGFIKQYGDCLGDIAARDLICAQKFNGLTVLPPLLTDEMIAQYTSALLAGTITSGWTFGAGAALQIPFAMQMAYRFNGIGVTQNVLYENQKLIANQFNSAIGKIQDSLSSTASALGKLQDVVNQNAQALNTLVKQLSSNFGAISSVLNDILSRLDKVEAEVQIDRLITGRLQSLQTYVTQQLIRAAEIRASANLAATKMSECVLGQSKRVDFCGKGYHLMSFPQSAPHGVVFLHVTYVPAQEKNFTTAPAICHDGKAHFPREGVFVSNGTHWFVTQRNFYEPQIITTDNTFVSGNCDVVIGIVNNTVYDPLQLELDSFKEELDKYFKNHTSPDVDLGDISGINASVVNIQKEIDRLNEVAKNLNESLIDLQELGKYEQYIK

SEQ ID NO: 1625 - protein, 1211 aa, Artificial Sequence
  SARS-CoV-2/India/1-31/2020__EPI_ISL_413523 spike protein (1-1211)
MFVFLVLLPLVSSQCVNLTTRTQLPPAYTNSFTRGVYYPDKVFRSSVLHSTQDLFLPFFSNVTWFHAIHVSGTNGTKRFDNPVLPFNDGVYFASTEKSNIIRGWIFGTTLDSKTQSLLIVNNATNVVIKVCEFQFCNDPFLGVYYHKNNKSWMESEFRVYSSANNCTFEYVSQPFLMDLEGKQGNFKNLREFVFKNIDGYFKIYSKHTPINLVRDLPQGFSALEPLVDLPIGINITRFQTLLALHRSYLTPGDSSSGWTAGAAAYYVGYLQPRTFLLKYNENGTITDAVDCALDPLSETKCTLKSFTVEKGIYQTSNFRVQPTESIVRFPNITNLCPFGEVFNATRFASVYAWNRKRISNCVADYSVLYNSASFSTFKCYGVSPTKLNDLCFTNVYADSFVIRGDEVRQIAPGQTGKIADYNYKLPDDFTGCVIAWNSNNLDSKVGGNYNYLYRLFRKSNLKPFERDISTEIYQAGSTPCNGVEGFNCYFPLQSYGFQPTNGVGYQPYRVVVLSFELLHAPATVCGPKKSTNLVKNKCVNFNFNGLTGTGVLTESNKKFLPFQQFGRDIADTTDAVRDPQTLEILDITPCSFGGVSVITPGTNTSNQVAVLYQDVNCTEVPVAIHADQLTPTWRVYSTGSNVFQTRAGCLIGAEHVNNSYECDIPIGAGICASYQTQTNSPRRARSVASQSIIAYTMSLGAENSVAYSNNSIAIPTNFTISVTTEILPVSMTKTSVDCTMYICGDSTECSNLLLQYGSFCTQLNRALTGIAVEQDKNTQEVFAQVKQIYKTPPIKDFGGFNFSQILPDPSKPSKRSFIEDLLFNKVTLADAGFIKQYGDCLGDIAARDLICAQKFNGLTVLPPLLTDEMIAQYTSALLAGTITSGWTFGAGAALQIPFAMQMAYRFNGIGVTQNVLYENQKLIANQFNSVIGKIQDSLSSTASALGKLQDVVNQNAQALNTLVKQLSSNFGAISSVLNDILSRLDKVEAEVQIDRLITGRLQSLQTYVTQQLIRAAEIRASANLAATKMSECVLGQSKRVDFCGKGYHLMSFPQSAPHGVVFLHVTYVPAQEKNFTTAPAICHDGKAHFPREGVFVSNGTHWFVTQRNFYEPQIITTDNTFVSGNCDVVIGIVNNTVYDPLQPELDSFKEELDKYFKNHTSPDVDLGDISGINASVVNIQKEIDRLNEVAKNLNESLIDLQELGKYEQYIK

SEQ ID NO: 1626 - protein, 1211 aa, Artificial Sequence
  SARS-CoV-2/Guangdong/GD2020087-P0008/2020__EPI_ISL_413863 spike protein (1-1211)
MFVFLVLLPLVSSQCVNLTTRTQLPPAYTNSFTRGVYYPDKVFRSSVLHSTQDLFLPFFSNVTWFHAIHVSGTNGTKRFDNPVLPFNDGVYFASTEKSNIIRGWIFGTTLDSKTQSLLIVNNATNVVIKVCEFQFCNDPFLGVYYHKNNKSWMESEFRVYSSANNCTFEYVSQPFLMDLEGKQGNFKNLREFVFKNIDGYFKIYSKHTPINLVRDLPQGFSALEPLVDLPIGINITRFQTLLALHRSYLTPGDSSSGWTAGAAAYYVGYLQPRTFLLKYNENGTITDAVDCALDPLSETKCTLKSFTVEKGIYQTSNFRVQPTESIVRFPNITNLCPFGEVFNATRFASVYAWNRKRISNCVADYSVLYNSASFSTFKCYGVSPTKLNDLCFTNVYADSFVIRGDEVREIAPGQTGKIADYNYKLPDDFTGCVIAWNSNNLDSKVGGNYNYLYRLFRKSNLKPFERDISTEIYQAGSTPCNGVEGFNCYFPLQSYGFQPTNGVGYQPYRVVVLSFELLHAPATVCGPKKSTNLVKNKCVNFNFNGLTGTGVLTESNKKFLPFQQFGRDIADTTDAVRDPQTLEILDITPCSFGGVSVITPGTNTSNQVAVLYQDVNCTEVPVAIHADQLTPTWRVYSTGSNVFQTRAGCLIGAEHVNNSYECDIPIGAGICASYQTQTNSPRRARSVASQSIIAYTMSLGAENSVAYSNNSIAIPTNFTISVTTEILPVSMTKTSVDCTMYICGDSTECSNLLLQYGSFCTQLNRALTGIAVEQDKNTQEVFAQVKQIYKTPPIKDFGGFNFSQILPDPSKPSKRSFIEDLLFNKVTLADAGFIKQYGDCLGDIAARDLICAQKFNGLTVLPPLLTDEMIAQYTSALLAGTITSGWTFGAGAALQIPFAMQMAYRFNGIGVTQNVLYENQKLIANQFNSAIGKIQDSLSSTASALGKLQDVVNQNAQALNTLVKQLSSNFGAISSVLNDILSRLDKVEAEVQIDRLITGRLQSLQTYVTQQLIRAAEIRASANLAATKMSECVLGQSKRVDFCGKGYHLMSFPQSAPHGVVFLHVTYVPAQEKNFTTAPAICHDGKAHFPREGVFVSNGTHWFVTQRNFYEPQIITTDNTFVSGNCDVVIGIVNNTVYDPLQPELDSFKEELDKYFKNHTSPDVDLGDISGINASVVNIQKEIDRLNEVAKNLNESLIDLQELGKYEQYIK

SEQ ID NO: 1627 - protein, 1211 aa, Artificial Sequence
  SARS-CoV-2/Sweden/01/2020__EPI_ISL_411951 spike protein (1-1211)
MFVFLVLLPLVSSQCVNLTTRTQLPPAYTNSFTRGVYYPDKVFRSSVLHSTQDLFLPFFSNVTWFHAIHVSGTNGTKRFDNPVLPFNDGVYFASTEKSNIIRGWIFGTTLDSKTQSLLIVNNATNVVIKVCEFQFCNDPFLGVYYHKNNKSWMESEFRVYSSANNCTFEYVSQPFLMDLEGKQGNFKNLREFVFKNIDGYFKIYSKHTPINLVRDLPQGFSALEPLVDLPIGINITRFQTLLALHRSYLTPGDSSSGWTAGAAAYYVGYLQPRTFLLKYNENGTITDAVDCALDPLSETKCTLKSFTVEKGIYQTSNFRVQPTESIVRFPNITNLCPFGEVFNATRFASVYAWNRKRISNCVADYSVLYNSASFSTFKCYGVSPTKLNDLCFTNVYADSFVIRGDEVRQIAPGQTGKIADYNYKLPDDFTGCVIAWNSNNLDSKVGGNYNYLYRLFRKSNLKPFERDISTEIYQAGSTPCNGVEGFNCYFPLQSYGFQPTNGVGYQPYRVVVLSFELLHAPATVCGPKKSTNLVKNKCVNFNFNGLTGTGVLTESNKKFLPFQQFGRDIADTTDAVRDPQTLEILDITPCSFGGVSVITPGTNTSNQVAVLYQDVNCTEVPVAIHADQLTPTWRVYSTGSNVFQTRAGCLIGAEHVNNSYECDIPIGAGICASYQTQTNSPRRARSVASQSIIAYTMSLGAENSVAYSNNSIAIPTNFTISVTTEILPVSMTKTSVDCTMYICGDSTECSNLLLQYGSFCTQLNRALTGIAVEQDKNTQEVFAQVKQIYKTPPIKDCGGFNFSQILPDPSKPSKRSFIEDLLFNKVTLADAGFIKQYGDCLGDIAARDLICAQKFNGLTVLPPLLTDEMIAQYTSALLAGTITSGWTFGAGAALQIPFAMQMAYRFNGIGVTQNVLYENQKLIANQFNSAIGKIQDSLSSTASALGKLQDVVNQNAQALNTLVKQLSSNFGAISSVLNDILSRLDKVEAEVQIDRLITGRLQSLQTYVTQQLIRAAEIRASANLAATKMSECVLGQSKRVDFCGKGYHLMSFPQSAPHGVVFLHVTYVPAQEKNFTTAPAICHDGKAHFPREGVFVSNGTHWFVTQRNFYEPQIITTDNTFVSGNCDVVIGIVNNTVYDPLQPELDSFKEELDKYFKNHTSPDVDLGDISGINASVVNIQKEIDRLNEVAKNLNESLIDLQELGKYEQYIK

SEQ ID NO: 1628 - protein, 1211 aa, Artificial Sequence
  SARS-CoV-2/Tianmen/HBCDC-HB-07/2020__EPI_ISL_412983 spike protein (1-1211)
MFVFLVLLPLVSSQCVNLTTRTQLPPAYTNSFTRGVYYPDKVFRSSVLHSTQDLFLPFFSNVTWFHAIHVSGTNGTKRFDNPVLPFNDGVYFASTEKSNIIRGWIFGTTLDSKTQSLLIVNNATNVVIKVCEFQFCNDPFLGVYYHKNNKSWMESEFRVYSSANNCTFEYVSQPFLMDLEGKQGNFKNLREFVFKNIDGYFKIYSKHTPINLVRDLPQGFSALEPLVDLPIGINITRFQTLLALHRSYLTPGDSSSGWTAGAAAYYVGYLQPRTFLLKYNENGTITDAVDCALDPLSETKCTLKSFTVEKGIYQTSNFRVQPTESIVRFPNITNLCPFGEVFNATRFASVYAWNRKRISNCVADYSVLYNSASFSTFKCYGVSPTKLNDLCFTNVYADSFVIRGDEVRQIAPGQTGKIADYNYKLPDDFTGCVIAWNSNNLDSKVGGNYNYLYRLFRKSNLKPFERDISTEIYQAGSTPCNGVEGFNCYFPLQSYGFQPTNGVGYQPYRVVVLSFELLHAPATVCGPKKSTNLVKNKCVNFNFNGLTGTGVLTESNKKFLPFQQFGRDIADTTDAVRDPQTLEILDITPCSFGGVSVITPGTNTSNQVAVLYQDLNCTEVPVAIHADQLTPTWRVYSTGSNVFQTRAGCLIGAEHVNNSYECDIPIGAGICASYQTQTNSPRRARSVASQSIIAYTMSLGAENSVAYSNNSIAIPTNFTISVTTEILPVSMTKTSVDCTMYICGDSTECSNLLLQYGSFCTQLNRALTGIAVEQDKNTQEVFAQVKQIYKTPPIKDFGGFNFSQILPDPSKPSKRSFIEDLLFNKVTLADAGFIKQYGDCLGDIAARDLICAQKFNGLTVLPPLLTDEMIAQYTSALLAGTITSGWTFGAGAALQIPFAMQMAYRFNGIGVTQNVLYENQKLIANQFNSAIGKIQDSLSSTASALGKLQDVVNQNAQALNTLVKQLSSNFGAISSVLNDILSRLDKVEAEVQIDRLITGRLQSLQTYVTQQLIRAAEIRASANLAATKMSECVLGQSKRVDFCGKGYHLMSFPQSAPHGVVFLHVTYVPAQEKNFTTAPAICHDGKAHFPREGVFVSNGTHWFVTQRNFYEPQIITTDNTFVSGNCDVVIGIVNNTVYDPLQPELDSFKEELDKYFKNHTSPDVDLGDISGINASVVNIQKEIDRLNEVAKNLNESLIDLQELGKYEQYIK

SEQ ID NO: 1629 - protein, 1211 aa, Artificial Sequence
  SARS-CoV-2/Hong Kong/case42_VM20002493/2020__EPI_ISL_414527 spike protein (1-1211)
MFVFLVLLPLVSSQCVNLTTRTQLPPAYTNSFTRGVYYPDKVFRSSVLHSTQDLFLPFFSNVTWFHAIHVSGTNGTKRFDNPVLPFNDGVYFASTEKSNIIRGWIFGTTLDSKTQSLLIVNNATNVVIKVCEFQFCNDPFLGVYYHKNNKSWMESEFRVYSSANNCTFEYVSQPFLMDLEGKQGNFKNLREFVFKNIDGYFKIYSKHTPINLVRDLPQGFSALEPLVDLPIGINITRFQTLLALHRSYLTPGDSSSGWTAGAAAYYVGYLQPRTFLLKYNENGTITDAVDCALDPLSETKCTLKSFTVEKGIYQTSNFRVQPTESIVRFPNITNLCPFGEVFNATRFASVYAWNRKRISNCVADYSVLYNSASFSTFKCYGVSPTKLNDLCFTNVYADSFVIRGDEVRQIAPGQTGKIADYNYKLPDDFTGCVIAWNSNNLDSKVGGNYNYLYRLFRKSNLKPFERDISTEIYQAGSTPCNGVEGFNCYFPLQSYGFQPTNGVGYQPYRVVVLSFELLHAPATVCGPKKSTNLVKNKCVNFNFNGLTGTGVLTESNKKFLPFQQFGRDIADTTDAVRDPQTLEILDITPCSFGGVSVITPGTNTSNQVAVLYQDVNCTEVPVAIHADQLTPTWRVYSTGSNVFQTRAGCLIGAEHVNNSYECDIPIGAGICASYQTQTNSPRRARSVASQSIIAYTMSLGAENSVAYSNNSIAIPTNFAISVTTEILPVSMTKTSVDCTMYICGDSTECSNLLLQYGSFCTQLNRALTGIAVEQDKNTQEVFAQVKQIYKTPPIKDFGGFNFSQILPDPSKPSKRSFIEDLLFNKVTLADAGFIKQYGDCLGDIAARDLICAQKFNGLTVLPPLLTDEMIAQYTSALLAGTITSGWTFGAGAALQIPFAMQMAYRFNGIGVTQNVLYENQKLIANQFNSAIGKIQDSLSSTASALGKLQDVVNQNAQALNTLVKQLSSNFGAISSVLNDILSRLDKVEAEVQIDRLITGRLQSLQTYVTQQLIRAAEIRASANLAATKMSECVLGQSKRVDFCGKGYHLMSFPQSAPHGVVFLHVTYVPAQEKNFTTAPAICHDGKAHFPREGVFVSNGTHWFVTQRNFYEPQIITTDNTFVSGNCDVVIGIVNNTVYDPLQPELDSFKEELDKYFKNHTSPDVDLGDISGINASVVNIQKEIDRLNEVAKNLNESLIDLQELGKYEQYIK

SEQ ID NO: 1630 - protein, 1211 aa, Artificial Sequence
  SARS-CoV-2/USA/CruiseA-23/2020__EPI_ISL_414482 spike protein (1-1211)
MFVFLVLLPLVSSQCVNLTTRTQLPPAYTNSFTRGVYYPDKVFRSSVLHSTQDLFLPFFSNVTWFHAIHVSGTNGTKRFDNPVLPFNDGVYFASTEKSNIIRGWIFGTTLDSKTQSLLIVNNATNVVIKVCEFQFCNDPFLGVYYHKNNKSWMESEFRVYSSANNCTFEYVSQPFLMDLEVKQGNFKNLREFVFKNIDGYFKIYSKHTPINLVRDLPQGFSALEPLVDLPIGINITRFQTLLALHRSYLTPGDSSSGWTAGAAAYYVGYLQPRTFLLKYNENGTITDAVDCALDPLSETKCTLKSFTVEKGIYQTSNFRVQPTESIVRFPNITNLCPFGEVFNATRFASVYAWNRKRISNCVADYSVLYNSASFSTFKCYGVSPTKLNDLCFTNVYADSFVIRGDEVRQIAPGQTGKIADYNYKLPDDFTGCVIAWNSNNLDSKVGGNYNYLYRLFRKSNLKPFERDISTEIYQAGSTPCNGVEGFNCYFPLQSYGFQPTNGVGYQPYRVVVLSFELLHAPATVCGPKKSTNLVKNKCVNFNFNGLTGTGVLTESNKKFLPFQQFGRDIADTTDAVRDPQTLEILDITPCSFGGVSVITPGTNTSNQVAVLYQDVNCTEVPVAIHADQLTPTWRVYSTGSNVFQTRAGCLIGAEHVNNSYECDIPIGAGICASYQTQTNSPRRARSVASQSIIAYTMSLGAENSVAYSNNSIAIPTNFTISVTTEILPVSMTKTSVDCTMYICGDSTECSNLLLQYGSFCTQLNRALTGIAVEQDKNTQEVFAQVKQIYKTPPIKDFGGFNFSQILPDPSKPSKRSFIEDLLFNKVTLADAGFIKQYGDCLGDIAARDLICAQKFNGLTVLPPLLTDEMIAQYTSALLAGTITSGWTFGAGAALQIPFAMQMAYRFNGIGVTQNVLYENQKLIANQFNSAIGKIQDSLSSTASALGKLQDVVNQNAQALNTLVKQLSSNFGAISSVLNDILSRLDKVEAEVQIDRLITGRLQSLQTYVTQQLIRAAEIRASANLAATKMSECVLGQSKRVDFCGKGYHLMSFPQSAPHGVVFLHVTYVPAQEKNFTTAPAICHDGKAHFPREGVFVSNGTHWFVTQRNFYEPQIITTDNTFVSGNCDVVIGIVNNTVYDPLQPELDSFKEELDKYFKNHTSPDVDLGDISGINASVVNIQKEIDRLNEVAKNLNESLIDLQELGKYEQYIK

SEQ ID NO: 1631 - protein, 1211 aa, Artificial Sequence
  SARS-CoV-2/Hong Kong/case85_VM20002868/2020__EPI_ISL_414519 spike protein (1-1211)
MFVFLVLVPLVSSQCVNLTTRTQLPPAYTNSFTRGVYYPDKVFRSSVLHSTQDLFLPFFSNVTWFHAIHVSGTNGTKRFDNPVLPFNDGVYFASTEKSNIIRGWIFGTTLDSKTQSLLIVNNATNVVIKVCEFQFCNDPFLGVYYHKNNKSWMESEFRVYSSANNCTFEYVSQPFLMDLEGKQGNFKNLREFVFKNIDGYFKIYSKHTPINLVRDLPQGFSALEPLVDLPIGINITRFQTLLALHRSYLTPGDSSSGWTAGAAAYYVGYLQPRTFLLKYNENGTITDAVDCALDPLSETKCTLKSFTVEKGIYQTSNFRVQPTESIVRFPNITNLCPFGEVFNATRFASVYAWNRKRISNCVADYSVLYNSASFSTFKCYGVSPTKLNDLCFTNVYADSFVIRGDEVRQIAPGQTGKIADYNYKLPDDFTGCVIAWNSNNLDSKVGGNYNYLYRLFRKSNLKPFERDISTEIYQAGSTPCNGVEGFNCYFPLQSYGFQPTNGVGYQPYRVVVLSFELLHAPATVCGPKKSTNLVKNKCVNFNFNGLTGTGVLTESNKKFLPFQQFGRDIADTTDAVRDPQTLEILDITPCSFGGVSVITPGTNTSNQVAVLYQDVNCTEVPVAIHADQLTPTWRVYSTGSNVFQTRAGCLIGAEHVNNSYECDIPIGAGICASYQTQTNSPRRARSVASQSIIAYTMSLGAENSVAYSNNSIAIPTNFTISVTTEILPVSMTKTSVDCTMYICGDSTECSNLLLQYGSFCTQLNRALTGIAVEQDKNTQEVFAQVKQIYKTPPIKDFGGFNFSQILPDPSKPSKRSFIEDLLFNKVTLADAGFIKQYGDCLGDIAARDLICAQKFNGLTVLPPLLTDEMIAQYTSALLAGTITSGWTFGAGAALQIPFAMQMAYRFNGIGVTQNVLYENQKLIANQFNSAIGKIQDSLSSTASALGKLQDVVNQNAQALNTLVKQLSSNFGAISSVLNDILSRLDKVEAEVQIDRLITGRLQSLQTYVTQQLIRAAEIRASANLAATKMSECVLGQSKRVDFCGKGYHLMSFPQSAPHGVVFLHVTYVPAQEKNFTTAPAICHDGKAHFPREGVFVSNGTHWFVTQRNFYEPQIITTDNTFVSGNCDVVIGIVNNTVYDPLQPELDSFKEELDKYFKNHTSPDVDLGDISGINASVVNIQKEIDRLNEVAKNLNESLIDLQELGKYEQYIK

SEQ ID NO: 1632 - protein, 1211 aa, Artificial Sequence; identical to SEQ ID NO: 39
  SARS-CoV-2/England/200990660/2020__EPI_ISL_414523 spike protein (1-1211)

SEQ ID NO: 1633 - protein, 1211 aa, Artificial Sequence
  SARS-CoV-2/Australia/NSW09/2020__EPI_ISL_413595 spike protein (1-1211)
MFVFLVLLPLVSSQCVNLTTRTQLPPAYTNSFTRGVYYPDKVFRSSVLHSTQDLFLPFFSNVTWFHAIHVSGTNGTKRFDNPVLPFNDGVYFASTEKSNIIRGWIFGTTLDSKTQSLLIVNNATNVVIKVCEFQFCNDPFLGVYYHKNNKSWMESEFRVYSSANNCTFEYVSQPFLMDLEGKQGNFKNLREFVFKNIDGYFKIYSKHTPINLVRDLPQGFSALEPLVDLPIGINITRFQTLLALHRSYLTPGDSSSGWTAGAAAYYVGYLQPRTFLLKYNENGTITDAVDCALDPLSETKCTLKSFTVEKGIYQTSNFRVQPTESIVRFPNITNLCPFGEVFNATRFASVYAWNRKRISNCVADYSVLYNSASFSTFKCYGVSPTKLNDLCFTNVYADSFVIRGDEVRQIAPGQTGKIADYNYKLPDDFTGCVIAWNSNNLDSKVGGNYNYLYRLFRKSNLKPFERDISTEIYQAGSTPCNGVEGFNCYFPLQSYGFQPTNGVGYQPYRVVVLSFELLHAPATVCGPKKSTNLVKNKCVNFNFNGLTGTGVLTESNKKFLPFQQFGRDIADTTDAVRDPQTLEILDITPCSFGGVSVITPGTNTSNQVAVLYQDVNCTEVPVAIHADQLTPTWRVYSTGSNVFQTRAGCLIGAEHVNNSYECDIPIGAGICASYQTQTNSPRRARSVASQSIIAYTMSLGAENSVAYSNNSIAIPTNFTISVTTEILPVSMTKTSVDCTMYICGDSTECSNLLLQYGSFCTQLNRALTGIAVEQDKNTQEVFAQVKQIYKTPPIKDFGGFNFSQILPDPSKPSKRSFIEDLLFNKVTLADAGFIKQYGDCLGDIAARDLICAQKFNGLTVLPPLLTDEMIAQYTSALLAGTITSGWTFGAGAALQIPFAMQMAYRFNGIGVTQNVLYENQKLIANQFNSAIGKIQDSLSFTASALGKLQDVVNQNAQALNTLVKQLSSNFGAISSVLNDILSRLDKVEAEVQIDRLITGRLQSLQTYVTQQLIRAAEIRASANLAATKMSECVLGQSKRVDFCGKGYHLMSFPQSAPHGVVFLHVTYVPAQEKNFTTAPAICHDGKAHFPREGVFVSNGTHWFVTQRNFYEPQIITTDNTFVSGNCDVVIGIVNNTVYDPLQPELDSFKEELDKYFKNHTSPDVDLGDISGINASVVNIQKEIDRLNEVAKNLNESLIDLQELGKYEQYIK

SEQ ID NO: 1634 - protein, 1211 aa, Artificial Sequence; identical to SEQ ID NO: 31
  SARS-CoV-2/Australia/NSW10/2020__EPI_ISL_413596 spike protein (1-1211)

SEQ ID NO: 1635 - protein, 1211 aa, Artificial Sequence
  SARS-CoV-2/Switzerland/1000477797/2020__EPI_ISL_413023 spike protein (1-1211)
MFVFLVLLPLVSSQCVNLTTRTQLPPAYTNSFTRGVYYPDKVFRSSVLHSTQDLFLPFFSNVTWFHAIHVSGTNGTKRFDNPVLPFNDGVYFASTEKSNIIRGWIFGTTLDSKTQSLLIVNNATNVVIKVCEFQFCNDPFLGVYYHKNNKSWMESEFRVYSSANNCTFEYVSQPFLMDLEGKQGNFKNLREFVFKNIDGYFNIYSKHTPINLVRDLPQGFSALEPLVDLPIGINITRFQTLLALHRSYLTPGDSSSGWTAGAAAYYVGYLQPRTFLLKYNENGTITDAVDCALDPLSETKCTLKSFTVEKGIYQTSNFRVQPTESIVRFPNITNLCPFGEVFNATRFASVYAWNRKRISNCVADYSVLYNSASFSTFKCYGVSPTKLNDLCFTNVYADSFVIRGDEVRQIAPGQTGKIADYNYKLPDDFTGCVIAWNSNNLDSKVGGNYNYLYRLFRKSNLKPFERDISTEIYQAGSTPCNGVEGFNCYFPLQSYGFQPTNGVGYQPYRVVVLSFELLHAPATVCGPKKSTNLVKNKCVNFNFNGLTGTGVLTESNKKFLPFQQFGRDIADTTDAVRDPQTLEILDITPCSFGGVSVITPGTNTSNQVAVLYQGVNCTEVPVAIHADQLTPTWRVYSTGSNVFQTRAGCLIGAEHVNNSYECDIPIGAGICASYQTQTNSPRRARSVASQSIIAYTMSLGAENSVAYSNNSIAIPTNFTISVTTEILPVSMTKTSVDCTMYICGDSTECSNLLLQYGSFCTQLNRALTGIAVEQDKNTQEVFAQVKQIYKTPPIKDFGGFNFSQILPDPSKPSKRSFIEDLLFNKVTLADAGFIKQYGDCLGDIAARDLICAQKFNGLTVLPPLLTDEMIAQYTSALLAGTITSGWTFGAGAALQIPFAMQMAYRFNGIGVTQNVLYENQKLIANQFNSAIGKIQDSLSSTASALGKLQDVVNQNAQALNTLVKQLSSNFGAISSVLNDILSRLDKVEAEVQIDRLITGRLQSLQTYVTQQLIRAAEIRASANLAATKMSECVLGQSKRVDFCGKGYHLMSFPQSAPHGVVFLHVTYVPAQEKNFTTAPAICHDGKAHFPREGVFVSNGTHWFVTQRNFYEPQIITTDNTFVSGNCDVVIGIVNNTVYDPLQPELDSFKEELDKYFKNHTSPDVDLGDISGINASVVNIQKEIDRLNEVAKNLNESLIDLQELGKYEQYIK

SEQ ID NO: 1636 - protein, 1211 aa, Artificial Sequence
  SARS-CoV-2/Belgium/BA-02291/2020__EPI_ISL_415159 spike protein (1-1211)
MFVFLVLLPLVSSQCVNLTTRTQLPPAYTNSFTRGVYYPDKVFRSSVLHSTQDLFLPFFSNVTWFHAIHVSGTNGTKRFDNPVLPFNDGVYFASTEKSNIIRGWIFGTTLDSKTQSLLIVNNATNVVIKVCEFQFCNDPFLGVYYHKNNKSWMESEFRVYSSANNCTFEYVSQPFLMDLEGKQGNFKNLREFVFKNIDGYFKIYSKHTPINLVRDLPQGFSALEPLVDLPIGINITRFQTLLALHRSYLTPGDSSSGWTAGAAAYYVGYLQPRTFLLKYNENGTITDAVDCALDPLSETKCTLKSFTVEKGIYQTSNFRVQPTESIVRFPNITNLCPFGEVFNATRFASVYAWNRKRISNCVADYSVLYNSASFSTFKCYGVSPTKLNDLCFTNVYADSFVIRGDEVRQIAPGQTGKIADYNYKLPDDFTGCVIAWNSNNLDSKVGGNYNYLYRLFRRSNLKPFERDISTEIYQAGSTPCNGVEGFNCYFPLQSYGFQPTNGVGYQPYRVVVLSFELLPAPATVCGPKKSTNLVKNKCVNFNFNGLTGTGVLTESNKKFLPFQQFGRDIADTTDAVRDPQTLEILDITPCSFGGVSVITPGTNTSNQVAVLYQGVNCTEVPVAIHADQLTPTWRVYSTGSNVFQTRAGCLIGAEHVNNSYECDIPIGAGICASYQTQTNSPRRARSVASQSIIAYTMSLGAENSVAYSNNSIAIPTNFTISVTTEILPVSMTKTSVDCTMYICGDSTECSNLLLQYGSFCTQLNRALTGIAVEQDKNTQEVFAQVKQIYKTPPIKDFGGFNFSQILPDPSKPSKRSFIEDLLFNKVTLADAGFIKQYGDCLGDIAARDLICAQKFNGLTVLPPLLTDEMIAQYTSALLAGTITSGWTFGAGAALQIPFAMQMAYRFNGIGVTQNVLYENQKLIANQFNSAIGKIQDSLSSAAPALGKLQDVVNQNAQALNTLVKQLSSNFGAISSVLNDILSRLDKVEAEVQIDRLITGRLQSLQTYVTQQLIRAAEIRASANLAATKMSECVLGQSKRVDFCGKGYHLMSFPQSAPHGVVFLHVTYVPAQEKNFTTAPAICHDGKAHFPREGVFVSNGTHWFVTQRNFYEPQIITTDNTFVSGNCDVVIGIVNNTVYDPLQPELDSFKEELDKYFKNHTSPDVDLGDISGINASVVNIQKEIDRLNEVAKNLNESLIDLQELGKYEQYIK

SEQ ID NO: 1637 - protein, 1211 aa, Artificial Sequence
  SARS-CoV-2/USA/WA8-UW5/2020__EPI_ISL_413486 spike protein (1-1211)
MFVFLVLLPLVSSQCVNLTTRTQLPPAYTNSFTRGVYYPDKVFRSSVLHSTQDLFLPFFSNVTWFHAIHVSGTNGTKRFDNPVLPFNDGVYFASTEKSNIIRGWIFGTTLDSKTQSLLIVNNATNVVIKVCEFQFCNDPFLGVYYHKNNKSWMESEFRVYSSANNCTFEYVSQPFLMDLEGKQGNFKNLREFVFKNIDGYFKIYSKHTPINLVRDLPQGFSALEPLVDLPIGINITRFQTLLALHRSYLTPGDSSSGWTAGAAAYYVGYLQPRTFLLKYNENGTITDAVDCALDPLSETKCTLKSFTVEKGIYQTSNFRVQPTESIVRFPNITNLCPFGEVFNATRFASVYAWNRKRISNCVADYSVLYNSASFSTFKCYGVSPTKLNDLCFTNVYADSFVIRGDEVRQIAPGQTGKIADYNYKLPDDFTGCVIAWNSNNLDSKVGGNYNYLYRLFRKSNLKPFERDISTEIYQAGSTPCNGVEGFNCYFPLQSYGFQPTNGVGYQPYRVVVLSFELLHAPATVCGPKKSTNLVKNKCVNFNFNGLTGTGVLTESNKKFLPFQQFGRDIADTTDAVRDPQTLEILDITPCSFGGVSVITPGTNTSNQVAVLYQDVNCTEVPVAIHADQLTPTWRVYSTGSNVFQTRAGCLIGAEYVNNSYECDIPIGAGICASYQTQTNSPRRARSVASQSIIAYTMSLGAENSVAYSNNSIAIPTNFTISVTTEILPVSMTKTSVDCTMYICGDSTECSNLLLQYGSFCTQLNRALTGIAVEQDKNTQEVFAQVKQIYKTPPIKDFGGFNFSQILPDPSKPSKRSFIEDLLFNKVTLADAGFIKQYGDCLGDIAARDLICAQKFNGLTVLPPLLTDEMIAQYTSALLAGTITSGWTFGAGAALQIPFAMQMAYRFNGIGVTQNVLYENQKLIANQFNSAIGKIQDSLSSTASALGKLQDVVNQNAQALNTLVKQLSSNFGAISSVLNDILSRLDKVEAEVQIDRLITGRLQSLQTYVTQQLIRAAEIRASANLAATKMSECVLGQSKRVDFCGKGYHLMSFPQSAPHGVVFLHVTYVPAQEKNFTTAPAICHDGKAHFPREGVFVSNGTHWFVTQRNFYEPQIITTDNTFVSGNCDVVIGIVNNTVYDPLQPELDSFKEELDKYFKNHTSPDVDLGDISGINASVVNIQKEIDRLNEVAKNLNESLIDLQELGKYEQYIK

SEQ ID NO: 1638 - protein, 1211 aa, Artificial Sequence
  SARS-CoV-2/England/20102000506/2020__EPI_ISL_415147 spike protein (1-1211)
MFVFLVLLPLVSSQCVNLTTRTQLPPAYTNSFTRGVYYPDKVFRSSVLHSTQDLFLPFFSNVTWFHAIHVSGTNGTKRFDNPVLPFNDGVYFASTEKSNIIRGWIFGTTLDSKTQSLLIVNNATNVVIKVCEFQFCNDPFLGVYYHKNNKSWMESEFRVYSSANNCTFEYVSQPFLMDLEGKQGNFKNLREFVFKNIDGYFKIYSKHTPINLVRDLPQGFSALEPLVDLPIGINITRFQTLLALHRSYLTPGDSSSGWTAGAAAYYVGYLQPRTFLLKYNENGTITDAVDCALDPLSETKCTLKSFTVEKGIYQTSNFRVQPTESIVRFPNITNLCPFGEVFNATRFASVYAWNRKRISNCVADYSVLYNSASFSTFKCYGVSPTKLNDLCFTNVYADSFVIRGDEVRQIAPGQTGKIADYNYKLPDDFTGCVIAWNSNNLDSKVGGNYNYLYRLFRKSNLKPFERDISTEIYQAGSTPCNGVEGFNCYFPLQSYGFQPTNGVGYQPYRVVVLSFELLHAPATVCGPKKSTNLVKNKCVNFNFNGLTGTGVLTESNKKFLPFQQFGRDIADTTDAVRDPQTLEILDITPCSFGGVSVITPGTNTSNQVAVLYQGVNCTEVPVAIHADQLTPTWRVYSTGSNVFQTRAGCLIGAEHVNNSYECDIPIGAGICASYQTQTNSPRRARSVASQSIIAYTMSLGAENSVAYSNNSIAIPTNFTISVTTEILPVSMTKTSVDCTMYICGDSTECSNLLLQYGSFCTQLNRALTGIAVEQDKNTQEVFAQVKQIYKTPPIKDFGGFNFSQILPDPSKPSKRSFIEDLLFNKVTLADAGFIKQYGYCLGDIAARDLICAQKFNGLTVLPPLLTDEMIAQYTSALLAGTITSGWTFGAGAALQIPFAMQMAYRFNGIGVTQNVLYENQKLIANQFNSAIGKIQDSLSSTASALGKLQDVVNQNAQALNTLVKQLSSNFGAISSVLNDILSRLDKVEAEVQIDRLITGRLQSLQTYVTQQLIRAAEIRASANLAATKMSECVLGQSKRVDFCGKGYHLMSFPQSAPHGVVFLHVTYVPAQEKNFTTAPAICHDGKAHFPREGVFVSNGTHWFVTQRNFYEPQIITTDNTFVSGNCDVVIGIVNNTVYDPLQPELDSFKEELDKYFKNHTSPDVDLGDISGINASVVNIQKEIDRLNEVAKNLNESLIDLQELGKYEQYIK

SEQ ID NO: 1639 - protein, 1211 aa, Artificial Sequence
  SARS-CoV-2/Belgium/VAG-03013/2020__EPI_ISL_415155 spike protein (1-1211)
MFVFLVLLPLVSSQCVNLTTRTQLPPAYTNSFTRGVYYPDKVFRSSVLHSTQDLFLPFFSNVTWFHAIHVSGTNGTKRFDNPVLPFNDGVYFASTEKSNIIRGWIFGTTLDSKTQSLLIVNNATNVVIKVCEFQFCNDPFLGVYYHKNNKSWMESEFRVYSSANNCTFEYVSQPFLMDLEGKQGNFKNLREFVFKNIDGYFKIYSKHTPINLVRDLPQGFSALEPLVDLPIGINITRFQTLLALHRSYLTPGDSSSGWTAGAAAYYVGYLQPRTFLLKYNENGTITDAVDCALDPLSETKCTLKSFTVEKGIYQTSNFRVQPTESIVRFPNITNLCPFGEVFNATRFASVYAWNRKRISNCVADYSVLYNSASFSTFKCYGVSPTKLNDLCFTNVYADSFVIRGDEVRQIAPGQTGKIADYNYKLPDDFTGCVIAWNSNNLDSKVGGNYNYLYRLFRKSNLKPFERDISTEIYQAGSTPCNGVEGFNCYFPLQSYGFQPTNGVGYQPYRVVVLSFELLHAPATVCGPKKSTNLVKNKCVNFNFNGLTGTGVLTESNKKFLPFQQFGRDIADTTDAVRDPQTLEILDITPCSFGGVSVITPGTNTSNQVAVLYQGVNCTEVPVAIHADQLTPTWRVYSTGSNVFQTRAGCLIGAEHVNNSYECDIPIGAGICASYQTQTNSPRRARSVASQSIIAYTMSLGAENSVAYSNNSIAIPTNFTISVTTEILPVSMTKTSVDCTMYICGDSTECSNLLLQYGSFCTQLNRALTGIAVEQDKNTQEVFAQVKQIYKTPPIKDFGGFNFSQILPDPSKPSKRSFIEDLLFNKVTLADAGFIKQYGDCLGDIAARDLICAQKFNGLTVLPPLLTDEMIAQYTSALLAGTITSGWTFGAGAALQIPFAMQMAYRFNGIGVTQNVLYENQKLIANQFNSAIGKIQDSLSSTATALGKLQDVVNQNAQALNTLVKQLSSNFGAISSVLNDILSRLDKVEAEVQIDRLITGRLQSLQTYVTQQLIRAAEIRASANLAATKMSECVLGQSKRVDFCGKGYHLMSFPQSAPHGVVFLHVTYVPAQEKNFTTAPAICHDGKAHFPREGVFVSNGTHWFVTQRNFYEPQIITTDNTFVSGNCDVVIGIVNNTVYDPLQPELDSFKEELDKYFKNHTSPDVDLGDISGINASVVNIQKEIDRLNEVAKNLNESLIDLQELGKYEQYIK

SEQ ID NO: 1640 - protein, 1211 aa, Artificial Sequence
  SARS-CoV-2/Belgium/BC-03016/2020__EPI_ISL_415157 spike protein (1-1211)
MFVFLVLLPLVSSQCVNLTTRTQLPPAYTNSFTRGVYYPDKVFRSSVLHSTQDLFLPFFSNVTWFHAIHVSGTNGTKRFDNPVLPFNDGVYFASTEKSNIIRGWIFGTTLDSKTQSLLIVNNATNVVIKVCEFQFCNDPFLGVYYHKNNKSWMESEFRVYSSANNCTFEYVSQPFLMDLEGKQGNFKNLREFVFKNIDGYFKIYSKHTPINLVRDLPQGFSALEPLVDLPIGINITRFQTLLALHRSYLTPGDSSSGWTAGAAAYYVGYLQPRTFLLKYNENGTITDAVDCALDPLSETKCTLKSFTVEKGIYQTSNFRVQPTESIVRFPNITNLCPFGEVFNATRFASVYAWNRKRISNCVADYSVLYNSASFSTFKCYGVSPTKLNDLCFTNVYADSFVIRGDEVRQIAPGQTGKIADYNYKLPDDFTGCVIAWNSNNLDSKVGGNYNYLYRLFRKSNLKPFERDISTEIYQAGSTPCNGVEGFNCYFPLQSYGFQPTNGVGYQPYRVVVLSFELLHAPATVCGPKKSTNLVKNKCVNFNFNGLTGTGVLTESNKKFLPFQQFGRDIADTTDAVRDPQTLEILDITPCSFGGVSVITPGTNTSNQVAVLYQGVNCTEVPVAIHADQLTPTWRVYSTGSNVFQTRAGCLIGAEHVNNSYECDIPIGAGICASYQTQTNSPRRARSVASQSIIAYTMSLGAENSVAYSNNSIAIPTNFTISVTTEILPVSMTKTSVDCTMYICGDSTECSNLLLQYGSFCTQLNRALTGIAVEQDKNTQEVFAQVKQIYKTPPIKDFGGFNFSQILPDPSKPSKRSFIEDLLFNKVTLADAGFIKQYGDCLGDIAARDLICAQKFNGLTVLPPLLTDEMIAQYTSALLAGTITSGWTFGAGAALQIPFAMQMAYRFNGIGVTQNVLYENQKLIANQFNSAIGKIQDSLSSTAPALGKLQDVVNQNAQALNTLVKQLSSNFGAISSVLNDILSRLDKVEAEVQIDRLITGRLQSLQTYVTQQLIRAAEIRASANLAATKMSECVLGQSKRVDFCGKGYHLMSFPQSAPHGVVFLHVTYVPAQEKNFTTAPAICHDGKAHFPREGVFVSNGTHWFVTQRNFYEPQIITTDNTFVSGNCDVVIGIVNNTVYDPLQPELDSFKEELDKYFKNHTSPDVDLGDISGINASVVNIQKEIDRLNEVAKNLNESLIDLQELGKYEQYIK

SEQ ID NO: 1641 - protein, 1211 aa, Artificial Sequence
  SARS-CoV-2/Germany/BavPat3/2020__EPI_ISL_414521 spike protein (1-1211)
MFVFLVLLPLVSSQCVNLTTRTQLPPAYTNSFTRGVYYPDKVFRSSVLHSTQDLFLPFFSNVTWFHAIHVSGTNGTKRFDNPVLPFNDGVYFASTEKSNIIRGWIFGTTLDSKTQSLLIVNNATNVVIKVCEFQFCNDPFLGVYYHKNNKSWMESEFRVYSSANNCTFEYVSQPFLMDLEGKQGNFKNLREFVFKNIDGYFKIYSKHTPINLVRDLPQGFSALEPLVDLPIGINITRFQTLLALHRSYLTPGDSSSGWTAGAAAYYVGYLQPRTFLLKYNENGTITDAVDCALDPLSETKCTLKSFTVEKGIYQTSNFRVQPTESIVRFPNITNLCPFGEVFNATRFASVYAWNRKRISNCVADYSVLYNSASFSTFKCYGVSPTKLNDLCFTNVYADSFVIRGDEVRQIAPGQTGKIADYNYKLPDDFTGCVIAWNSNNLDSKVGGNYNYLYRLFRKSNLKPFERDISTEIYQAGSTPCNGVEGFNCYFPLQSYGFQPTNGVGYQPYRVVVLSFELLHAPATVCGPKKSTNLVKNKCVNFNFNGLTGTGVLTESNKKFLPFQQFGRDIADTTDAVRDPQTLEILDITPCSFGGVSVITPGTNTSNQVAVLYQDVNCTEVPVAIHADQLTPTWRVYSTGSNVFQTRAGCLIGAEHVNNSYECDIPIGAGICASYQTQTNSPRRARSVASQSIIAYTMSLGAENSVAYSNNSIAIPTNFTISVTTEILPVSMTKTSVDCTMYICGDSTECSNLLLQYGSFCTQLNRALTGIAVEQDKNTQQVFAQVKQIYKTPPIKDFGGFNFSQILPDPSKPSKRSFIEDLLFNKVTLADAGFIKQYGDCLGDIAARDLICAQKFNGLTVLPPLLTDEMIAQYTSALLAGTITSGWTFGAGAALQIPFAMQMAYRFNGIGVTQNVLYENQKLIANQFNSAIGKIQDSLSSTASALGKLQDVVNQNAQALNTLVKQLSSNFGAISSVLNDILSRLDKVEAEVQIDRLITGRLQSLQTYVTQQLIRAAEIRASANLAATKMSECVLGQSKRVDFCGKGYHLMSFPQSAPHGVVFLHVTYVPAQEKNFTTAPAICHDGKAHFPREGVFVSNGTHWFVTQRNFYEPQIITTDNTFVSGNCDVVIGIVNNTVYDPLQPELDSFKEELDKYFKNHTSPDVDLGDISGINASVVNIQKEIDRLNEVAKNLNESLIDLQELGKYEQYIK

SEQ ID NO: 1642 - protein, 1211 aa, Artificial Sequence
  SARS-CoV-2/France/HF1805/2020__EPI_ISL_414628 spike protein (1-1211)
MFVFLVLLPLVSSQCVNLTTRTQLPPAYTNSFTRGVYYPDKVFRSSVLHSTQDLFLPFFSNVTWFHAIHVSGTNGTKRFDNPVLPFNDGVYFASTEKSNIIRGWIFGTTLDSKTQSLLIVNNATNVVIKVCEFQFCNDPFLGVYYHKNNKSWMESEFRVYSSANNCTFEYVSQPFLMDLEGKQGNFKNLREFVFKNIDGYFKIYSKHTPINLVRDLPQGFSALEPLVDLPIGINITRFQTLLALHRSYLTPGDSSSGWTAGAAAYYVGYLQPRTFLLKYNENGTITDAVDCALDPLSETKCTLKSFTVEKGIYQTSNFRVQPTESIVRFPNITNLCPFGEVFNATRFASVYAWNRKRISNCVADYSVLYNSASFSTFKCYGVSPTKLNDLCFTNVYADSFVIRGDEVRQIAPGQTGKIADYNYKLPDDFTGCVIAWNSNNLDSKVGGNYNYLYRLFRKSNLKPFERDISTEIYQAGSTPCNGVEGFNCYFPLQSYGFQPTNGVGYQPYRVVVLSFELLHAPATVCGPKKSTNLVKNKCVNFNFNGLTGTGVLTESNKKFLPFQQFGRDIADTTDAVRDPQTLEILDITPCSFGGVSVITPGTNTSNQVAVLYQGVNCTEVPVAIHADQLTPTWRVYSTGSNVFQTRAGCLIGAEHVNNSYECDIPIGAGICASYQTQTNSPRRARSVASQSIIAYTMSLGAENSVAYSNNSIAIPTNFTISVTTEILPVSMTKTSVDCTMYICGDSTECSNLLLQYGSFCTQLNRALTGIAVEQDKNTQEVFAQVKQIYKTPPIKDFGGFNFSQILPDPSKPSKRSFIEDLLFNKVTLADAGFIKQYGDCLGDIAARDLICAQKFNGLTVLPPLLTDEMIAQYTSALLAGTITSGWTFGAGAALQIPFAMQMAYRFNGIGVTQNVLYENQKLIANQFNSAIGKIQDSLSSTASALGKLQDVVNQNAQALNTLVKQLSSNFGAISSVLNDILSRLDKVEAEVQIDRLITGRLQSLQTYVTQQLIRAAEIRASANLAATKMSECVLGQSKRVDFCGKGYHLMSFPQSAPHGVVFLHVTYVPAQEKNFTTAPAICHDGKAHFPREGVFVSNGTHWFVTQRNFYEPQIITTDNTFVSGNCDVVIGVVNNTVYDPLQPELDSFKEELDKYFKNHTSPDVDLGDISGINASVVNIQKEIDRLNEVAKNLNESLIDLQELGKYEQYIK

SEQ ID NO: 1643 - protein, 1211 aa, Artificial Sequence
  SARS-CoV-2/Netherlands/ZuidHolland_9/2020__EPI_ISL_414445 spike protein (1-1211)
MFVFLVLLPLVSSQCVNLTTRTQLPPAYTNSFTRGVYYPDKVFRSSVLHSTQDLFLPFFSNVTWFHAIHVSGTNGTKRFDNPVLPFNDGVYFASTEKSNIIRGWIFGTTLDSKTQSLLIVNNATNVVIKVCEFQFCNDPFLGVYYHKNNKSWMESEFRVYSSANNCTFEYVSQPFLMDLEGKQGNFKNLREFVFKNIDGYFKIYSKHTPINLVRDLPQGFSALEPLVDLPIGINITRFQTLLALHRSYLTPGDSSSGWTAGAAAYYVGYLQPRTFLLKYNENGTITDAVDCALDPLSETKCTLKSFTVEKGIYQTSNFRVQPTESIVRFPNITNLCPFGEVFNATRFASVYAWNRKRISNCVADYSVLYNSASFSTFKCYGVSPTKLNDLCFTNVYADSFVIRGDEVRQIAPGQTGKIADYNYKLPDDFTGCVIAWNSNNLDSKVGGNYNYLYRLFRKSNLKPFERDISTEIYQAGSTPCNGVEGFNCYFPLQSYGFQPTNGVGYQPYRVVVLSFELLHAPATVCGPKKSTNLVKNKCVNFNFNGLTGTGVLTESNKKFLPFQQFGRDIADTTDAVRDPQTLEILDITPCSFGGVSVITPGTNTSNQVAVLYQGVNCTEVPVAIHADQLTPTWRVYSTGSNVFQTRAGCLIGAEHVNNSYECDIPIGAGICASYQTQTNSPRRARSVASQSIIAYTMSLGAENSVAYSNNSIAIPTNFTISVTTEILPVSMTKTSVDCTMYICGDSTECSNLLLQYGSFCTQLNRALTGIAVEQDKNTQEVFAQVKQIYKTPPIKDFGGFNFSQILPDPSKPSKRSFIEDLLFNKVTLADAGFIKQYGDCLGDIAARDLICVQKFNGLTVLPPLLTDEMIAQYTSALLAGTITSGWTFGAGAALQIPFAMQMAYRFNGIGVTQNVLYENQKLIANQFNSAIGKIQDSLSSTASALGKLQDVVNQNAQALNTLVKQLSSNFGAISSVLNDILSRLDKVEAEVQIDRLITGRLQSLQTYVTQQLIRAAEIRASANLAATKMSECVLGQSKRVDFCGKGYHLMSFPQSAPHGVVFLHVTYVPAQEKNFTTAPAICHDGKAHFPREGVFVSNGTHWFVTQRNFYEPQIITTDNTFVSGNCDVVIGIVNNTVYDPLQPELDSFKEELDKYFKNHTSPDVDLGDISGINASVVNIQKEIDRLNEVAKNLNESLIDLQELGKYEQYIK

SEQ ID NO: 1644 - protein, 1211 aa, Artificial Sequence
  SARS-CoV-2/Finland/FIN03032020A/2020__EPI_ISL_413602 spike protein (1-1211)
MFVFLVLLPLVSSQCVNLTTRTQLPPAYTNSFTRGVYYPDKVFRSSVLHSTQDLFLPFFSNVTWFHAIHVSGTNGTKRFDNPVLPFNDGVYFASTEKSNIIRGWIFGTTLDSKTQSLLIVNNATNVVIKVCEFQFCNDPFLGVYYHKNNKSWMESEFRVYSSANNCTFEYVSQPFLMDLEGKQGNFKNLREFVFKNIDGYFKIYSKHTPINLVRDLPQGFSALEPLVDLPIGINITRFQTLLALHRSYLTPGDSSSGWTAGAAAYYVGYLQPRTFLLKYNENGTITDAVDCALDPLSETKCTLKSFTVEKGIYQTSNFRVQPTESIVRFPNITNLCPFGEVFNATRFASVYAWNRKRISNCVADYSVLYNSASFSTFKCYGVSPTKLNDLCFTNVYADSFVIRGDEVRQIAPGQTGKIADYNYKLPDDFTGCVISWNSNNLDSKVGGNYNYLYRLFRKSNLKPFERDISTEIYQAGSTPCNGVEGFNCYFPLQSYGFQPTNGVGYQPYRVVVLSFELLHAPATVCGPKKSTNLVKNKCVNFNFNGLTGTGVLTESNKKFLPFQQFGRDIADTTDAVRDPQTLEILDITPCSFGGVSVITPGTNTSNQVAVLYQGVNCTEVPVAIHADQLTPTWRVYSTGSNVFQTRAGCLIGAEHVNNSYECDIPIGAGICASYQTQTNSPRRARSVASQSIIAYTMSLGAENSVAYSNNSIAIPTNFTISVTTEILPVSMTKTSVDCTMYICGDSTECSNLLLQYGSFCTQLNRALTGIAVEQDKNTQEVFAQVKQIYKTPPIKDFGGFNFSQILPDPSKPSKRSFIEDLLFNKVTLADAGFIKQYGDCLGDIAARDLICAQKFNGLTVLPPLLTDEMIAQYTSALLAGTITSGWTFGAGAALQIPFAMQMAYRFNGIGVTQNVLYENQKLIANQFNSAIGKIQDSLSSTASALGKLQDVVNQNAQALNTLVKQLSSNFGAISSVLNDILSRLDKVEAEVQIDRLITGRLQSLQTYVTQQLIRAAEIRASANLAATKMSECVLGQSKRVDFCGKGYHLMSFPQSAPHGVVFLHVTYVPAQEKNFTTAPAICHDGKAHFPREGVFVSNGTHWFVTQRNFYEPQIITTDNTFVSGNCDVVIGIVNNTVYDPLQPELDSFKEELDKYFKNHTSPDVDLGDISGINASVVNIQKEIDRLNEVAKNLNESLIDLQELGKYEQYIK

SEQ ID NO: 1645 - protein, 1211 aa, Artificial Sequence
  SARS-CoV-2/France/GE1977/2020__EPI_ISL_414632 spike protein (1-1211)
MFVFLVLLPLVSSQCVNLTTRTQLPPAYTNSFTRGVYYPDKVFRSSVLHSTQDLFLPFFSNVTWFHAIHVSGTNGTKRFDNPVLPFNDGVYFASTEKSNIIRGWIFGTTLDSKTQSLLIVNNATNVVIKVCEFQFCNDPFLGVYYHKNNKSWMESEFRVYSSANNCTFEYVSQPFLMDLEGKQGNFKNLREFVFKNIDGYFKIYSKHTPINLVRDLPQGFSALEPLVDLPIGINITRFQTLLALHRSYLTPGDSSSGWTAGAAAYYVGYLQPRTFLLKYNENGTITDAVDCALDPLSETKCTLKSFTVEKGIYQTSNFRVQPTESIVRFPNITNLCPFGEVFNATRFASVYAWNRKRISNCVADYSVLYNSASFSTFKCYGVSPTKLNDLCFTNVYADSFVIRGDEVRQIAPGQTGKIADYNYKLPDDFTGCVIAWNSNNLDSKVGGNYNYLYRLFRKSNLKPFERDISTEIYQAGSTPCNGVEGFNCYFPLQSYGFQPTNGVGYQPYRVVVLSFELLHAPATVCGPKKSTNLVKNKCVNFNFNGLTGTGVLTESNKKFLPFQQFGRDIADTTDAVRDPQTLEILDITPCSFGGVSVITPGTNTSNQVAVLYQGVNCTEVPVAIHADQLTPTWRVYSTGSNVFQTRAGCLIGAEHVNNSYECDIPIGAGICASYQTQTNSPRRARSVASQSIIAYTMSLGAENSVAYSNNSIAIPTNFTISVTTEILPVSMTKTSVDCTMYICGDSTECSNLLLQYGSFCTQLNRALTGIAVEQDKNTQEVFAQVKQIYKTPPIKDFGGFNFSQILPDPSKPSKRSFIEDLLFNKVTLADAGFIKQYGDCLGDIAARDLICAQKFNGLTVLPPLLTDEMIAQYTSALLAGTITSGWTFGAGAALQIPFAMQMAYRFNGIGVTQNVLYENQKLIANQFNSAIGKIQDSLFSTASALGKLQDVVNQNAQALNTLVKQLSSNFGAISSVLNDILSRLDKVEAEVQIDRLITGRLQSLQTYVTQQLIRAAEIRASANLAATKMSECVLGQSKRVDFCGKGYHLMSFPQSAPHGVVFLHVTYVPAQEKNFTTAPAICHDGKAHFPREGVFVSNGTHWFVTQRNFYEPQIITTDNTFVSGNCDVVIGIVNNTVYDPLQPELDSFKEELDKYFKNHTSPDVDLGDISGINASVVNIQKEIDRLNEVAKNLNESLIDLQELGKYEQYIK

SEQ ID NO: 1646 - protein, 1211 aa, Artificial Sequence
  SARS-CoV-2/Finland/FIN-313/2020__EPI_ISL_414641 spike protein (1-1211)
MFVFLVLLPLVSSQCVNLTTRTQLPPAYTNSFTRGVYYPDKVFRSSVLHSTQDLFLPFFSNVTWFHAIHVSGTNGTKRFDNPVLPFNDGVYFASTEKSNIIRGWIFGTTLDSKTQSLLIVNNATNVVIKVCEFQFCNDPFLGVYYHKNNKSWMESEFRVYSSANNCTFEYVSQPFLMDLEGKQGNFKNLREFVFKNIDGYFKIYSKHTPINLVRDLPQGFSALEPLVDLPIGINITRFKTLLALHRSYLTPGDSSSGWTAGAAAYYVGYLQPRTFLLKYNENGTITDAVDCALDPLSETKCTLKSFTVEKGIYQTSNFRVQPTESIVRFPNITNLCPFGEVFNATRFASVYAWNRKRISNCVADYSVLYNSASFSTFKCYGVSPTKLNDLCFTNVYADSFVIRGDEVRQIAPGQTGKIADYNYKLPDDFTGCVIAWNSNNLDSKVGGNYNYLYRLFRKSNLKPFERDISTEIYQAGSTPCNGVEGFNCYFPLQSYGFQPTNGVGYQPYRVVVLSFELLHAPATVCGPKKSTNLVKNKCVNFNFNGLTGTGVLTESNKKFLPFQQFGRDIADTTDAVRDPQTLEILDITPCSFGGVSVITPGTNTSNQVAVLYQGVNCTEVPVAIHADQLTPTWRVYSTGSNVFQTRAGCLIGAEHVNNSYECDIPIGAGICASYQTQTNSPRRARSVASQSIIAYTMSLGAENSVAYSNNSIAIPTNFTISVTTEILPVSMTKTSVDCTMYICGDSTECSNLLLQYGSFCTQLNRALTGIAVEQDKNTQEVFAQVKQIYKTPPIKDFGGFNFSQILPDPSKPSKRSFIEDLLFNKVTLADAGFIKQYGDCLGDIAARDLICAQKFNGLTVLPPLLTDEMIAQYTSALLAGTITSGWTFGAGAALQIPFAMQMAYRFNGIGVTQNVLYENQKLIANQFNSAIGKIQDSLSSTASALGKLQDVVNQNAQALNTLVKQLSSNFGAISSVLNDILSRLDKVEAEVQIDRLITGRLQSLQTYVTQQLIRAAEIRASANLAATKMSECVLGQSKRVDFCGKGYHLMSFPQSAPHGVVFLHVTYVPAQEKNFTTAPAICHDGKAHFPREGVFVSNGTHWFVTQRNFYEPQIITTDNTFVSGNCDVVIGIVNNTVYDPLQPELDSFKEELDKYFKNHTSPDVDLGDISGINASVVNIQKEIDRLNEVAKNLNESLIDLQELGKYEQYIK

SEQ ID NO: 1647 - protein, 1211 aa, Artificial Sequence
  SARS-CoV-2/Netherlands/ZuidHolland_2/2020__EPI_ISL_414556 spike protein (1-1211)
MFVFLVLLPLVSSQCVNLTTRTQLPPAYTNSFTRGVYYPDKVFRSSVLHSTQDLFLPFFSNVTWFHAIHVSGTNGTKRFDNPVLPFNDGVYFASTEKSNIIRGWIFGTTLDSKTQSLLIVNNATNVVIKVCEFQFCNDPFLGVYYHKNNKSWMESEFRVYSSANNCTFEYVSQPFLMDLEGKQGNFKNLREFVFKNIDGYFKIYSKHTPINLVRDLPQGFSALEPLVDLPIGINITRFQTLLALHRSYLTPGDSSSGWTAGAAAYYVGYLQPRTFLLKYNENGTITDAVDCALDPLSETKCTLKSFTVEKGIYQTSNFRVQPTESIVRFPNITNLCPFGEVFNATRFASVYAWNRKRISNCVADYSVLYNSASFSTFKCYGVSPTKLNDLCFTNVYADSFVIRGDEVRQIAPGQTGKIADYNYKLPDDFTGCVIAWNSNNLDSKVGGNYNYLYRLFRKSNLKPFERDISTEIYQAGSTPCNGVEGFNCYFPLQSYGFQPTNGVGYQPYRVVVLSFELLHAPATVCGPKKSTNLVKNKCVNFNFNGLTGTGVLTESNKKFLPFQQFGRDIADTTDAVRDPQTLEILDITPCSFGGVSVITPGTNTSNQVAVLYQGVNCTEVPVAIHADQLTPTWRVYSTGSNVFQTRAGCLIGAEHVNNSYECDIPIGAGICASYQTQTNSPRRARSVASQSIIAYTMSLGAENSVAYSNNSIAIPTNFTISVTTEILPVSMTKTSVDCTMYICGDSTECSNLLLQYGSFCTQLNRALTGIALEQDKNTQEVFAQVKQIYKTPPIKDFGGFNFSQILPDPSKPSKRSFIEDLLFNKVTLADAGFIKQYGDCLGDIAARDLICAQKFNGLTVLPPLLTDEMIAQYTSALLAGTITSGWTFGAGAALQIPFAMQMAYRFNGIGVTQNVLYENQKLIANQFNSAIGKIQDSLSSTASALGKLQDVVNQNAQALNTLVKQLSSNFGAISSVLNDILSRLDKVEAEVQIDRLITGRLQSLQTYVTQQLIRAAEIRASANLAATKMSECVLGQSKRVDFCGKGYHLMSFPQSAPHGVVFLHVTYVPAQEKNFTTAPAICHDGKAHFPREGVFVSNGTHWFVTQRNFYEPQIITTDNTFVSGNCDVVIGIVNNTVYDPLQPELDSFKEELDKYFKNHTSPDVDLGDISGINASVVNIQKEIDRLNEVAKNLNESLIDLQELGKYEQYIK

SEQ ID NO: 1648 - protein, 1211 aa, Artificial Sequence
  SARS-CoV-2/USA/WA-UW31/2020__EPI_ISL_414618 spike protein (1-1211)
MFVFLVLLPLVSSQCVNLTTRTQLPPAYTNSFTRGVYYPDKVFRSSVLHSTQDLFLPFFSNVTWFHAIHVSGTNGTKRFDNPVLPFNDGVYFASTEKSNIIRGWIFGTTLDSKTQSLLIVNNATNVVIKVCEFQFCNDPFLGVYYHKNNKSWMESEFRVYSSANNCTFEYVSQPFLMDLEGKQGNFKNLREFVFKNIDGYFKIYSKHTPINLVRDLPQGFSALEPLVDLPIGINITRFQTLLALHRSYLTPGDSSSGWTAGAAAYYVGYLQPRTFLLKYNENGTITDAVDCALDPLSETKCTLKSFTVEKGIYQTSNFRVQPTESIVRFPNITNLCPFGEVFNATRFASVYAWNRKRISNCVADYSVLYNSASFSTFKCYGVSPTKLNDLCFTNVYADSFVIRGDEVRQIAPGQTGKIADYNYKLPDDFTGCVIAWNSNNLDSKVGGNYNYLYRLFRKSNLKPFERDISTEIYQAGSTPCNGAEGFNCYFPLQSYGFQPTNGVGYQPYRVVVLSFELLHAPATVCGPKKSTNLVKNKCVNFNFNGLTGTGVLTESNKKFLPFQQFGRDIADTTDAVRDPQTLEILDITPCSFGGVSVITPGTNTSNQVAVLYQDVNCTEVPVAIHADQLTPTWRVYSTGSNVFQTRAGCLIGAEHVNNSYECDIPIGAGICASYQTQTNSPRRARSVASQSIIAYTMSLGAENSVAYSNNSIAIPTNFTISVTTEILPVSMTKTSVDCTMYICGDSTECSNLLLQYGSFCTQLNRALTGIAVEQDKNTQEVFAQVKQIYKTPPIKDFGGFNFSQILPDPSKPSKRSFIEDLLFNKVTLADAGFIKQYGDCLGDIAARDLICAQKFNGLTVLPPLLTDEMIAQYTSALLAGTITSGWTFGAGAALQIPFAMQMAYRFNGIGVTQNVLYENQKLIANQFNSAIGKIQDSLSSTASALGKLQDVVNQNAQALNTLVKQLSSNFGAISSVLNDILSRLDKVEAEVQIDRLITGRLQSLQTYVTQQLIRAAEIRASANLAATKMSECVLGQSKRVDFCGKGYHLMSFPQSAPHGVVFLHVTYVPAQEKNFTTAPAICHDGKAHFPREGVFVSNGTHWFVTQRNFYEPQIITTDNTFVSGNCDVVIGIVNNTVYDPLQPELDSFKEELDKYFKNHTSPDVDLGDISGINASVVNIQKEIDRLNEVAKNLNESLIDLQELGKYEQYIK

SEQ ID NO: 1649 - protein, 1211 aa, Artificial Sequence
  SARS-CoV-2/South Korea/SNU01/2020__EPI_ISL_411929 spike protein (1-1211)
MFVFLVLLPLVSSQCVNLTTRTQLPPAYTNSFTRGVYYPDKVFRSSVLHSTQDLFLPFFSNVTWFHAIHVSGTNGTKRFDNPVLPFNDGVYFASTEKSNIIRGWIFGTTLDSKTQSLLIVNNATNVVIKVCEFQFCNDPFLGVYYHKNNKSWMESEFRVYSSANNCTFEYVSQPFLMDLEGKQGNFKNLREFVFKNIDGYFKIYSKHTPINLVRDLPQGFWALEPLVDLPIGINITRFQTLLALHRSYLTPGDSSSGWTAGAAAYYVGYLQPRTFLLKYNENGTITDAVDCALDPLSETKCTLKSFTVEKGIYQTSNFRVQPTESIVRFPNITNLCPFGEVFNATRFASVYAWNRKRISNCVADYSVLYNSASFSTFKCYGVSPTKLNDLCFTNVYADSFVIRGDEVRQIAPGQTGKIADYNYKLPDDFTGCVIAWNSNNLDSKVGGNYNYLYRLFRKSNLKPFERDISTEIYQAGSTPCNGVEGFNCYFPLQSYGFQPTNGVGYQPYRVVVLSFELLHAPATVCGPKKSTNLVKNKCVNFNFNGLTGTGVLTESNKKFLPFQQFGRDIADTTDAVRDPQTLEILDITPCSFGGVSVITPGTNTSNQVAVLYQDVNCTEVPVAIHADQLTPTWRVYSTGSNVFQTRAGCLIGAEHVNNSYECDIPIGAGICASYQTQTNSPRRARSVASQSIIAYTMSLGAENSVAYSNNSIAIPTNFTISVTTEILPVSMTKTSVDCTMYICGDSTECSNLLLQYGSFCTQLNRALTGIAVEQDKNTQEVFAQVKQIYKTPPIKDFGGFNFSQILPDPSKPSKRSFIEDLLFNKVTLADAGFIKQYGDCLGDIAARDLICAQKFNGLTVLPPLLTDEMIAQYTSALLAGTITSGWTFGAGAALQIPFAMQMAYRFNGIGVTQNVLYENQKLIANQFNSAIGKIQDSLSSTASALGKLQDVVNQNAQALNTLVKQLSSNFGAISSVLNDILSRLDKVEAEVQIDRLITGRLQSLQTYVTQQLIRAAEIRASANLAATKMSECVLGQSKRVDFCGKGYHLMSFPQSAPHGVVFLHVTYVPAQEKNFTTAPAICHDGKAHFPREGVFVSNGTHWFVTQRNFYEPQIITTDNTFVSGNCDVVIGIVNNTVYDPLQPELDSFKEELDKYFKNHTSPDVDLGDISGINASVVNIQKEIDRLNEVAKNLNESLIDLQELGKYEQYIK

SEQ ID NO: 1650 - protein, 1211 aa, Artificial Sequence
  SARS-CoV-2/China/WF0004/2020__EPI_ISL_413694 spike protein (1-1211)
MFVFLVLLPLVSSQCVNLTTRTQLPPAYTNSFTRGVYYPDKVFRSSVLHSTQDLFLPFFSNVTWFHAIHVSGTNGTKRFDNPVLPFNDGVYFASTEKSNIIRGWIFGTTLDSKTQSLLIVNNATNVVIKVCEFQFCNDPFLGVYYHKNNKSWTESEFRVYSSANNCTFEYVSQPFLMDLEGKQGNFKNLREFVFKNIDGYFKIYSKHTPINLVRDLPQGFSALEPLVDLPIGINITRFQTLLALHRSYLTPGDSSSGWTAGAAAYYVGYLQPRTFLLKYNENGTITDAVDCALDPLSETKCTLKSFTVEKGIYQTSNFRVQPTESIVRFPNITNLCPFGEVFNATRFASVYAWNRKRISNCVADYSVLYNSASFSTFKCYGVSPTKLNDLCFTNVYADSFVIRGDEVRQIAPGQTGKIADYNYKLPDDFTGCVIAWNSNNLDSKVGGNYNYLYRLFRKSNLKPFERDISTEIYQAGSTPCNGVEGFNCYFPLQSYGFQPTNGVGYQPYRVVVLSFELLHAPATVCGPKKSTNLVKNKCVNFNFNGLTGTGVLTESNKKFLPFQQFGRDIADTTDAVRDPQTLEILDITPCSFGGVSVITPGTNTSNQVAVLYQDVNCTEVPVAIHADQLTPTWRVYSTGSNVFQTRAGCLIGAEHVNNSYECDIPIGAGICASYQTQTNSPRRARSVASQSIIAYTMSLGAENSVAYSNNSIAIPTNFTISVTTEILPVSMTKTSVDCTMYICGDSTECSNLLLQYGSFCTQLNRALTGIAVEQDKNTQEVFAQVKQIYKTPPIKDFGGFNFSQILPDPSKPSKRSFIEDLLFNKVTLADAGFIKQYGDCLGDIAARDLICAQKFNGLTVLPPLLTDEMIAQYTSALLAGTITSGWTFGAGAALQIPFAMQMAYRFNGIGVTQNVLYENQKLIANQFNSAIGKIQDSLSSTASALGKLQDVVNQNAQALNTLVKQLSSNFGAISSVLNDILSRLDKVEAEVQIDRLITGRLQSLQTYVTQQLIRAAEIRASANLAATKMSECVLGQSKRFDFCGKGYHLMSFPQSAPHGVVFLHVTYVPAQEKNFTTAPAICHDGKAHFPREGVFVSNGTHWFVTQRNFYEPQIITTDNTFVSGNCDVVIGIVNNTVYDPLQPELDSFKEELDKYFKNHTSPDVDLGDISGINASVVNIQKEIDRLNEVAKNLNESLIDLQELGKYEQYIK

SEQ ID NO: 1651 - protein, 1211 aa, Artificial Sequence
  SARS-CoV-2/China/WF0028/2020__EPI_ISL_413791 spike protein (1-1211)
MFVFLVLLPLVSSQCVNLTTRTQLPPAYTNSFTRGVYYPDKVFRSSVLHSTQDLFLPFFSNVTWFHAIHVSGTNGTKRFDNPVLPFNDGVYFASTEKSNIIRGWIFGTTLDSKTQSLLIVNNATNVVIKVCEFQFCNDPFLGVYYHKNNKSWMESEFRVYSSANNCTFEYVSQPFLMDLEGKQGNFKNLREFVFKNIDGYFKIYSKHTPINLVRDLPQGFSALEPLVDLPIGINITRFQTLLALHRSYLTPGDSSSGWTAGAAAYYVGYLQPRTFLLKYNENGTITDAVDCALDPLSETKCTLKSFTVEKGIYQTSNFRVQPTESIVRFPNITNLCPFGEVFNATRFASVYAWNRKRISNCVADYSVLYNSASFSTFKCYGVSPTKLNDLCFTNVYADSFVIRGDEVRQIAPGQTGKIADYNYKLPDDFTGCVIAWNSNNLDSKVGGNYNYLYRLFRKSNLKPFERDISTEIYQAGSTPCNGVEGFNCYFPLQSYGFQPTNGVGYQPYRVVVLSFELLHAPATVCGPKKSTNLVKNKCVNFNFNGLTGTGVLTESNKKFLPFQQFGRDIADTTDAVRDPQTLEILDITPCSFGGVSVITPGTNTSNQVAVLYQDVNCTEVPVAIHADQLTPTWRVYSTGSNVFQTRAGCLIGAEHVNNSYECDIPIGAGICASYQTQTNSPRRARSVASQSIIAYTMSLGAENSVAYSNNSIAIPTNFTISVTTEILPVSMTKTSVDCTMYICGDSTECSNLLLQYGSFCTQLNRALTGIAVEQDKNTQEVFAQVKQIYKTPPIKDFGGFNFSQILPDPSKPSKRSFIEDLLFNKVTLADAGFIKQYGDCLGDIAARDLICAQKFNGLTVLPPLLTDEMIAQYTSALLAGTITSGWTFGAGAALQIPFAMQMAYRFNGIGVTQNVLYENQKLIANQFNSAIGKIQDSLSSTASALGKLQDVVNQNAQALNTLVKQLSSNFGAISSVLNDILSRLDKVEAEVQIDRLITGRLQSLQTYVTQQLIRAAEIRASANLAATKMSECVLGQSKRVDFCGKGYHLMSFPQSAPHGVVFLHVTYVPAQEKNFTTAPAICHDGKAHFPREGVFVSNGTHWFVTQRNFYEPQIITTDNTFVSGNCDVVIGIVNNTVYDPLQPELESFKEELDKYFKNHTSPDVDLGDISGINASVVNIQKEIDRLNEVAKNLNESLIDLQELGKYEQYIK

SEQ ID NO: 1652 - protein, 1211 aa, Artificial Sequence
  SARS-CoV-2/2019-nCoV/USA-CruiseA-18/2020__MT159716.1 spike protein (1-1211)
MFVFLVLLPLVSSQCVNLTTRTQLPPAYTNSFTRGVYYPDKVFRSSVLHSTQDLFLPFFSNVTWFHAIHVSGTNGTKRFDNPVLPFNDGVYFASTEKSNIIRGWIFGTTLDSKTQSLLIVNNATNVVIKVCEFQFCNDPFLGVYYHKNNKSWMESELRVYSSANNCTFEYVSQPFLMDLEGKQGNFKNLREFVFKNIDGYFKIYSKHTPINLVRDLPQGFSALEPLVDLPIGINITRFQTLLALHRSYLTPGDSSSGWTAGAAAYYVGYLQPRTFLLKYNENGTITDAVDCALDPLSETKCTLKSFTVEKGIYQTSNFRVQPTESIVRFPNITNLCPFGEVFNATRFASVYAWNRKRISNCVADYSVLYNSASFSTFKCYGVSPTKLNDLCFTNVYADSFVIRGDEVRQIAPGQTGKIADYNYKLPDDFTGCVIAWNSNNLDSKVGGNYNYLYRLFRKSNLKPFERDISTEIYQAGSTPCNGVEGFNCYFPLQSYGFQPTNGVGYQPYRVVVLSFELLHAPATVCGPKKSTNLVKNKCVNFNFNGLTGTGVLTESNKKFLPFQQFGRDIADTTDAVRDPQTLEILDITPCSFGGVSVITPGTNTSNQVAVLYQDVNCTEVPVAIHADQLTPTWRVYSTGSNVFQTRAGCLIGAEHVNNSYECDIPIGAGICASYQTQTNSPRRARSVASQSIIAYTMSLGAENSVAYSNNSIAIPTNFTISVTTEILPVSMTKTSVDCTMYICGDSTECSNLLLQYGSFCTQLNRALTGIAVEQDKNTQEVFAQVKQIYKTPPIKDFGGFNFSQILPDPSKPSKRSFIEDLLFNKVTLADAGFIKQYGDCLGDIAARDLICAQKFNGLTVLPPLLTDEMIAQYTSALLAGTITSGWTFGAGAALQIPFAMQMAYRFNGIGVTQNVLYENQKLIANQFNSAIGKIQDSLSSTASALGKLQDVVNQNAQALNTLVKQLSSNFGAISSVLNDILSRLDKVEAEVQIDRLITGRLQSLQTYVTQQLIRAAEIRASANLAATKMSECVLGQSKRVDFCGKGYHLMSFPQSAPHGVVFLHVTYVPAQEKNFTTAPAICHDGKAHFPREGVFVSNGTHWFVTQRNFYEPQIITTDNTFVSGNCDVVIGIVNNTVYDPLQPELDSFKEELDKYFKNHTSPDVDLGDISGINASVVNIQKEIDRLNEVAKNLNESLIDLQELGKYEQYIK

SEQ ID NO: 1653 - protein, 1211 aa, Artificial Sequence
  SARS-CoV-2/SARS-CoV-2/Yunnan-01/human/2020/CHN__MT049951.1 spike protein (1-1211)
MFVFLVLLPLVSSQCVNLTTRTQLPPANTNSFTRGVYYPDKVFRSSVLHSTQDLFLPFFSNVTWFHAIHVSGTNGTKRFDNPVLPFNDGVYFASTEKSNIIRGWIFGTTLDSKTQSLLIVNNATNVVIKVCEFQFCNDPFLGVYYHKNNKSWMESEFRVYSSANNCTFEYVSQPFLMDLEGKQGNFKNLREFVFKNIDGYFKIYSKHTPINLVRDLPQGFSALEPLVDLPIGINITRFQTLLALHRSYLTPGDSSSGWTAGAAAYYVGYLQPRTFLLKYNENGTITDAVDCALDPLSETKCTLKSFTVEKGIYQTSNFRVQPTESIVRFPNITNLCPFGEVFNATRFASVYAWNRKRISNCVADYSVLYNSASFSTFKCYGVSPTKLNDLCFTNVYADSFVIRGDEVRQIAPGQTGKIADYNYKLPDDFTGCVIAWNSNNLDSKVGGNYNYLYRLFRKSNLKPFERDISTEIYQAGSTPCNGVEGFNCYFPLQSYGFQPTNGVGYQPYRVVVLSFELLHAPATVCGPKKSTNLVKNKCVNFNFNGLTGTGVLTESNKKFLPFQQFGRDIADTTDAVRDPQTLEILDITPCSFGGVSVITPGTNTSNQVAVLYQDVNCTEVPVAIHADQLTPTWRVYSTGSNVFQTRAGCLIGAEHVNNSYECDIPIGAGICASYQTQTNSPRRARSVASQSIIAYTMSLGAENSVAYSNNSIAIPTNFTISVTTEILPVSMTKTSVDCTMYICGDSTECSNLLLQYGSFCTQLNRALTGIAVEQDKNTQEVFAQVKQIYKTPPIKDFGGFNFSQILPDPSKPSKRSFIEDLLFNKVTLADAGFIKQYGDCLGDIAARDLICAQKFNGLTVLPPLLTDEMIAQYTSALLAGTITSGWTFGAGAALQIPFAMQMAYRFNGIGVTQNVLYENQKLIANQFNSAIGKIQDSLSSTASALGKLQDVVNQNAQALNTLVKQLSSNFGAISSVLNDILSRLDKVEAEVQIDRLITGRLQSLQTYVTQQLIRAAEIRASANLAATKMSECVLGQSKRVDFCGKGYHLMSFPQSAPHGVVFLHVTYVPAQEKNFTTAPAICHDGKAHFPREGVFVSNGTHWFVTQRNFYEPQIITTDNTFVSGNCDVVIGIVNNTVYDPLQPELDSFKEELDKYFKNHTSPDVDLGDISGINASVVNIQKEIDRLNEVAKNLNESLIDLQELGKYEQYIK

SEQ ID NO: 1654 - protein, 1211 aa, Artificial Sequence
  SARS-CoV-2/USA/WA-UW292/2020__EPI_ISL_418077 spike protein (1-1211)
MFVFLVLLPLVSSQCVNLTTRTQLPPAYTNSFTRGVYYPDKVFRSSVLHSTQDLFLPFFSNVTWFHAIHVSGTNGTKRFDNPVLPFNDGVYFASTEKSNIIRGWIFGTTLDSKTQSLLIVNNATNVVIKVCEFQFCNDPFLGVYYHKNNKSWMESEFRVYSSANNCTFEYVSQPFLMDLEGKQGNFKNLREFVFKNIDGYFKIYSKHTPINLVRDLPQGFSALEPLVDLPIGINITRFQTLLALHRSYLTPGDSSSGWTAGAAAYYVGYLQPRTFLLKYNENGTITDAVDCALDPLSETKCTLKSFTVEKGIYQTSNFRVQPTESIVRFPNITNLCPFGEVFNATRFASVYAWNRKRISNCVADYSVLYNSASFSTFKCYGVSPTKLNDLCFTNVYADSFVIRGDEVRQIAPGQTGKIADYNYKLPDDFTGCVIAWNSNNLDSKVGGNYNYLYRLFRKSNLKPFERDISTEIYQASSTPCNGVEGFNCYFPLQSYGFQPTNGVGYQPYRVVVLSFELLHAPATVCGPKKSTNLVKNKCVNFNFNGLTGTGVLTESNKKFLPFQQFGRDIADTTDAVRDPQTLEILDITPCSFGGVSVITPGTNTSNQVAVLYQDVNCTEVPVAIHADQLTPTWRVYSTGSNVFQTRAGCLIGAEHVNNSYECDIPIGAGICASYQTQTNSPRRARSVASQSIIAYTMSLGAENSVAYSNNSIAIPTNFTISVTTEILPVSMTKTSVDCTMYICGDSTECSNLLLQYGSFCTQLNRALTGIAVEQDKNTQEVFAQVKQIYKTPPIKDFGGFNFSQILPDPSKPSKRSFIEDLLFNKVTLADAGFIKQYGDCLGDIAARDLICAQKFNGLTVLPPLLTDEMIAQYTSALLAGTITSGWTFGAGAALQIPFAMQMAYRFNGIGVTQNVLYENQKLIANQFNSAIGKIQDSLSSTASALGKLQDVVNQNAQALNTLVKQLSSNFGAISSVLNDILSRLDKVEAEVQIDRLITGRLQSLQTYVTQQLIRAAEIRASANLAATKMSECVLGQSKRVDFCGKGYHLMSFPQSAPHGVVFLHVTYVPAQEKNFTTAPAICHDGKAHFPREGVFVSNGTHWFVTQRNFYEPQIITTDNTFVSGNCDVVIGIVNNTVYDPLQPELDSFKEELDKYFKNHTSPDVDLGDISGINASVVNIQKEIDRLNEVAKNLNESLIDLQELGKYEQYIK

SEQ ID NO: 1655 - protein, 1211 aa, Artificial Sequence
  SARS-CoV-2/Iceland/192/2020__EPI_ISL_417819 spike protein (1-1211)
MFVFFVLLPLVSSQCVNLTTRTQLPPAYTNSFTRGVYYPDKVFRSSVLHSTQDLFLPFFSNVTWFHAIHVSGTNGTKRFDNPVLPFNDGVYFASTEKSNIIRGWIFGTTLDSKTQSLLIVNNATNVVIKVCEFQFCNDPFLGVYYHKNNKSWMESEFRVYSSANNCTFEYVSQPFLMDLEGKQGNFKNLREFVFKNIDGYFKIYSKHTPINLVRDLPQGFSALEPLVDLPIGINITRFQTLLALHRSYLTPGDSSSGWTAGAAAYYVGYLQPRTFLLKYNENGTITDAVDCALDPLSETKCTLKSFTVEKGIYQTSNFRVQPTESIVRFPNITNLCPFGEVFNATRFASVYAWNRKRISNCVADYSVLYNSASFSTFKCYGVSPTKLNDLCFTNVYADSFVIRGDEVRQIAPGQTGKIADYNYKLPDDFTGCVIAWNSNNLDSKVGGNYNYLYRLFRKSNLKPFERDISTEIYQAGSTPCNGVEGFNCYFPLQSYGFQPTNGVGYQPYRVVVLSFELLHAPATVCGPKKSTNLVKNKCVNFNFNGLTGTGVLTESNKKFLPFQQFGRDIADTTDAVRDPQTLEILDITPCSFGGVSVITPGTNTSNQVAVLYQGVNCTEVPVAIHADQLTPTWRVYSTGSNVFQTRAGCLIGAEHVNNSYECDIPIGAGICASYQTQTNSPRRARSVASQSIIAYTMSLGAENSVAYSNNSIAIPTNFTISVTTEILPVSMTKTSVDCTMYICGDSTECSNLLLQYGSFCTQLNRALTGIAVEQDKNTQEVFAQVKQIYKTPPIKDFGGFNFSQILPDPSKPSKRSFIEDLLFNKVTLADAGFIKQYGDCLGDIAARDLICAQKFNGLTVLPPLLTDEMIAQYTSALLAGTITSGWTFGAGAALQIPFAMQMAYRFNGIGVTQNVLYENQKLIANQFNSAIGKIQDSLSSTASALGKLQDVVNQNAQALNTLVKQLSSNFGAISSVLNDILSRLDKVEAEVQIDRLITGRLQSLQTYVTQQLIRAAEIRASANLAATKMSECVLGQSKRVDFCGKGYHLMSFPQSAPHGVVFLHVTYVPAQEKNFTTAPAICHDGKAHFPREGVFVSNGTHWFVTQRNFYEPQIITTDNTFVSGNCDVVIGIVNNTVYDPLQPELDSFKEELDKYFKNHTSPDVDLGDISGINASVVNIQKEIDRLNEVAKNLNESLIDLQELGKYEQYIK

SEQ ID NO: 1656 - protein, 1211 aa, Artificial Sequence
  SARS-CoV-2/Belgium/ULG-6939/2020__EPI_ISL_417020 spike protein (1-1211)
MFVFLVLLPLVSSQCVNLTTRTQLPPAYTNSFTRGVYYPDKVFRSSVLHSTQDLFLPFFSNVTWFHAIHVSGTNGTKRFDNPVLPFNDGVYFASTEKSNIIRGWIFGTTLDSKTQSLLIVNNATNVVIKVCEFQFCNDPFLGVYYHKNNKSWMESEFRVYSSANNCTFEYVSQPFLMDLEGKQGNFKNLREFVFKNIDGYFKIYSKHTPINLVRDLPQGFSALEPLVDLPIGINITRFQTLLALHRSYLTPGDSSSGWTAGAAAYYVGYLQPRTFLLKYNENGTITDAVDCALDPLSETKCTLKSFTVEKGIYQTSNFRVQPTESIVRFPNITNLCPFGEVFNATRFASVYAWNRKRISNCVADYSVLYNSASFSTFKCYGVSPTKLNDLCFTNVYADSFVIRGDEVRQIAPGQTGKIADYNYKLPDDFTGCVIAWNSNNLDSKVGGNYNYLYRLFRKSNLKPFERDISTEIYQAGSTPCNGVEGFNCYFPLQSYGFQPTNGVGYQPYRVVVLSFELLHAPATVCGPKKSTNLVKNKCVNFNFNGLTGTGVLTESNKKFLPFQQFGRDIADTTDAVRDPQTLEILDITPCSFGGVSVITPGTNTSNQVAVLYQGVNCTEVPVAIHADQLTPTWRVYSTGSNVFQTRAGCLIGAEHVNNSYECDIPIGAGICASYQTQTNSPRRARSVASQSIIAYTMSLGAENSVVYSNNSIAIPTNFTISVTTEILPVSMTKTSVDCTMYICGDSTECSNLLLQYGSFCTQLNRALTGIAVEQDKNTQEVFAQVKQIYKTPPIKDFGGFNFSQILPDPSKPSKRSFIEDLLFNKVTLADAGFIKQYGDCLGDIAARDLICAQKFNGLTVLPPLLTDEMIAQYTSALLAGTITSGWTFGAGAALQIPFAMQMAYRFNGIGVTQNVLYENQKLIANQFNSAIGKIQDSLSSTASALGKLQDVVNQNAQALNTLVKQLSSNFGAISSVLNDILSRLDKVEAEVQIDRLITGRLQSLQTYVTQQLIRAAEIRASANLAATKMSECVLGQSKRVDFCGKGYHLMSFPQSAPHGVVFLHVTYVPAQEKNFTTAPAICHDGKAHFPREGVFVSNGTHWFVTQRNFYEPQIITTDNTFVSGNCDVVIGIVNNTVYDPLQPELDSFKEELDKYFKNHTSPDVDLGDISGINASVVNIQKEIDRLNEVAKNLNESLIDLQELGKYEQYIK

SEQ ID NO: 1657 - protein, 1211 aa, Artificial Sequence
  SARS-CoV-2/France/HF2496/2020__EPI_ISL_418231 spike protein (1-1211)
MFVFLVLLPLVSSQCVNLTTRTQLPPAYTNSFTRGVYYPDKVFRSSVLHSTQDLFLPFFSNVTWFHAIHVSGTNGTKRFDNPVLPFNDGVYFASTEKSNIIRGWIFGTTLDSKTQSLLIVNNATNVVIKVCEFQFCNDPFLGVYYHKNNKSWMESEFRVYSSANNCTFEYVSQPFLMDLEGKQGNFKNLREFVFKNIDGYFKIYSKHTPINLVRDLPQGFSALEPLVDLPIGINITRFQTLLALHRSYLTPGDSSSGWTAGAAAYYVGYLQPRTFLLKYNENGTITDAVDCALDPLSETKCTLKSFTVEKGIYQTSNFRVQPTESIVRFPNITNLCPFGEVFNATRFASVYAWNRKRISNCVADYSVLYNSASFSTFKCYGVSPTKLNDLCFTNVYADSFVIRGDEVRQIAPGQTGKIADYNYKLPDDFTGCVIAWNSNNLDSKVGGNYNYLYRLFRKSNLKPFERDISTEIYQAGSTPCNGVEGFNCYFPLQSYGFQPTNGVGYQPYRVVVLSFELLHAPATVCGPKKSTNLVKNKCVNFNFNGLTGTGVLTESNKKFLPFQQFGRDIADTTDAVRDPQTLEILDITPCSFGGVSVITPGTNTSNQVAVLYQGVNCTEVPVAIHADQLTPTWRVYSTGSNVFQTRAGCLIGAEHVNNSYECDIPIGAGICASYQTQTNSPRRARSVASQSIIAYTMSLGAENSVAYSNNSIAIPTNFTISVTTEILPVSMTKTSVDCTMYICGDSTECSNLLLQYGSFCTQLNRALTGIAVEQDKNTQEVFAQVKQIYKTPPIKDFGGFNFSQILPDPSKPSKRSFIEDLLFNKVTLADAGFIKQYGDCLGDIVARDLICAQKFNGLTVLPPLLTDEMIAQYTSALLAGTITSGWTFGAGAALQIPFAMQMAYRFNGIGVTQNVLYENQKLIANQFNSAIGKIQDSLSSTASALGKLQDVVNQNAQALNTLVKQLSSNFGAISSVLNDILSRLDKVEAEVQIDRLITGRLQSLQTYVTQQLIRAAEIRASANLAATKMSECVLGQSKRVDFCGKGYHLMSFPQSAPHGVVFLHVTYVPAQEKNFTTAPAICHDGKAHFPREGVFVSNGTHWFVTQRNFYEPQIITTDNTFVSGNCDVVIGIVNNTVYDPLQPELDSFKEELDKYFKNHTSPDVDLGDISGINASVVNIQKEIDRLNEVAKNLNESLIDLQELGKYEQYIK

SEQ ID NO: 1658 - protein, 1211 aa, Artificial Sequence
  SARS-CoV-2/USA/WA-UW291/2020__EPI_ISL_418076 spike protein (1-1211)
MFVFLVLLPLVSSQCVNLTTRTQLPPAYTNSFTRGVYYPDKVFRSSVLHSTQDLFLPFFSNVTWFHAIHVSGTNGTKRFDNPVLPFNDGVYFASTEKSNIIRGWIFGTTLDSKTQSLLIVNNATNVVIKVCEFQFCNDPFLGVYYHKNNKSWMESEFRVYSSANNCTFEYVSQPFLMDLEGKQGNFKNLREFVFKNIDGYFKIYSKHTPINLVRDLPQGFSALEPLVDLPIGINITRFQTLLALHRSYLTPGDSSSGWTAGAAAYYVGYLQPRTFLLKYNENGTITDAVDCALDPLSETKCTLKSFTVEKGIYQTSNFRVQPTESIVRFPNITNLCPFGEVFNATRFASVYAWNRKRISNCVADYSVLYNSASFSTFKCYGVSPTKLNDLCFTNVYADSFVIRGDEVRQIAPGQTGKIADYNYKLPDDFTGCVIAWNSNNLDSKVGGNYNYLYRLFRKSNLKPFERDISTEIYQAGSTPCNGVEGFNCYFPLQSYGFQPTNGVGYQPYRVVVLSFELLHAPATVCGPKKSTNLVKNKCVNFNFNGLTGTGVLTESNKKFLPFQQFGRDIADTTDAVRDPQTLEILDITPCSFGGVSVITPGTNTSNQVAVLYQGVNCTEVPVAIHADQLTPTWRVYSTGSNVFQTRAGCLIGAEHVNNSYECDIPIGAGICASYQTQTNSPRRARSVASQSIIAYTMSLGAENSVAYSNNSIAIPTNFTISVTTEILPVSMTKTSVDCTMYICGDSTECSNLLLQYGSFCTQLNRALTGIAVEQDKNTQEVFAQVKQIYKTPPIKDFGGFNFSQILPDPSKPSKRSFIEDLLFNKVTLADAGFIKQYGDCLGDIAARDLICAQKFNGLTVLPPLLTDEMIAQYTSALLAGTITSGWTFGAGAALQIPFAMQMAYRFNGIGVTQNVLYENQKLIANQFNSAIGKIQYSLSSTASALGKLQDVVNQNAQALNTLVKQLSSNFGAISSVLNDILSRLDKVEAEVQIDRLITGRLQSLQTYVTQQLIRAAEIRASANLAATKMSECVLGQSKRVDFCGKGYHLMSFPQSAPHGVVFLHVTYVPAQEKNFTTAPAICHDGKAHFPREGVFVSNGTHWFVTQRNFYEPQIITTDNTFVSGNCDVVIGIVNNTVYDPLQPELDSFKEELDKYFKNHTSPDVDLGDISGINASVVNIQKEIDRLNEVAKNLNESLIDLQELGKYEQYIK

SEQ ID NO: 1659 - protein, 1211 aa, Artificial Sequence; identical to SEQ ID NO: 39
  SARS-CoV-2/Portugal/PT0034/2020__EPI_ISL_418019 spike protein (1-1211)

SEQ ID NO: 1660 - protein, 1211 aa, Artificial Sequence
  SARS-CoV-2/Iceland/202/2020__EPI_ISL_417750 spike protein (1-1211)
MFVFLVLLPLVSSQCVNLTTRTQLPPAYTNSFTRGVYYPDKVFRSSVLHSTQDLFLPFFSNVTWFHAIHVSGTNGTKRFDNPVLPFNDGVYFASTEKSNIIRGWIFGTTLDSKTQSLLIVNNATNVVIKVCEFQFCNDPFLGVYYHKNNKSWMESEFRVYSSANNCTFEYVSQPFLMDLEGKQGNFKNLREFVFKNIDGYFKIYSKHTPINLVRDLPQGFSALEPLVDLPIGINITRFQTLLALHRSYLTPGDSSSGWTAGAAAYYVGYLQPRTFLLKYNENGTITDAVDCALDPLSETKCTLKSFTVEKGIYQTSNFRVQPTESIVRFPNITNLCPFGEVFNATRFASVYAWNRKRISNCVADYSVLYNSASFSTFKCYGVSPTKLNDLCFTNVYADSFVIRGDEVRQIAPGQTGKIADYNYKLPDDFTGCVIAWNSNNLDSKVGGNYNYLYRLFRKSNLKPFERDISTEIYQAGSTPCNGVEGFNCYFPLQSYGFQPTNGVGYQPYRVVVLSFELLHAPATVCGPKKSTNLVKNKCVNFNFNGLTGTGVLTESNKKFLPFQQFGRDIADTTDAVRDPQTLEILDITPCSFGGVSVITPGTNTSNQVAVLYQDVNCTEVPVAIHADQLTPTWRVYSTGSNVFQTRAGCLIGAEHVNNSYECDIPIGAGICASYQTQTNSPRRARSVASQSIIAYTMSLGAENSVAYSNNSIAIPTNFTISVTTEILPVSMTKTSVDCTMYICGDSTECSNLLLQYGSFCTQLNRALTGIAVEQDKNTQEVFAQVKQIYKTPPIKDFGGFNFSQILPDPSKPSKRSFIEDLLFNKVTLADAGFIKQYGDCLGDIAARDLICAQKFNGLTVLPPLLTDEMIAQYTSALLAGTITSGWTFGAGAALQIPFAMQMAYRFNGIGVTQNVLYENQKLIANQFNSAIGKIQDSLSSTASALGKLQDVVNQNAQALNTLVKQLSSNFGAISSVLNDILSRLDKVEAEVQIDRLITGRLQSLQTYVTQQLIRAAEIRASANLAATKMSECVLGQSKRVDFCGKGYHLMSFPQSAPHGVVFLHVTYVPAQEKNFTTAPAICHDGKAHFPREGVFVSNGTHWFVTQRNFYEPQIITTDNTFVSGNCDVVIGIVNNTVYDPLQPELDSFKEELDKYFKNHTSPDVDLGDIPGINASVVNIQKEIDRLNEVAKNLNESLIDLQELGKYEQYIK

SEQ ID NO: 1661 - protein, 1211 aa, Artificial Sequence
  SARS-CoV-2/USA/WA-UW261/2020__EPI_ISL_418046 spike protein (1-1211)
MFVFLVLLPLVSSQCVNLTTRTQLPPAYTNSFTRGVYYPDKVFRSSVLHSTQDLFLPFFSNVTWFHAIHVSGTNGTKRFDNPVLPFNDGVYFASTEKSNIIRGWIFGTTLDSKTQSLLIVNNATNVVIKVCEFQFCNDPFLGVYYHKNNKSWMESEFRVYSSANNCTFEYVSQPFLMDLEGKQGNFKNLREFVFKNIDGYFKIYSKHTPINLVRDLPQGFSALEPLVDLPIGINITRFQTLLALHRSYLTPGDSSSGWTAGAAAYYVGYLQPRTFLLKYNENGTITDAVDCALDPLSETKCTLKSFTVEKGIYQTSNFRVQPTESIVRFPNITNLCPFGEVFNATRFTSVYAWNRKRISNCVADYSVLYNSASFSTFKCYGVSPTKLNDLCFTNVYADSFVIRGDEVRQIAPGQTGKIADYNYKLPDDFTGCVIAWNSNNLDSKVGGNYNYLYRLFRKSNLKPFERDISTEIYQAGSTPCNGVEGFNCYFPLQSYGFQPTNGVGYQPYRVVVLSFELLHAPATVCGPKKSTNLVKNKCVNFNFNGLTGTGVLTESNKKFLPFQQFGRDIADTTDAVRDPQTLEILDITPCSFGGVSVITPGTNTSNQVAVLYQDVNCTEVPVAIHADQLTPTWRVYSTGSNVFQTRAGCLIGAEHVNNSYECDIPIGAGICASYQTQTNSPRRARSVASQSIIAYTMSLGAENSVAYSNNSIAIPTNFTISVTTEILPVSMTKTSVDCTMYICGDSTECSNLLLQYGSFCTQLNRALTGIAVEQDKNTQEVFAQVKQIYKTPPIKDFGGFNFSQILPDPSKPSKRSFIEDLLFNKVTLADAGFIKQYGDCLGDIAARDLICAQKFNGLTVLPPLLTDEMIAQYTSALLAGTITSGWTFGAGAALQIPFAMQMAYRFNGIGVTQNVLYENQKLIANQFNSAIGKIQDSLSSTASALGKLQDVVNQNAQALNTLVKQLSSNFGAISSVLNDILSRLDKVEAEVQIDRLITGRLQSLQTYVTQQLIRAAEIRASANLAATKMSECVLGQSKRVDFCGKGYHLMSFPQSAPHGVVFLHVTYVPAQEKNFTTAPAICHDGKAHFPREGVFVSNGTHWFVTQRNFYEPQIITTDNTFVSGNCDVVIGIVNNTVYDPLQPELDSFKEELDKYFKNHTSPDVDLGDISGINASVVNIQKEIDRLNEVAKNLNESLIDLQELGKYEQYIK

SEQ ID NO: 1662 - protein, 1211 aa, Artificial Sequence
  SARS-CoV-2/Portugal/PT0035/2020__EPI_ISL_418020 spike protein (1-1211)
MFVFLVLLPLVSSQCVNLTTRTQLPPAYTNSFTRGVYYPDKVFRSSVLHSTQDLFLPFFSNVTWFHAIHVSGTNGTKRFDNPVLPFNDGVYFASTEKSNIIRGWIFGTTLDSKTQSLLIVNNATNVVIKVCEFQFCNDPFLGVYYHKNNKSWMESEFRVYSSANNCTFEYVSQPFLMDLEGKQGNFKNLREFVFKNIDGYFKIYSKHTPINLVRDLPQGFSALEPLVDLPIGINITRFQTLLALHRSYLTPGDSSSGWTAGAAAYYVGYLQPRTFLLKYNENGTITDAVDCALDPLSETKCTLKSFTVEKGIYQTSNFRVQPTESIVRFPNITNLCPFGEVFNATRFASVYAWNRKRISNCVADYSVLYNSASFSTFKCYGVSPTKLNDLCFTNVYADSFVIRGDEVRQIAPGQTGKIADYNYKLPDDFTGCVIAWNSNNLDSKVGGNYNYLYRLFRKSNLKPFERDISTEIYQAGSTPCNGVEGFNCYFPLQSYGFQPTNGVGYQPYRVVVLSFELLHAPATVCGPKKSTNLVKNKCVNFNFNGLTGTGVLTESNKKFLPFQQFGRDIADTTDAVRDPQTLEILDITPCSFGGVSVITPGTNTSNQVAVLYQDVNCTEVPVAIHADQLTPTWRVYSTGSNVFQTRAGCLIGAEHVNNSYECDIPIGAGICASYQTQTNSPRRARSVASQSIIAYTMSLGAENSVAYSNNSIAIPTNFTISVTTEILPVSMTKTSVDCTMYICGDSTECSNLLLQYGSFCTQLNRALTGIAVEQDKNTQEVFAQVKQIYKTPPIKDFGGFNFSQILPDPSKPSKRSFIEDLLFNKVTLADAGFIKQYGDCLGDISARDLICAQKFNGLTVLPPLLTDEMIAQYTSALLAGTITSGWTFGAGAALQIPFAMQMAYRFNGIGVTQNVLYENQKLIANQFNSAIGKIQDSLSSTASALGKLQDVVNQNAQALNTLVKQLSSNFGAISSVLNDILSRLDKVEAEVQIDRLITGRLQSLQTYVTQQLIRAAEIRASANLAATKMSECVLGQSKRVDFCGKGYHLMSFPQSAPHGVVFLHVTYVPAQEKNFTTAPAICHDGKAHFPREGVFVSNGTHWFVTQRNFYEPQIITTDNTFVSGNCDVVIGIVNNTVYDPLQPELDSFKEELDKYFKNHTSPDVDLGDISGINASVVNIQKEIDRLNEVAKNLNESLIDLQELGKYEQYIK

SEQ ID NO: 1663 - protein, 1211 aa, Artificial Sequence
  SARS-CoV-2/USA/NY-NYUMC7/2020__EPI_ISL_418192 spike protein (1-1211)
MFVFLVLLPLVSSQCVNLTTRTQLPPAYTNSFTRGVYYPDKVFRSSVLHSTQDLFLPFFSNVTWFHAIHVSGTNGTKRFDNPVLPFNDGVYFASTEKSNIIRGWIFGTTLDSKTQSLLIVNNATNVVIKVCEFQFCNDPFLGVYHHKNNKSWMESEFRVYSSANNCTFEYVSQPFLMDLEGKQGNFKNLREFVFKNIDGYFKIYSKHTPINLVRDLPQGFSALEPLVDLPIGINITRFQTLLALHRSYLTPGDSSSGWTAGAAAYYVGYLQPRTFLLKYNENGTITDAVDCALDPLSETKCTLKSFTVEKGIYQTSNFRVQPTESIVRFPNITNLCPFGEVFNATRFASVYAWNRKRISNCVADYSVLYNSASFSTFKCYGVSPTKLNDLCFTNVYADSFVIRGDEVRQIAPGQTGKIADYNYKLPDDFTGCVIAWNSNNLDSKVGGNYNYLYRLFRKSNLKPFERDISTEIYQAGSTPCNGVEGFNCYFPLQSYGFQPTNGVGYQPYRVVVLSFELLHAPATVCGPKKSTNLVKNKCVNFNFNGLTGTGVLTESNKKFLPFQQFGRDIADTTDAVRDPQTLEILDITPCSFGGVSVITPGTNTSNQVAVLYQGVNCTEVPVAIHADQLTPTWRVYSTGSNVFQTRAGCLIGAEHVNNSYECDIPIGAGICASYQTQTNSPRRARSVASQSIIAYTMSLGAENSVAYSNNSIAIPTNFTISVTTEILPVSMTKTSVDCTMYICGDSTECSNLLLQYGSFCTQLNRALTGIAVEQDKNTQEVFAQVKQIYKTPPIKDFGGFNFSQILPDPSKPSKRSFIEDLLFNKVTLADAGFIKQYGDCLGDIAARDLICAQKFNGLTVLPPLLTDEMIAQYTSALLAGTITSGWTFGAGAALQIPFAMQMAYRFNGIGVTQNVLYENQKLIANQFNSAIGKIQDSLSSTASALGKLQDVVNQNAQALNTLVKQLSSNFGAISSVLNDILSRLDKVEAEVQIDRLITGRLQSLQTYVTQQLIRAAEIRASANLAATKMSECVLGQSKRVDFCGKGYHLMSFPQSAPHGVVFLHVTYVPAQEKNFTTAPAICHDGKAHFPREGVFVSNGTHWFVTQRNFYEPQIITTDNTFVSGNCDVVIGIVNNTVYDPLQPELDSFKEELDKYFKNHTSPDVDLGDISGINASVVNIQKEIDRLNEVAKNLNESLIDLQELGKYEQYIK

SEQ ID NO: 1664 - protein, 1211 aa, Artificial Sequence
  SARS-CoV-2/Iceland/189/2020__EPI_ISL_417709 spike protein (1-1211)
MFVFLVLLPLVSSQCVNLTTRTQLPPAYTNSFTRGVYYPDKVFRSSVLHSTQDLFLPFFSNVTWFHAIHVSGTNGTKRFDNPVLPFNDGVYFASTEKSNIIRGWIFGTTLDSKTQSLLIVNNATNVVIKVCEFQFCNDPFLGVYYHKNNKSWMESEFRVYSSANNCTFEYVSQPFLMDLEGKQGNFKNLREFVFKNIDGYFKIYSKHTPINLVRDLPQGFSALEPLVDLPIGINITRFQTLLALHRSYLTPGDSSSGWTAGAAAYYVGYLQPRTFLLKYNENGTITDAVDCALDPLSETKCTLKSFTVEKGIYQTSNFRVQPTESIVRFPNITNLCPFGEVFNATRFASVYAWNRKRISNCVADYSVLYNSASFSTFKCYGVSPTKLNDLCFTNVYADSFVIRGDEVRQIAPGQTGKIADYNYKLPDDFTGCVIAWNSNNLDSKVGGNYNYLYRLFRKSNLKPFERDISTEIYQAGSTPCNGVEGFNCYFPLQSYGFQPTNGVGYQPYRVVVLSFELLHAPATVCGPKKSTNLVKNKCVNFNFNGLTGTGVLTESNKKFLPFQQFGRDIADTTDAVRDPQTLEILDITPCSFGGVSVITPGTNTSNQVAVLYQGVNCTEVPVAIHADQLTPTWRVYSTGSNVFQTRAGCLIGAEHVNNSYECDIPIGAGICASYQTQTNSPRRARSVASQSIIAYTMSLGAENSVAYSNNSIAIPTNFTISVTTEILPVSMTKTSVDCTMYICGDSTECSNLLLQYGSFCTQLNRALTGIAVEQDKNTQEVFAQVKQIYKTPPIKDFGGFNFSQILPDPSKPSKRSFIEDLLFNKVTLADAGFTKQYGDCLGDIAARDLICAQKFNGLTVLPPLLTDEMIAQYTSALLAGTITSGWTFGAGAALQIPFAMQMAYRFNGIGVTQNVLYENQKLIANQFNSAIGKIQDSLSSTASALGKLQDVVNQNAQALNTLVKQLSSNFGAISSVLNDILSRLDKVEAEVQIDRLITGRLQSLQTYVTQQLIRAAEIRASANLAATKMSECVLGQSKRVDFCGKGYHLMSFPQSAPHGVVFLHVTYVPAQEKNFTTAPAICHDGKAHFPREGVFVSNGTHWFVTQRNFYEPQIITTDNTFVSGNCDVVIGIVNNTVYDPLQPELDSFKEELDKYFKNHTSPDVDLGDISGINASVVNIQKEIDRLNEVAKNLNESLIDLQELGKYEQYIK

SEQ ID NO: 1665 - protein, 1211 aa, Artificial Sequence
  SARS-CoV-2/Australia/NSW56/2020__EPI_ISL_417408 spike protein (1-1211)
MFVFLVLLPLVSSQCVNLTTRTQLPPAYTNSFTRGVYYPDKVFRSSVLHSTQDLFLPFFSNVTWFHAIHVSGTNGTKRFDNPVLPFNDGVYFASTEKSNIIRGWIFGTTLDSKTQSLLIVNNATNVVIKVCEFQFCNDPFLGVYYHKNNKSWMESEFRVYSSANNCTFEYVSQPFLMDLEGKQGNFKNLREFVFKNIDGYFKIYSKHTPINLVRDLPQGFSALEPLVDLPIGINITRFQTLLALHRSYLTPGDSSSGWTAGAAAYYVGYLQPRTFLLKYNENGTITDAVDCALDPLSETKCTLKSFTVEKGIYQTSNFRVQPTESIVRFPNITNLCPFGEVFNATRFASVYAWNRKRISNCVADYSVLYNSASFSTFKCYGVSPTKLNDLCFTNVYADSFVIRGDEVRQIAPGQTGKIADYNYKLPDDFTGCVIAWNSNNLDSKVGGNYNYLYRLFRKSNLKPFERDISTEIYQAGSTPCNGVEGFNCYFPLQSYGFQPTNGVGYQPYRVVVLSFELLHAPATVCGPKKSTNLVKNKCVNFNFNGLTGTGVLTESNKKFLPFQQFGRDIADTTDAVRDPQTLEILDITPCSFGGVSVITPGTNTSNQVAVLYQDVNCTEVPVAIHADQLTPTWRVYSTGSNVFQTRAGCLIGAEHVNNSYECDIPIGAGICASYQTQTNSPRRARSVASQSIIAYTMSLGAENSVAYSNNSIAIPTNFTISVTTEILPVSMTKTSVDCTMYICGDSTECSNLLLQYGSFCTQLNRALTGIAVEQDKNTQEVFAQVKQIYKTPPIKDFGGFNFSQILPDSSKPSKRSFIEDLLFNKVTLADAGFIKQYGDCLGDIAARDLICAQKFNGLTVLPPLLTDEMIAQYTSALLAGTITSGWTFGAGAALQIPFAMQMAYRFNGIGVTQNVLYENQKLIANQFNSAIGKIQDSLSSTASALGKLQDVVNQNAQALNTLVKQLSSNFGAISSVLNDILSRLDKVEAEVQIDRLITGRLQSLQTYVTQQLIRAAEIRASANLAATKMSECVLGQSKRVDFCGKGYHLMSFPQSAPHGVVFLHVTYVPAQEKNFTTAPAICHDGKAHFPREGVFVSNGTHWFVTQRNFYEPQIITTDNTFVSGNCDVVIGIVNNTVYDPLQPELDSFKEELDKYFKNHTSPDVDLGDISGINASVVNIQKEIDRLNEVAKNLNESLIDLQELGKYEQYIK

SEQ ID NO: 1666 - protein, 1211 aa, Artificial Sequence
  SARS-CoV-2/Iceland/280/2020__EPI_ISL_417608 spike protein (1-1211)
MFVFLVLLPLVSSQCVNLTTRTQLPPAYTNSFTRGVYYPDKVFRSSVLHSTQDLFLPFFSNVTWFHAIHVSGTNGTKRFDNPVLPFNDGVYFASTEKSNIIRGWIFGTTLDSKTQSLLIVNNATNVVIKVCEFQFCNDPFLGVYYHKNNKSWMESEFRVYSSANNCTFEYVSQPFLMDLEGKQGNFKNLREFVFKNIDGYFKIYSKHTPINLVRDLPQGFSALEPLVDLPIGINITRFQTLLALHRSYLTPGDSSSGWTAGAAAYYVGYLQPRTFLLKYNENGTITDAVDCALDPLSETKCTLKSFTVEKGIYQTSNFRVQPTESIVRFPNITNLCPFGEVFNATRFASVYAWNRKRISNCVADYSVLYNSASFSTFKCYGVSPTKLNDLCFTNVYADSFVIRGDEVRQIAPGQTGKIADYNYKLPDDFTGCVIAWNSNNLDSKVGGNYNYLYRLFRKSNLKPFERDISTEIYQAGSTPCNGVEGFNCYFPLQSYGFQPTNGVGYQPYRVVVLSFELLHAPATVCGPKKSTNLVKNKCVNFNFNGLTGTGVLTESNKKFLPFQQFGRDIADTTDAVRDPQTLEILDITPCSFGGVSVITPGTNTSNQVAVLYQGVNCTEVPVAIHADQLTPTWRVYSTGSNVFQTRAGCLIGAEHVNNSYECDIPIGAGICASYHTQTNSPRRARSVASQSIIAYTMSLGAENSVAYSNNSIAIPTNFTISVTTEILPVSMTKTSVDCTMYICGDSTECSNLLLQYGSFCTQLNRALTGIAVEQDKNTQEVFAQVKQIYKTPPIKDFGGFNFSQILPDPSKPSKRSFIEDLLFNKVTLADAGFIKQYGDCLGDIAARDLICAQKFNGLTVLPPLLTDEMIAQYTSALLAGTITSGWTFGAGAALQIPFAMQMAYRFNGIGVTQNVLYENQKLIANQFNSAIGKIQDSLSSTASALGKLQDVVNQNAQALNTLVKQLSSNFGAISSVLNDILSRLDKVEAEVQIDRLITGRLQSLQTYVTQQLIRAAEIRASANLAATKMSECVLGQSKRVDFCGKGYHLMSFPQSAPHGVVFLHVTYVPAQEKNFTTAPAICHDGKAHFPREGVFVSNGTHWFVTQRNFYEPQIITTDNTFVSGNCDVVIGIVNNTVYDPLQPELDSFKEELDKYFKNHTSPDVDLGDISGINASVVNIQKEIDRLNEVAKNLNESLIDLQELGKYEQYIK

SEQ ID NO: 1667 - protein, 1211 aa, Artificial Sequence; identical to SEQ ID NO: 39
  SARS-CoV-2/Iceland/247/2020__EPI_ISL_417575 spike protein (1-1211)

SEQ ID NO: 1668 - protein, 1211 aa, Artificial Sequence
  SARS-CoV-2/Iceland/238/2020__EPI_ISL_417566 spike protein (1-1211)
MFVFLVLLPLVSSQCVNLTTRTQLPPAYTNSFTRGVYYPDKVFRSSVLHSTQDLFLPFFSNVTWFHAIHVSGTNGTKRFDNPVLPFNDGVYFASTEKSNIIRGWIFGTTLDSKTQSLLIVNNATNVVIKVCEFQFCNDPFLGVYYHKNNKSWMESEFRVYSSANNCTFEYVSQPFLMDLEGKQGNFKNLREFVFKNIDGYFKIYSKHTPINLVRDLPQGFSALEPLVDLPIGINITRFQTLLALHRSYLTPGDSSSGWTAGAAAYYVGYLQPRTFLLKYNENGTITDAVDCALDPLSETKCTLKSFTVEKGIYQTSNFRVQPTESIVRFPNITNLCPFGEVFNATRFASVYAWNRKRISNCVADYSVLYNSASFSTFKCYGVSPTKLNDLCFTNVYADSFVIRGDEVRQIAPGQTGKIADYNYKLPDDFTGCVIAWNSNNLDSKVGGNYNYLYRLFRKSNLKPFERDISTEIYQAGSTPCNGVEGFNCYFPLQSYGFQPTNGVGYQPYRVVVLSFELLHAPATVCGPKKSTNLVKNKCVNFNFNGLTGTGVLTESNKKFLPFQQFGRDIADTTDAVRDPQTLEILDITPCSFGGVSVITPGTNTSNQVAVLYQGVNCTEVPVAIHADQLTPTWRVYSTGSNVFQTRAGCLIGAEHVNNSYECDIPIGAGICASYQTQTNSPRRARSVASQSIIAYTMSLGAENSVAYSNNSIAIPTNFTISVTTEILPVSMTKTSVDCTMYICGDSTECSNLLLQYGSFCTQLNRALTGIAVEQDKNTQEVFAQVKQIYKTPPIKDFGGFNFSQILPDPSKPSKRSFIEDLLFNKVTLADVGFIKQYGDCLGDIAARDLICAQKFNGLTVLPPLLTDEMIAQYTSALLAGTITSGWTFGAGAALQIPFAMQMAYRFNGIGVTQNVLYENQKLIANQFNSAIGKIQDSLSSTASALGKLQDVVNQNAQALNTLVKQLSSNFGAISSVLNDILSRLDKVEAEVQIDRLITGRLQSLQTYVTQQLIRAAEIRASANLAATKMSECVLGQSKRVDFCGKGYHLMSFPQSAPHGVVFLHVTYVPAQEKNFTTAPAICHDGKAHFPREGVFVSNGTHWFVTQRNFYEPQIITTDNTFVSGNCDVVIGIVNNTVYDPLQPELDSFKEELDKYFKNHTSPDVDLGDISGINASVVNIQKEIDRLNEVAKNLNESLIDLQELGKYEQYIK

SEQ ID NO: 1669 - protein, 1211 aa, Artificial Sequence
  SARS-CoV-2/Greece/16/2020__EPI_ISL_418265 spike protein (1-1211)
MFVFLVLLPLVSSQCVNLTTRTQLPPAYTNSFTRGVYYPDKVFRSSVLHSTQDLFLPFFSNVTWFHAIHVSGTNGTKRFDNPVLPFNDGVYFASTEKSNIIRGWIFGTTLDSKTQSLLIVNNATNVVIKVCEFQFCNDPFLGVYYHKNNKSWMESEFRVYSSANNCTFEYVSQPFLMDLEGKQGNFKNLREFVFKNVDGYFKIYSKHTPINLVRDLPQGFSALEPLVDLPIGINITRFQTLLALHRSYLTPGDSSSGWTAGAAAYYVGYLQPRTFLLKYNENGTITDAVDCALDPLSETKCTLKSFTVEKGIYQTSNFRVQPTESIVRFPNITNLCPFGEVFNATRFASVYAWNRKRISNCVADYSVLYNSASFSTFKCYGVSPTKLNDLCFTNVYADSFVIRGDEVRQIAPGQTGKIADYNYKLPDDFTGCVIAWNSNNLDSKVGGNYNYLYRLFRKSNLKPFERDISTEIYQAGSTPCNGVEGFNCYFPLQSYGFQPTNGVGYQPYRVVVLSFELLHAPATVCGPKKSTNLVKNKCVNFNFNGLTGTGVLTESNKKFLPFQQFGRDIADTTDAVRDPQTLEILDITPCSFGGVSVITPGTNTSNQVAVLYQDVNCTEVPVAIHADQLTPTWRVYSTGSNVFQTRAGCLIGAEHVNNSYECDIPIGAGICASYQTQTNSPRRARSVASQSIIAYTMSLGAENSVAYSNNSIAIPTNFTISVTTEILPVSMTKTSVDCTMYICGDSTECSNLLLQYGSFCTQLNRALTGIAVEQDKNTQEVFAQVKQIYKTPPIKDFGGFNFSQILPDPSKPSKRSFIEDLLFNKVTLADAGFIKQYGDCLGDIAARDLICAQKFNGLTVLPPLLTDEMIAQYTSALLAGTITSGWTFGAGAALQIPFAMQMAYRFNGIGVTQNVLYENQKLIANQFNSAIGKIQDSLSSTASALGKLQDVVNQNAQALNTLVKQLSSNFGAISSVLNDILSRLDKVEAEVQIDRLITGRLQSLQTYVTQQLIRAAEIRASANLAATKMSECVLGQSKRVDFCGKGYHLMSFPQSAPHGVVFLHVTYVPAQEKNFTTAPAICHDGKAHFPREGVFVSNGTHWFVTQRNFYEPQIITTDNTFVSGNCDVVIGIVNNTVYDPLQPELDSFKEELDKYFKNHTSPDVDLGDISGINASVVNIQKEIDRLNEVAKNLNESLIDLQELGKYEQYIK

SEQ ID NO: 1670 - protein, 1211 aa, Artificial Sequence
  SARS-CoV-2/Iceland/319/2020__EPI_ISL_417648 spike protein (1-1211)
MFVFLVLLPLVSSQCVNLTTRTQLPPAYTNSFTRGVYYPDKVFRSSVLHSTQDLFLPFFSNVTWFHAIHVSGTNGTKRFDNPVLPFNDGVYFASTEKSNIIRGWIFGTTLDSKTQSLLIVNNATNVVIKVCEFQFCNDPFLGVYYHKNNKSWMESEFRVYSSANNCTFEYVSQPFLIDLEGKQGNFKNLREFVFKNIDGYFKIYSKHTPINLVRDLPQGFSALEPLVDLPIGINITRFQTLLALHRSYLTPGDSSSGWTAGAAAYYVGYLQPRTFLLKYNENGTITDAVDCALDPLSETKCTLKSFTVEKGIYQTSNFRVQPTESIVRFPNITNLCPFGEVFNATRFASVYAWNRKRISNCVADYSVLYNSASFSTFKCYGVSPTKLNDLCFTNVYADSFVIRGDEVRQIAPGQTGKIADYNYKLPDDFTGCVIAWNSNNLDSKVGGNYNYLYRLFRKSNLKPFERDISTEIYQAGSTPCNGVEGFNCYFPLQSYGFQPTNGVGYQPYRVVVLSFELLHAPATVCGPKKSTNLVKNKCVNFNFNGLTGTGVLTESNKKFLPFQQFGRDIADTTDAVRDPQTLEILDITPCSFGGVSVITPGTNTSNQVAVLYQGVNCTEVPVAIHADQLTPTWRVYSTGSNVFQTRAGCLIGAEHVNNSYECDIPIGAGICASYQTQTNSPRRARSVASQSIIAYTMSLGAENSVAYSNNSIAIPTNFTISVTTEILPVSMTKTSVDCTMYICGDSTECSNLLLQYGSFCTQLNRALTGIAVEQDKNTQEVFAQVKQIYKTPPIKDFGGFNFSQILPDPSKPSKRSFIEDLLFNKVTLADAGFIKQYGDCLGDIAARDLICAQKFNGLTVLPPLLTDEMIAQYTSALLAGTITSGWTFGAGAALQIPFAMQMAYRFNGIGVTQNVLYENQKLIANQFNSAIGKIQDSLSSTASALGKLQDVVNQNAQALNTLVKQLSSNFGAISSVLNDILSRLDKVEAEVQIDRLITGRLQSLQTYVTQQLIRAAEIRASANLAATKMSECVLGQSKRVDFCGKGYHLMSFPQSAPHGVVFLHVTYVPAQEKNFTTAPAICHDGKAHFPREGVFVSNGTHWFVTQRNFYEPQIITTDNTFVSGNCDVVIGIVNNTVYDPLQPELDSFKEELDKYFKNHTSPDVDLGDISGINASVVNIQKEIDRLNEVAKNLNESLIDLQELGKYEQYIK

SEQ ID NO: 1671 - protein, 1211 aa, Artificial Sequence
  SARS-CoV-2/Congo/94/2020__EPI_ISL_417947 spike protein (1-1211)
MFVFLVLLPLVSSQCVNLTTRTQLPPAYTNSFTRGVYYPDKVFRSSVLHSTQDLFLPFFSNVTWFHAIHVSGTNGTKRFDNPVLPFNDGVYFASTEKSNIIRGWIFGTTLDSKTQSLLIVNNATNVVIKVCEFQFCNDPFLGVYYHKNNKSWMESEFRVYSSANNCTFEYVSQPFLMDLEGKQGNFKNLREFVFKNIDGYFKIYSKHTPINLVRDLPQGFSALEPLVDLPIGINITRFQTLLALHRSYLTPGDSSSGWTAGAAAYYVGYLQPRTFLLKYNENGTITDAVDCALDPLSETKCTLKSFTVEKGIYQTSNFRVQPTESIVRFPNITNLCPFGEVFNATRFASVYAWNRKRISNCVADYSVLYNSASFSTFKCYGVSPTKLNDLCFTNVYADSFVIRGDEVRQIAPGQTGKIADYNYKLPDDFTGCVIAWNSNNLDSKVGGNYNYLYRLFRKSNLKPFERDISTEIYQAGSTPCNGVEGFNCYFPLQSYGFQPTNGVGYQPYRVVVLSFELLHAPATVCGPKKSTNLVKNKCVNFNFNGLTGTGVLTESNKKFLPFQQFGRDIADTTDAVRDPQTLEILDITPCSFGGVSVITPGTNTSNQVAVLYQGVNCTEVPVAIHADQLTPTWRVYSTGSNVFQTRAGCLIGAEHVNNSYECDIPIGAGICASYQTQTNSPRRARSVASQSIIAYTMSLGAENSVAYSNNSIAIPTNFTISVTTEILPVSMTKTSVDCTMYICGDSTECSNLLLQYGSFCTQLNRALTGIAVEQDKNTQEVFAQVKQIYKTPPIKDFGGFNFSQILPDPSKPSKRSFIEDILFNKVTLADAGFIKQYGDCLGDIAARDLICAQKFNGLTVLPPLLTDEMIAQYTSALLAGTITSGWTFGAGAALQIPFAMQMAYRFNGIGVTQNVLYENQKLIANQFNSAIGKIQDSLSSTASALGKLQDVVNQNAQALNTLVKQLSSNFGAISSVLNDILSRLDKVEAEVQIDRLITGRLQSLQTYVTQQLIRAAEIRASANLAATKMSECVLGQSKRVDFCGKGYHLMSFPQSAPHGVVFLHVTYVPAQEKNFTTAPAICHDGKAHFPREGVFVSNGTHWFVTQRNFYEPQIITTDNTFVSGNCDVVIGIVNNTVYDPLQPELDSFKEELDKYFKNHTSPDVDLGDISGINASVVNIQKEIDRLNEVAKNLNESLIDLQELGKYEQYIK

SEQ ID NO: 1672 - protein, 1211 aa, Artificial Sequence
  SARS-CoV-2/Congo/158/2020__EPI_ISL_417950 spike protein (1-1211)
MFVFLVLLPLVSSQCVNLTTRTQLPPAYTNSFTRGVYYPDKVFRSSVLHSTQDLFLPFFSNVTWFHAIHVSGTNGTKRFDNPVLPFNDGVYFASTEKSNIIRGWIFGTTLDSKTQSLLIVNNATNVVIKVCEFQFCNDPFLGVYYHKNNKSWMESEFRVYSSANNCTFEYVSQPFLMDLEGKQGNFKNLREFVFKNIDGYFKIYSKHTPINLVRDLPQGFSALEPLVDLPIGINITRFQTLLALHRSYLTPGDSSSGWTAGAAAYYVGYLQPRTFLLKYNENGTITDAVDCALDPLSETKCTLKSFTVEKGIYQTSNFRVQPTESIVRFPNITNLCPFGEVFNATRFASVYAWNRKRISNCVADYSVLYNSASFSTFKCYGVSPTKLNDLCFTNVYADSFVIRGDEVRQIAPGQTGKIADYNYKLPDDFTGCVIAWNSNNLDSKVGGNYNYLYRLFRKSNLKPFERDISTEIYQAGSTPCNGVEGFNCYFPLQSYGFQPTNGVGYQPYRVVVLSFELLHAPATVCGPKKSTNLVKNKCVNFNFNGLTGTGVLTESNKKFLPFQQFGRDIADTTDAVRDPQTLEILDITPCSFGGVSVITPGTNTSNQVAVLYQDVNCTEVPVAIHADQLTPTWRVYSTGSNVFQTRAGCLIGAEHVNNSYECDIPIGAGICASYQTQTNSPRRARSVASQSIIAYTMSLGAENSVAYSNNSIAIPTNFTISVTTEILPVSMTKTSVDCTMYICGDSTECSNLLLQYGSFCTQLNRALTGIAVEQDKNTQEVFAQVKQIYKTPPIKDFGGFNFSQILPDPSKPSKRSFIEDLLFNKVTLADAGFIKQYGDCLGDIAARDLICAQKFNGLTVLPPLLTDEMIAQYTSALLAGTITSGWTFGAGAALQIPFAMQMAYRFNGIGVTQNVLYENQKLIANQFNSAIGKIQDSLSSTASALGKLQDVVNQNAQALNTLVKQLSSNFGAISSVLNDILSRLDKVEAEVQIDRLITGRLQSLQTYVTQQLIRAAEIRASANLAATKMSECVLGQSKRVDFCGKGYHLMSFPQSAPHGVVFLHVTYVPAQEKNFTTAPAICHDGKAHFPREGVFVSNGTHWFVTQRNFYEPQIITTDNTFLSGNCDVVIGIVNNTVYDPLQPELDSFKEELDKYFKNHTSPDVDLGDISGINASVVNIQKEIDRLNEVAKNLNESLIDLQELGKYEQYIK

SEQ ID NO: 1673 - protein, 1211 aa, Artificial Sequence
  SARS-CoV-2/USA/UT-00034/2020__EPI_ISL_417977 spike protein (1-1211)
MFVFLVLLPLVSSQCVNLTTRTQLPPAYTNSFTRGVYYPDKVFRSSVLHSTQDLFLPFFSNVTWFHAIHVSGTNGTKRFDNPVLPFNDGVYFASTEKSNIIRGWIFGTTLDSKTQSLLIVNNATNVVIKVCEFQFCNDPFLGVYYYKNNKSWMESEFRVYSSANNCTFEYVSQPFLMDLEGKQGNFKNLREFVFKNIDGYFKIYSKHTPINLVRDLPQGFSALEPLVDLPIGINITRFQTLLALHRSYLTPGDSSSGWTAGAAAYYVGYLQPRTFLLKYNENGTITDAVDCALDPLSETKCTLKSFTVEKGIYQTSNFRVQPTESIVRFPNITNLCPFGEVFNATRFASVYAWNRKRISNCVADYSVLYNSASFSTFKCYGVSPTKLNDLCFTNVYADSFVIRGDEVRQIAPGQTGKIADYNYKLPDDFTGCVIAWNSNNLDSKVGGNYNYLYRLFRKSNLKPFERDISTEIYQAGSTPCNGVEGFNCYFPLQSYGFQPTNGVGYQPYRVVVLSFELLHAPATVCGPKKSTNLVKNKCVNFNFNGLTGTGVLTESNKKFLPFQQFGRDIADTTDAVRDPQTLEILDITPCSFGGVSVITPGTNTSNQVAVLYQGVNCTEVPVAIHADQLTPTWRVYSTGSNVFQTRAGCLIGAEHVNNSYECDIPIGAGICASYQTQTNSPRRARSVASQSIIAYTMSLGAENSVAYSNNSIAIPTNFTISVTTEILPVSMTKTSVDCTMYICGDSTECSNLLLQYGSFCTQLNRALTGIAVEQDKNTQEVFAQVKQIYKTPPIKDFGGFNFSQILPDPSKPSKRSFIEDLLFNKVTLADAGFIKQYGDCLGDIAARDLICAQKFNGLTVLPPLLTDEMIAQYTSALLAGTITSGWTFGAGAALQIPFAMQMAYRFNGIGVTQNVLYENQKLIANQFNSAIGKIQDSLSSTASALGKLQDVVNQNAQALNTLVKQLSSNFGAISSVLNDILSRLDKVEAEVQIDRLITGRLQSLQTYVTQQLIRAAEIRASANLAATKMSECVLGQSKRVDFCGKGYHLMSFPQSAPHGVVFLHVTYVPAQEKNFTTAPAICHDGKAHFPREGVFVSNGTHWFVTQRNFYEPQIITTDNTFVSGNCDVVIGIVNNTVYDPLQPELDSFKEELDKYFKNHTSPDVDLGDISGINASVVNIQKEIDRLNEVAKNLNESLIDLQELGKYEQYIK

SEQ ID NO: 1674 - protein, 1211 aa, Artificial Sequence
  SARS-CoV-2/USA/UT-00033/2020__EPI_ISL_417976 spike protein (1-1211)
MFVFLVLLPLVSSQCVNLTTRTQLPPAYTNSFTRGVYYPDKVFRSSVLHSTQDLFLPFFSNVTWFHAIHVSGTNGTKRFDNPVLPFNDGVYFASTEKSNIIRGWIFGTTLDSKTQSLLIVNNATNVVIKVCEFQFCNDPFLGVYYHKNNKSWMESEFRVYSSANNCTFEYVSQPFLMDLEGKQGNFKNLREFVFKNIDGYFKIYSKHTPINLVRDLPQGFSALEPLVDLPIGINITRFQTLLALHRSYLTPGDSSSGLTAGAAAYYVGYLQPRTFLLKYNENGTITDAVDCALDPLSETKCTLKSFTVEKGIYQTSNFRVQPTESIVRFPNITNLCPFGEVFNATRFASVYAWNRKRISNCVADYSVLYNSASFSTFKCYGVSPTKLNDLCFTNVYADSFVIRGDEVRQIAPGQTGKIADYNYKLPDDFTGCVIAWNSNNLDSKVGGNYNYLYRLFRKSNLKPFERDISTEIYQAGSTPCNGVEGFNCYFPLQSYGFQPTNGVGYQPYRVVVLSFELLHAPATVCGPKKSTNLVKNKCVNFNFNGLTGTGVLTESNKKFLPFQQFGRDIADTTDAVRDPQTLEILDITPCSFGGVSVITPGTNTSNQVAVLYQGVNCTEVPVAIHADQLTPTWRVYSTGSNVFQTRAGCLIGAEHVNNSYECDIPIGAGICASYQTQTNSPRRARSVASQSIIAYTMSLGAENSVAYSNNSIAIPTNFTISVTTEILPVSMTKTSVDCTMYICGDSTECSNLLLQYGSFCTQLNRALTGIAVEQDKNTQEVFAQVKQIYKTPPIKDFGGFNFSQILPDPSKPSKRSFIEDLLFNKVTLADAGFIKQYGDCLGDIAARDLICAQKFNGLTVLPPLLTDEMIAQYTSALLAGTITSGWTFGAGAALQIPFAMQMAYRFNGIGVTQNVLYENQKLIANQFNSAIGKIQDSLSSTASALGKLQDVVNQNAQALNTLVKQLSSNFGAISSVLNDILSRLDKVEAEVQIDRLITGRLQSLQTYVTQQLIRAAEIRASANLAATKMSECVLGQSKRVDFCGKGYHLMSFPQSAPHGVVFLHVTYVPAQEKNFTTAPAICHDGKAHFPREGVFVSNGTHWFVTQRNFYEPQIITTDNTFVSGNCDVVIGIVNNTVYDPLQPELDSFKEELDKYFKNHTSPDVDLGDISGINASVVNIQKEIDRLNEVAKNLNESLIDLQELGKYEQYIK

SEQ ID NO: 1675 - protein, 1211 aa, Artificial Sequence
  SARS-CoV-2/USA/WI-13/2020__EPI_ISL_417516 spike protein (1-1211)
MFVFLVLLPLVSSQCVNLTTRTQLPPAYTNSFTRGVYYPDKVFRSSVLHSTQDLFLPFFSNVTWFHAIHVSGTNGTKRFDNPVLPFNDGVYFASTEKSNIIRGWIFGTTLDSKTQSLLIVNNATNVVIKVCEFQFCNDPFLGVYYHKNNKSWMESEFRVYSSANNCTFEYVSQPFLMDLEGKQGNFKNLREFVFKNIDGYFKIYSKHTPINLVRDLPQGFSALEPLVDLPIGINITRFQTLLALHRSYLTPGDSSSGWTAGAAAYYVGYLQPRTFLLKYNENGTITDAVDCALDPLSETKCTLKSFTVEKGIYQTSNFRVLPTESIVRFPNITNLCPFGEVFNATRFASVYAWNRKRISNCVADYSVLYNSASFSTFKCYGVSPTKLNDLCFTNVYADSFVIRGDEVRQIAPGQTGKIADYNYKLPDDFTGCVIAWNSNNLDSKVGGNYNYLYRLFRKSNLKPFERDISTEIYQAGSTPCNGVEGFNCYFPLQSYGFQPTNGVGYQPYRVVVLSFELLHAPATVCGPKKSTNLVKNKCVNFNFNGLTGTGVLTESNKKFLPFQQFGRDIADTTDAVRDPQTLEILDITPCSFGGVSVITPGTNTSNQVAVLYQGVNCTEVPVAIHADQLTPTWRVYSTGSNVFQTRAGCLIGAEHVNNSYECDIPIGAGICASYQTQTNSPRRARSVASQSIIAYTMSLGAENSVAYSNNSIAIPTNFTISVTTEILPVSMTKTSVDCTMYICGDSTECSNLLLQYGSFCTQLNRALTGIAVEQDKNTQEVFAQVKQIYKTPPIKDFGGFNFSQILPDPSKPSKRSFIEDLLFNKVTLADAGFIKQYGDCLGDIAARDLICAQKFNGLTVLPPLLTDEMIAQYTSALLAGTITSGWTFGAGAALQIPFAMQMAYRFNGIGVTQNVLYENQKLIANQFNSAIGKIQDSLSSTASALGKLQDVVNQNAQALNTLVKQLSSNFGAISSVLNDILSRLDKVEAEVQIDRLITGRLQSLQTYVTQQLIRAAEIRASANLAATKMSECVLGQSKRVDFCGKGYHLMSFPQSAPHGVVFLHVTYVPAQEKNFTTAPAICHDGKAHFPREGVFVSNGTHWFVTQRNFYEPQIITTDNTFVSGNCDVVIGIVNNTVYDPLQPELDSFKEELDKYFKNHTSPDVDLGDISGINASVVNIQKEIDRLNEVAKNLNESLIDLQELGKYEQYIK

SEQ ID NO: 1676 - protein, 1210 aa, Artificial Sequence
  SARS-CoV-2/India/1-27/2020__EPI_ISL_413522 spike protein (1-1210)
MFVFLVLLPLVSSQCVNLTTRTQLPPAYTNSFTRGVYYPDKVFRSSVLHSTQDLFLPFFSNVTWFHAIHVSGTNGTKRFDNPVLPFNDGVYFASTEKSNIIRGWIFGTTLDSKTQSLLIVNNATNVVIKVCEFQFCNDPFLGVYHKNNKSWMESEFRVYSSANNCTFEYVSQPFLMDLEGKQGNFKNLREFVFKNIDGYFKIYSKHTPINLVRDLPQGFSALEPLVDLPIGINITRFQTLLALHRSYLTPGDSSSGWTAGAAAYYVGYLQPRTFLLKYNENGTITDAVDCALDPLSETKCTLKSFTVEKGIYQTSNFRVQPTESIVRFPNITNLCPFGEVFNATRFASVYAWNRKRISNCVADYSVLYNSASFSTFKCYGVSPTKLNDLCFTNVYADSFVIRGDEVIQIAPGQTGKIADYNYKLPDDFTGCVIAWNSNNLDSKVGGNYNYLYRLFRKSNLKPFERDISTEIYQAGSTPCNGVEGFNCYFPLQSYGFQPTNGVGYQPYRVVVLSFELLHAPATVCGPKKSTNLVKNKCVNFNFNGLTGTGVLTESNKKFLPFQQFGRDIADTTDAVRDPQTLEILDITPCSFGGVSVITPGTNTSNQVAVLYQDVNCTEVPVAIHADQLTPTWRVYSTGSNVFQTRAGCLIGAEHVNNSYECDIPIGAGICASYQTQTNSPRRARSVASQSIIAYTMSLGAENSVAYSNNSIAIPTNFTISVTTEILPVSMTKTSVDCTMYICGDSTECSNLLLQYGSFCTQLNRALTGIAVEQDKNTQEVFAQVKQIYKTPPIKDFGGFNFSQILPDPSKPSKRSFIEDLLFNKVTLADAGFIKQYGDCLGDIAARDLICAQKFNGLTVLPPLLTDEMIAQYTSALLAGTITSGWTFGAGAALQIPFAMQMAYRFNGIGVTQNVLYENQKLIANQFNSAIGKIQDSLSSTASALGKLQDVVNQNAQALNTLVKQLSSNFGAISSVLNDILSRLDKVEAEVQIDRLITGRLQSLQTYVTQQLIRAAEIRASANLAATKMSECVLGQSKRVDFCGKGYHLMSFPQSAPHGVVFLHVTYVPAQEKNFTTAPAICHDGKAHFPREGVFVSNGTHWFVTQRNFYEPQIITTDNTFVSGNCDVVIGIVNNTVYDPLQPELDSFKEELDKYFKNHTSPDVDLGDISGINASVVNIQKEIDRLNEVAKNLNESLIDLQELGKYEQYIK

SEQ ID NO: 1677 - protein, 1205 aa, Artificial Sequence
  SARS-CoV-2/pangolin/Guangxi/P4L/2017__EPI_ISL_410538 spike protein (1-1205)
MFVFLFVLPLVSSQCVNLTTRTGIPPGYTNSSTRGVYYPDKVFRSSILHLTQDLFLPFFSNVTWFNTINYQGGFKKFDNPVLPFNDGVYFASTEKSNIIRGWIFGTTLDARTQSLLIVNNATNVVIKVCEFQFCTDPFLGVYYHNNNKTWVENEFRVYSSANNCTFEYISQPFLMDLEGKQGNFKNLREFVFKNVDGYFKIYSKHTPIDLVRDLPRGFAALEPLVDLPIGINITRFQTLLALHRSYLTPGNLESGWTTGAAAYYVGYLQQRTFLLSYNQNGTITDAVDCSLDPLSETKCTLKSLTVEKGIYQTSNFRVQPTISIVRFPNITNLCPFGEVFNASKFASVYAWNRKRISNCVADYSVLYNSTSFSTFKCYGVSPTKLNDLCFTNVYADSFVVKGDEVRQIAPGQTGVIADYNYKLPDDFTGCVIAWNSVKQDALTGGNYGYLYRLFRKSKLKPFERDISTEIYQAGSTPCNGQVGLNCYYPLERYGFHPTTGVNYQPFRVVVLSFELLNGPATVCGPKLSTTLVKDKCVNFNFNGLTGTGVLTTSKKQFLPFQQFGRDISDTTDAVRDPQTLEILDITPCSFGGVSVITPGTNTSNQVAVLYQDVNCTEVPMAIHAEQLTPAWRVYSAGANVFQTRAGCLVGAEHVNNSYECDIPVGAGICASYHSMSSLRSVNQRSIIAYTMSLGAENSVAYSNNSIAIPTNFTISVTTEILPVSMTKTSVDCTMYICGDSIECSNLLLQYGSFCTQLNRALTGIAVEQDKNTQEVFAQVKQIYKTPPIKDFGGFNFSQILPDPSKPSKRSFIEDLLFNKVTLADAGFIKQYGDCLGDIAARDLICAQKFNGLTVLPPLLTDEMIAQYTSALLAGTITSGWTFGAGAALQIPFAMQMAYRFNGIGVTQNVLYENQKLIANQFNSAIGKIQDSLSSTASALGKLQDVVNQNAQALNTLVKQLSSNFGAISSVLNDILSRLDKVEAEVQIDRLITGRLQSLQTYVTQQLIRAAEIRASANLAATKMSECVLGQSKRVDFCGKGYHLMSFPQSAPHGVVFLHVTYVPAQEKNFTTAPAICHEGKAHFPREGVFVSNGTHWFITQRNFYEPQIITTDNTFVSGSCDVVIGIVNNTVYDPLQPELDSFKEELDKYFKNHTSPDVDLGDISGINASVVNIQKEIDRLNEVAKNLNESPIDLQELGKYEQYIK

SEQ ID NO: 1678 - protein, 1205 aa, Artificial Sequence
  SARS-CoV-2/pangolin/Guangxi/P5L/2017__EPI_ISL_410540 spike protein (1-1205)
MFVFLFVLPLVSSQCVNLTTRTGIPPGYTNSSTRGVYYPDKVFRSSILHLTQDLFLPFFSNVTWFNTINYQGGFKKFDNPVLPFNDGVYFASTEKSNIIRGWIFGTTLDARTQSLLIVNNATNVVIKVCEFQFCTDPFLGVYYHNNNKTWVENEFRVYSSANNCTFEYISQPFLMDLEGKQGNFKNLREFVFKNVDGYFKIYSKHTPIDLVRDLPRGFAALEPLVDLPIGINITRFQTLLALHRSYLTPGKLESGWTTGAAAYYVGYLQQRTFLLSYNQNGTITDAVDCSLDPLSETKCTLKSLTVEKGIYQTSNFRVQPTISIVRFPNITNLCPFGEVFNASKFASVYAWNRKRISNCVADYSVLYNSTSFSTFKCYGVSPTKLNDLCFTNVYADSFVVKGDEVRQIAPGQTGVIADYNYKLPDDFTGCVIAWNSVKQDALTGGNYGYLYRLFRKSKLKPFERDISTEIYQAGSTPCNGQVGLNCYYPLERYGFHPTTGVNYQPFRVVVLSFELLNGPATVCGPKLSTTLVKDKCVNFNFNGLTGTGVLTTSKKQFLPFQQFGRDISDTTDAVRDPQTLEILDITPCSFGGVSVITPGTNTSNQVAVLYQDVNCTEVPMAIHAEQLTPAWRVYSAGANVFQTRAGCLVGAEHVNNSYECDIPVGAGICASYHSMSSFRSVNQRSIIAYTMSLGAENSVAYSNNSIAIPTNFTISVTTEILPVSMTKTSVDCTMYICGDSIECSNLLLQYGSFCTQLNRALTGIAVEQDKNTQEVFAQVKQIYKTPPIKDFGGFNFSQILPDPSKPSKRSFIEDLLFNKVTLADAGFIKQYGDCLGDIAARDLICAQKFNGLTVLPPLLTDEMIAQYTSALLAGTITSGWTFGAGAALQIPFAMQMAYRFNGIGVTQNVLYENQKLIANQFNSAIGKIQDSLSSTASALGKLQDVVNQNAQALNTLVKQLSSNFGAISSVLNDILSRLDKVEAEVQIDRLITGRLQSLQTYVTQQLIRAAEIRASANLAATKMSECVLGQSKRVDFCGKGYHLMSFPQSAPHGVVFLHVTYVPAQEKNFTTAPAICHEGKAHFPREGVFVSNGTHWFITQRNFYEPQIITTDNTFVSGSCDVVIGIVNNTVYDPLQPELDSFKEELDKYFKNHTSPDVDLGDISGINASVVNIQKEIDRLNEVAKNLNESLIDLQELGKYEQYIK

SEQ ID NO: 1679 - protein, 1205 aa, Artificial Sequence
  SARS-CoV-2/pangolin/Guangxi/P5E/2017__EPI_ISL_410541 spike protein (1-1205)
MFVFLFVLPLVSSQCVNLTTRTGIPPGYTNSSTRGVYYPDKVFRSSILHLTQDLFLPFFSNVTWFNTITYQGGSKKFDNPVLPFNDGVYFASTEKSNIIRGWIFGTTLDARTQSLLIVNNATNVVIKVCEFQFCTDPFLGVYYHNNNKTWVENEFRVYSSANNCTFEYISQPFLMDLEGKQGNFKNLREFVFKNVDGYFKIYSKHTPIDLVRDLPRGFAALEPLVDLPIGINITRFQTLLALHRSYLTPGKLESGWTTGAAAYYVGYLQQRTFLLSYNQNGTITDAVDCSLDPLSETKCTLKSLTVEKGIYQTSNFRVQPTISIVRFPNITNLCPFGEVFNASKFASVYAWNRKRISNCVADYSVLYNSTSFSTFKCYGVSPTKLNDLCFTNVYADSFVVKGDEVRQIAPGQTGVIADYNYKLPDDFTGCVIAWNSVKQDALTGDNYGYLYRLFRKSKLKPFERDISTEIYQAGSTPCNGQVGLNCYYPLERYGFHPTTGVNYQPFRVVVLSFELLNGPATVCGPKLSTTLVKDKCVNFNFNGLTGTGVLTTSKKQFLPFQQFGRDISDTTDAVRDPQTLEILDITPCSFGGVSVITPGTNTSNQVAVLYQDVNCTEVPMAIHAEQLTPAWRVYSAGANVFQTRAGCLVGAEHVNNSYECDIPVGAGICASYHSMSSFRSVNQRSIIAYTMSLGAENSVAYSNNSIAIPTNFTISVTTEILPVSMTKTSVDCTMYICGDSIECSNLLLQYGSFCTQLNRALTGIAVEQDKNTQEVFAQVKQIYKTPPIKDFGGFNFSQILPDPSKPSKRSFIEDLLFNKVTLADAGFIKQYGDCLGDIAARDLICAQKFNGLTVLPPLLTDEMIAQYTSALLAGTITSGWTFGAGAALQIPFAMQMAYRFNGIGVTQNVLYENQKLIANQFNSAIGKIQDSLSSTASALGKLQDVVNQNAQALNTLVKQLSSNFGAISSVLNDILSRLDKVEAEVQIDRLITGRLQSLQTYVTQQLIRAAEIRASANLAATKMSECVLGQSKRVDFCGKGYHLMSFPQSAPHGVVFLHVTYVPAQEKNFTTAPAICHEGKAHFPREGVFVSNGTHWFITQRNFYEPQIITTDNTFVSGSCDVVIGIVNNTVYDPLQPELDSFKEELDKYFKNHTSPDVDLGDISGINASVVNIQKEIDRLNEVAKNLNESLIDLQELGKYEQYIK

SEQ ID NO: 1680 - protein, 1203 aa, Artificial Sequence
  SARS-CoV-2/pangolin/Guangxi/P1E/2017__EPI_ISL_410539 spike protein (1-1203)
MFVFLFVLPLVSSQCVNLTTRTGIQPGYTNSSTRGVYYPDKVFRSSILHLTQDLFLPFFSNVTWFNTINYQGGFKKFDNPVLPFNDGVYFASTEKSNIIRGWIFGTTLDARTQSLLIVNNATNVVIKVCEFQFCTDPFLGVYYHNNNKTWVENEFRVYSSANNCTFEYISQPFLMDLEGKQGNFKNLREFVFKNVDGYFKIYSKHTPIDLVRDLPRGFAALEPLVDLPIGINITRFQTLLALHRSYLTPGKLESGWTTGAAAYYVGYLQQRTFLLSYNQNGTITDAVDCSLDPLSETKCTLKSLTVEKGIYQTSNFRVQPTISIVRFPNITNLCPFGEVFNASKFASVYAWNRKRISNCVADYSVLYNSTSFSTFKCYGVSPTKLNDLCFTNVYADSFVVKGDEVRQIAPGQTGVIADYNYKLPDDFTGCVIAWNSVKQDALTGGNYLYRLFRKSKLKPFERDISTEIYQAGSTPCNGQVGLNCYYPLERYGFHPTTGVNYQPFRVVVLSFELLNGPATVCGPKLSTTLVKDKCVNFNFNGLTGTGVLTTSKKQFLPFQQFGRDISDTTDAVRDPQTLEILDITPCSFGGVSVITPGTNTSNQVAVLYQDVNCTEVPMAIHAEQLTPAWRVYSAGANVFQTRAGCLVGAEHVNNSYECDIPVGAGICASYHSMSSLRSVNQRSIIAYTMSLGAENSVAYSNNSIAIPTNFTISVTTEILPVSMTKTSVDCTMYICGDSIECSNLLLQYGSFCTQLNRALTGIAVEQDKNTQEVFAQVKQIYKTPPIKDFGGFNFSQILPDPSKPSKRSFIEDLLFNKVTLADAGFIKQYGDCLGDIAARDLICAQKFNGLTVLPPLLTDEMIAQYTSALLAGTITSGWTFGAGAALQIPFAMQMAYRFNGIGVTQNVLYENQKLIANQFNSAIGKIQDSLSSTASALGKLQDVVNQNAQALNTLVKQLSSNFGAISSVLNDILSRLDKVEAEVQIDRLITGRLQSLQTYVTQQLIRAAEIRASANLAATKMSECVLGQSKRVDFCGKGYHLMSFPQSAPHGVVFLHVTYVPAQEKNFTTAPAICHEGKAHFPREGVFVSNGTHWFITQRNFYEPQIITTDNTFVSGSCDVVIGIVNNTVYDPLQPELDSFKEELDKYFKNHTSPDVDLGDISGINASVVNIQKEIDRLNEVAKNLNESLIDLQELGKYEQYIK

SEQ ID NO: 1681 - protein, 1211 aa, Artificial Sequence; identical to SEQ ID NO: 40
  SARS-CoV-2/Wuhan/WIV05/2019__EPI_ISL_402128 spike protein (1-1211)(K986P_V987P)

SEQ ID NO: 1682 - protein, 1207 aa, Artificial Sequence; identical to SEQ ID NO: 41
  SARS-CoV-2/bat/Yunnan/RaTG13/2013__EPI_ISL_402131 spike protein (1-1207)(K982P_V983P)

SEQ ID NO: 1683 - protein, 1211 aa, Artificial Sequence; identical to SEQ ID NO: 42
  SARS-CoV-2/Wuhan/HBCDC-HB-01/2019__EPI_ISL_402132 spike protein (1-1211)(K986P_V987P)

SEQ ID NO: 1684 - protein, 1211 aa, Artificial Sequence; identical to SEQ ID NO: 43
  SARS-CoV-2/Guangdong/20SF028/2020__EPI_ISL_403936 spike protein (1-1211)(K986P_V987P)

SEQ ID NO: 1685 - protein, 1211 aa, Artificial Sequence; identical to SEQ ID NO: 44
  SARS-CoV-2/Shenzhen/SZTH-001/2020__EPI_ISL_406592 spike protein (1-1211)(K986P_V987P)

SEQ ID NO: 1686 - protein, 1211 aa, Artificial Sequence; identical to SEQ ID NO: 45
  SARS-CoV-2/Shenzhen/SZTH-004/2020__EPI_ISL_406595 spike protein (1-1211)(K986P_V987P)

SEQ ID NO: 1687 - protein, 1211 aa, Artificial Sequence; identical to SEQ ID NO: 46
  SARS-CoV-2/France/IDF0372/2020__EPI_ISL_406596 spike protein (1-1211)(K986P_V987P)

SEQ ID NO: 1688 - protein, 1211 aa, Artificial Sequence; identical to SEQ ID NO: 47
  SARS-CoV-2/Australia/VIC01/2020__EPI_ISL_406844 spike protein (1-1211)(K986P_V987P)

SEQ ID NO: 1689 - protein, 1211 aa, Artificial Sequence; identical to SEQ ID NO: 48
  SARS-CoV-2/Germany/BavPat1/2020__EPI_ISL_406862 spike protein (1-1211)(K986P_V987P)

SEQ ID NO: 1690 - protein, 1211 aa, Artificial Sequence
  SARS-CoV-2/Wuhan/HBCDC-HB-02/2020__EPI_ISL_412978 spike protein (1-1211)(K986P_V987P)
MFVFLVLLPLVSSQCVNLTTRTQLPPAYTNSFTRGVYYPDKVFRSSVLHSTQDLFLPFFSNVTWFHAIHVSGTNGTKRFDNPVLPFNDGVYFASTEKSNIIRGWIFGTTLDSKTQSLLIVNNATNVVIKVCEFQFCNDPFLGVYYHKNNKSWMESEFRVYSSANNCTFEYVSQPFLMDLEGKQGNFKNLREFVFKNIDGYFKIYSKHTPINLVRDLPQGFSALEPLVDLPIGINITRFQTLLALHRSYLTPGDSSSGWTAGAAAYYVGYLQPRTFLLKYNENGTITDAVDCALDPLSETKCTLKSFTVEKGIYQTSNFRVQPTESIVRFPNITNLCPFGEVFNATRFASVYAWNRKRISNCVADYSVLYNSASFSTFKCYGVSPTKLNDLCFTNVYADSFVIRGDEVRQIAPGQTGKIADYNYKLPDDFTGCVIAWNSNNLDSKVGGNYNYLYRLFRKSNLKPFERDISTEIYQAGSTPCNGVEGFNCYFPLQSYGFQPTNGVGYQPYRVVVLSFELLHAPATVCGPKKSTNLVKNKCVNFNFNGLTGTGVLTESNKKFLPFQQFGRDIADTTDAVRDPQTLEILDITPCSFGGVSVITPGTNTSNQVAVLYQDVNCTEVPVAIHADQLTPTWRVYSTGSNVFQTRAGCLIGAEHVNNSYECDIPIGAGICASYQTQTNSPRRARSVASQSIIAYTMSLGAENSVAYSNNSIAIPTNFTISVTTEILPVSMTKTSVDCTMYICGDSTECSNFLLQYGSFCTQLNRALTGIAVEQDKNTQEVFAQVKQIYKTPPIKDFGGFNFSQILPDPSKPSKRSFIEDLLFNKVTLADAGFIKQYGDCLGDIAARDLICAQKFNGLTVLPPLLTDEMIAQYTSALLAGTITSGWTFGAGAALQIPFAMQMAYRFNGIGVTQNVLYENQKLIANQFNSAIGKIQDSLSSTASALGKLQDVVNQNAQALNTLVKQLSSNFGAISSVLNDILSRLDPPEAEVQIDRLITGRLQSLQTYVTQQLIRAAEIRASANLAATKMSECVLGQSKRVDFCGKGYHLMSFPQSAPHGVVFLHVTYVPAQEKNFTTAPAICHDGKAHFPREGVFVSNGTHWFVTQRNFYEPQIITTDNTFVSGNCDVVIGIVNNTVYDPLQPELDSFKEELDKYFKNHTSPDVDLGDISGINASVVNIQKEIDRLNEVAKNLNESLIDLQELGKYEQYIK

SEQ ID NO: 1691 - protein, 1211 aa, Artificial Sequence
  SARS-CoV-2/Australia/QLD02/2020__EPI_ISL_407896 spike protein (1-1211)(K986P_V987P)
MFVFLVLLPLVSSQCVNLTTRTQLPPAYTNSFTRGVYYPDKVFRSSVLHSTQDLFLPFFSNVTWFHAIHVSGTNGTKRFDNPVLPFNDGVYFASTEKSNIIRGWIFGTTLDSKTQSLLIVNNATNVVIKVCEFQFCNDPFLGVYYHKNNKSWMESEFRVYSSANNCTFEYVSQPFLMDLEGKQGNFKNLREFVFKNIDGYFKIYSKHTPINLVRDLPQGFSALEPLVDLPIGINITRFQTLLALHRSYLTPGDSSSGWTAGAAAYYVGYLQPRTFLLKYNENGTITDAVDCALDPLSETKCTLKSFTVEKGIYQTSNFRVQPTESIVRFPNITNLCPFGEVFNATRFASVYAWNRKRISNCVADYSVLYNSASFSTFKCYGVSPTKLNDLCFTNVYADSFVIRGDEVRQIAPGQTGKIADYNYKLPDDFTGCVIAWNSNNLDSKVGGNYNYLYRLFRKSNLKPFERDISTEIYQAGSTPCNGVEGFNCYFPLQSYGFQPTNGVGYQPYRVVVLSFELLHAPATVCGPKKSTNLVKNKCVNFNFNGLTGTGVLTESNKKFLPFQQFGRDIADTTDAVRDPQTLEILDITPCSFGGVSVITPGTNTSNQVAVLYQDVNCTEVPVAIHADQLTPTWRVYSTGSNVFQTRAGCLIGAEHVNNSYECDIPIGAGICASYQTQTNSPRRARSVASQSIIAYTMSLGAENSVAYSNNSIAIPTNFTISVTTEILPVSMTKTSVDCTMYICGDSTECSNLLLQYGSFCTQLNRALTGIAVEQDKNTQEVFAQVKQIYKTPPIKDFGGFNFSQILPDPSKPSKRSFIEDLLFNKVTLADAGFIKQYGDCLGDIAARDLICAQKFNGLTVLPPLLTDEMIAQYTSALLAGTITSGWTFGAGAALQIPFAMQMAYRFNGIGVTQNVLYENQKLIANQFNSAIGKIQDSLSSTASALGKLQDVVNQNAQALNTLVKQLSSNFGAISSVLNDILSRLDPPEAEVQIDRLITGRLQSLQTYVTQQLIRAAEIRASANLAATKMSECVLGQSKRVDFCGKGYHLMSFPQSAPHGVVFLHVTYVPAQEKNFTTAPAICHDGKAHFPREGVFVSNGTHWFVTQRNFYEPQIITTDNTFVSGNCDVVIGIVNNTVYDPLQLELDSFKEELDKYFKNHTSPDVDLGDISGINASVVNIQKEIDRLNEVAKNLNESLIDLQELGKYEQYIK

SEQ ID NO: 1692 - protein, 1211 aa, Artificial Sequence
  SARS-CoV-2/India/1-31/2020__EPI_ISL_413523 spike protein (1-1211)(K986P_V987P)
MFVFLVLLPLVSSQCVNLTTRTQLPPAYTNSFTRGVYYPDKVFRSSVLHSTQDLFLPFFSNVTWFHAIHVSGTNGTKRFDNPVLPFNDGVYFASTEKSNIIRGWIFGTTLDSKTQSLLIVNNATNVVIKVCEFQFCNDPFLGVYYHKNNKSWMESEFRVYSSANNCTFEYVSQPFLMDLEGKQGNFKNLREFVFKNIDGYFKIYSKHTPINLVRDLPQGFSALEPLVDLPIGINITRFQTLLALHRSYLTPGDSSSGWTAGAAAYYVGYLQPRTFLLKYNENGTITDAVDCALDPLSETKCTLKSFTVEKGIYQTSNFRVQPTESIVRFPNITNLCPFGEVFNATRFASVYAWNRKRISNCVADYSVLYNSASFSTFKCYGVSPTKLNDLCFTNVYADSFVIRGDEVRQIAPGQTGKIADYNYKLPDDFTGCVIAWNSNNLDSKVGGNYNYLYRLFRKSNLKPFERDISTEIYQAGSTPCNGVEGFNCYFPLQSYGFQPTNGVGYQPYRVVVLSFELLHAPATVCGPKKSTNLVKNKCVNFNFNGLTGTGVLTESNKKFLPFQQFGRDIADTTDAVRDPQTLEILDITPCSFGGVSVITPGTNTSNQVAVLYQDVNCTEVPVAIHADQLTPTWRVYSTGSNVFQTRAGCLIGAEHVNNSYECDIPIGAGICASYQTQTNSPRRARSVASQSIIAYTMSLGAENSVAYSNNSIAIPTNFTISVTTEILPVSMTKTSVDCTMYICGDSTECSNLLLQYGSFCTQLNRALTGIAVEQDKNTQEVFAQVKQIYKTPPIKDFGGFNFSQILPDPSKPSKRSFIEDLLFNKVTLADAGFIKQYGDCLGDIAARDLICAQKFNGLTVLPPLLTDEMIAQYTSALLAGTITSGWTFGAGAALQIPFAMQMAYRFNGIGVTQNVLYENQKLIANQFNSVIGKIQDSLSSTASALGKLQDVVNQNAQALNTLVKQLSSNFGAISSVLNDILSRLDPPEAEVQIDRLITGRLQSLQTYVTQQLIRAAEIRASANLAATKMSECVLGQSKRVDFCGKGYHLMSFPQSAPHGVVFLHVTYVPAQEKNFTTAPAICHDGKAHFPREGVFVSNGTHWFVTQRNFYEPQIITTDNTFVSGNCDVVIGIVNNTVYDPLQPELDSFKEELDKYFKNHTSPDVDLGDISGINASVVNIQKEIDRLNEVAKNLNESLIDLQELGKYEQYIK

SEQ ID NO: 1693 - protein, 1211 aa, Artificial Sequence
  SARS-CoV-2/Guangdong/GD2020087-P0008/2020__EPI_ISL_413863 spike protein (1-1211)(K986P_V987P)
MFVFLVLLPLVSSQCVNLTTRTQLPPAYTNSFTRGVYYPDKVFRSSVLHSTQDLFLPFFSNVTWFHAIHVSGTNGTKRFDNPVLPFNDGVYFASTEKSNIIRGWIFGTTLDSKTQSLLIVNNATNVVIKVCEFQFCNDPFLGVYYHKNNKSWMESEFRVYSSANNCTFEYVSQPFLMDLEGKQGNFKNLREFVFKNIDGYFKIYSKHTPINLVRDLPQGFSALEPLVDLPIGINITRFQTLLALHRSYLTPGDSSSGWTAGAAAYYVGYLQPRTFLLKYNENGTITDAVDCALDPLSETKCTLKSFTVEKGIYQTSNFRVQPTESIVRFPNITNLCPFGEVFNATRFASVYAWNRKRISNCVADYSVLYNSASFSTFKCYGVSPTKLNDLCFTNVYADSFVIRGDEVREIAPGQTGKIADYNYKLPDDFTGCVIAWNSNNLDSKVGGNYNYLYRLFRKSNLKPFERDISTEIYQAGSTPCNGVEGFNCYFPLQSYGFQPTNGVGYQPYRVVVLSFELLHAPATVCGPKKSTNLVKNKCVNFNFNGLTGTGVLTESNKKFLPFQQFGRDIADTTDAVRDPQTLEILDITPCSFGGVSVITPGTNTSNQVAVLYQDVNCTEVPVAIHADQLTPTWRVYSTGSNVFQTRAGCLIGAEHVNNSYECDIPIGAGICASYQTQTNSPRRARSVASQSIIAYTMSLGAENSVAYSNNSIAIPTNFTISVTTEILPVSMTKTSVDCTMYICGDSTECSNLLLQYGSFCTQLNRALTGIAVEQDKNTQEVFAQVKQIYKTPPIKDFGGFNFSQILPDPSKPSKRSFIEDLLFNKVTLADAGFIKQYGDCLGDIAARDLICAQKFNGLTVLPPLLTDEMIAQYTSALLAGTITSGWTFGAGAALQIPFAMQMAYRFNGIGVTQNVLYENQKLIANQFNSAIGKIQDSLSSTASALGKLQDVVNQNAQALNTLVKQLSSNFGAISSVLNDILSRLDPPEAEVQIDRLITGRLQSLQTYVTQQLIRAAEIRASANLAATKMSECVLGQSKRVDFCGKGYHLMSFPQSAPHGVVFLHVTYVPAQEKNFTTAPAICHDGKAHFPREGVFVSNGTHWFVTQRNFYEPQIITTDNTFVSGNCDVVIGIVNNTVYDPLQPELDSFKEELDKYFKNHTSPDVDLGDISGINASVVNIQKEIDRLNEVAKNLNESLIDLQELGKYEQYIK

SEQ ID NO: 1694 - protein, 1211 aa, Artificial Sequence
  SARS-CoV-2/Sweden/01/2020__EPI_ISL_411951 spike protein (1-1211)(K986P_V987P)
MFVFLVLLPLVSSQCVNLTTRTQLPPAYTNSFTRGVYYPDKVFRSSVLHSTQDLFLPFFSNVTWFHAIHVSGTNGTKRFDNPVLPFNDGVYFASTEKSNIIRGWIFGTTLDSKTQSLLIVNNATNVVIKVCEFQFCNDPFLGVYYHKNNKSWMESEFRVYSSANNCTFEYVSQPFLMDLEGKQGNFKNLREFVFKNIDGYFKIYSKHTPINLVRDLPQGFSALEPLVDLPIGINITRFQTLLALHRSYLTPGDSSSGWTAGAAAYYVGYLQPRTFLLKYNENGTITDAVDCALDPLSETKCTLKSFTVEKGIYQTSNFRVQPTESIVRFPNITNLCPFGEVFNATRFASVYAWNRKRISNCVADYSVLYNSASFSTFKCYGVSPTKLNDLCFTNVYADSFVIRGDEVRQIAPGQTGKIADYNYKLPDDFTGCVIAWNSNNLDSKVGGNYNYLYRLFRKSNLKPFERDISTEIYQAGSTPCNGVEGFNCYFPLQSYGFQPTNGVGYQPYRVVVLSFELLHAPATVCGPKKSTNLVKNKCVNFNFNGLTGTGVLTESNKKFLPFQQFGRDIADTTDAVRDPQTLEILDITPCSFGGVSVITPGTNTSNQVAVLYQDVNCTEVPVAIHADQLTPTWRVYSTGSNVFQTRAGCLIGAEHVNNSYECDIPIGAGICASYQTQTNSPRRARSVASQSIIAYTMSLGAENSVAYSNNSIAIPTNFTISVTTEILPVSMTKTSVDCTMYICGDSTECSNLLLQYGSFCTQLNRALTGIAVEQDKNTQEVFAQVKQIYKTPPIKDCGGFNFSQILPDPSKPSKRSFIEDLLFNKVTLADAGFIKQYGDCLGDIAARDLICAQKFNGLTVLPPLLTDEMIAQYTSALLAGTITSGWTFGAGAALQIPFAMQMAYRFNGIGVTQNVLYENQKLIANQFNSAIGKIQDSLSSTASALGKLQDVVNQNAQALNTLVKQLSSNFGAISSVLNDILSRLDPPEAEVQIDRLITGRLQSLQTYVTQQLIRAAEIRASANLAATKMSECVLGQSKRVDFCGKGYHLMSFPQSAPHGVVFLHVTYVPAQEKNFTTAPAICHDGKAHFPREGVFVSNGTHWFVTQRNFYEPQIITTDNTFVSGNCDVVIGIVNNTVYDPLQPELDSFKEELDKYFKNHTSPDVDLGDISGINASVVNIQKEIDRLNEVAKNLNESLIDLQELGKYEQYIK

SEQ ID NO: 1695 - protein, 1211 aa, Artificial Sequence
  SARS-CoV-2/Tianmen/HBCDC-HB-07/2020__EPI_ISL_412983 spike protein (1-1211)(K986P_V987P)
MFVFLVLLPLVSSQCVNLTTRTQLPPAYTNSFTRGVYYPDKVFRSSVLHSTQDLFLPFFSNVTWFHAIHVSGTNGTKRFDNPVLPFNDGVYFASTEKSNIIRGWIFGTTLDSKTQSLLIVNNATNVVIKVCEFQFCNDPFLGVYYHKNNKSWMESEFRVYSSANNCTFEYVSQPFLMDLEGKQGNFKNLREFVFKNIDGYFKIYSKHTPINLVRDLPQGFSALEPLVDLPIGINITRFQTLLALHRSYLTPGDSSSGWTAGAAAYYVGYLQPRTFLLKYNENGTITDAVDCALDPLSETKCTLKSFTVEKGIYQTSNFRVQPTESIVRFPNITNLCPFGEVFNATRFASVYAWNRKRISNCVADYSVLYNSASFSTFKCYGVSPTKLNDLCFTNVYADSFVIRGDEVRQIAPGQTGKIADYNYKLPDDFTGCVIAWNSNNLDSKVGGNYNYLYRLFRKSNLKPFERDISTEIYQAGSTPCNGVEGFNCYFPLQSYGFQPTNGVGYQPYRVVVLSFELLHAPATVCGPKKSTNLVKNKCVNFNFNGLTGTGVLTESNKKFLPFQQFGRDIADTTDAVRDPQTLEILDITPCSFGGVSVITPGTNTSNQVAVLYQDLNCTEVPVAIHADQLTPTWRVYSTGSNVFQTRAGCLIGAEHVNNSYECDIPIGAGICASYQTQTNSPRRARSVASQSIIAYTMSLGAENSVAYSNNSIAIPTNFTISVTTEILPVSMTKTSVDCTMYICGDSTECSNLLLQYGSFCTQLNRALTGIAVEQDKNTQEVFAQVKQIYKTPPIKDFGGFNFSQILPDPSKPSKRSFIEDLLFNKVTLADAGFIKQYGDCLGDIAARDLICAQKFNGLTVLPPLLTDEMIAQYTSALLAGTITSGWTFGAGAALQIPFAMQMAYRFNGIGVTQNVLYENQKLIANQFNSAIGKIQDSLSSTASALGKLQDVVNQNAQALNTLVKQLSSNFGAISSVLNDILSRLDPPEAEVQIDRLITGRLQSLQTYVTQQLIRAAEIRASANLAATKMSECVLGQSKRVDFCGKGYHLMSFPQSAPHGVVFLHVTYVPAQEKNFTTAPAICHDGKAHFPREGVFVSNGTHWFVTQRNFYEPQIITTDNTFVSGNCDVVIGIVNNTVYDPLQPELDSFKEELDKYFKNHTSPDVDLGDISGINASVVNIQKEIDRLNEVAKNLNESLIDLQELGKYEQYIK

SEQ ID NO: 1696 - protein, 1211 aa, Artificial Sequence
  SARS-CoV-2/Hong Kong/case42_VM20002493/2020__EPI_ISL_414527 spike protein (1-1211)(K986P_V987P)
MFVFLVLLPLVSSQCVNLTTRTQLPPAYTNSFTRGVYYPDKVFRSSVLHSTQDLFLPFFSNVTWFHAIHVSGTNGTKRFDNPVLPFNDGVYFASTEKSNIIRGWIFGTTLDSKTQSLLIVNNATNVVIKVCEFQFCNDPFLGVYYHKNNKSWMESEFRVYSSANNCTFEYVSQPFLMDLEGKQGNFKNLREFVFKNIDGYFKIYSKHTPINLVRDLPQGFSALEPLVDLPIGINITRFQTLLALHRSYLTPGDSSSGWTAGAAAYYVGYLQPRTFLLKYNENGTITDAVDCALDPLSETKCTLKSFTVEKGIYQTSNFRVQPTESIVRFPNITNLCPFGEVFNATRFASVYAWNRKRISNCVADYSVLYNSASFSTFKCYGVSPTKLNDLCFTNVYADSFVIRGDEVRQIAPGQTGKIADYNYKLPDDFTGCVIAWNSNNLDSKVGGNYNYLYRLFRKSNLKPFERDISTEIYQAGSTPCNGVEGFNCYFPLQSYGFQPTNGVGYQPYRVVVLSFELLHAPATVCGPKKSTNLVKNKCVNFNFNGLTGTGVLTESNKKFLPFQQFGRDIADTTDAVRDPQTLEILDITPCSFGGVSVITPGTNTSNQVAVLYQDVNCTEVPVAIHADQLTPTWRVYSTGSNVFQTRAGCLIGAEHVNNSYECDIPIGAGICASYQTQTNSPRRARSVASQSIIAYTMSLGAENSVAYSNNSIAIPTNFAISVTTEILPVSMTKTSVDCTMYICGDSTECSNLLLQYGSFCTQLNRALTGIAVEQDKNTQEVFAQVKQIYKTPPIKDFGGFNFSQILPDPSKPSKRSFIEDLLFNKVTLADAGFIKQYGDCLGDIAARDLICAQKFNGLTVLPPLLTDEMIAQYTSALLAGTITSGWTFGAGAALQIPFAMQMAYRFNGIGVTQNVLYENQKLIANQFNSAIGKIQDSLSSTASALGKLQDVVNQNAQALNTLVKQLSSNFGAISSVLNDILSRLDPPEAEVQIDRLITGRLQSLQTYVTQQLIRAAEIRASANLAATKMSECVLGQSKRVDFCGKGYHLMSFPQSAPHGVVFLHVTYVPAQEKNFTTAPAICHDGKAHFPREGVFVSNGTHWFVTQRNFYEPQIITTDNTFVSGNCDVVIGIVNNTVYDPLQPELDSFKEELDKYFKNHTSPDVDLGDISGINASVVNIQKEIDRLNEVAKNLNESLIDLQELGKYEQYIK

SEQ ID NO: 1697 - protein, 1211 aa, Artificial Sequence
  SARS-CoV-2/USA/CruiseA-23/2020__EPI_ISL_414482 spike protein (1-1211)(K986P_V987P)
MFVFLVLLPLVSSQCVNLTTRTQLPPAYTNSFTRGVYYPDKVFRSSVLHSTQDLFLPFFSNVTWFHAIHVSGTNGTKRFDNPVLPFNDGVYFASTEKSNIIRGWIFGTTLDSKTQSLLIVNNATNVVIKVCEFQFCNDPFLGVYYHKNNKSWMESEFRVYSSANNCTFEYVSQPFLMDLEVKQGNFKNLREFVFKNIDGYFKIYSKHTPINLVRDLPQGFSALEPLVDLPIGINITRFQTLLALHRSYLTPGDSSSGWTAGAAAYYVGYLQPRTFLLKYNENGTITDAVDCALDPLSETKCTLKSFTVEKGIYQTSNFRVQPTESIVRFPNITNLCPFGEVFNATRFASVYAWNRKRISNCVADYSVLYNSASFSTFKCYGVSPTKLNDLCFTNVYADSFVIRGDEVRQIAPGQTGKIADYNYKLPDDFTGCVIAWNSNNLDSKVGGNYNYLYRLFRKSNLKPFERDISTEIYQAGSTPCNGVEGFNCYFPLQSYGFQPTNGVGYQPYRVVVLSFELLHAPATVCGPKKSTNLVKNKCVNFNFNGLTGTGVLTESNKKFLPFQQFGRDIADTTDAVRDPQTLEILDITPCSFGGVSVITPGTNTSNQVAVLYQDVNCTEVPVAIHADQLTPTWRVYSTGSNVFQTRAGCLIGAEHVNNSYECDIPIGAGICASYQTQTNSPRRARSVASQSIIAYTMSLGAENSVAYSNNSIAIPTNFTISVTTEILPVSMTKTSVDCTMYICGDSTECSNLLLQYGSFCTQLNRALTGIAVEQDKNTQEVFAQVKQIYKTPPIKDFGGFNFSQILPDPSKPSKRSFIEDLLFNKVTLADAGFIKQYGDCLGDIAARDLICAQKFNGLTVLPPLLTDEMIAQYTSALLAGTITSGWTFGAGAALQIPFAMQMAYRFNGIGVTQNVLYENQKLIANQFNSAIGKIQDSLSSTASALGKLQDVVNQNAQALNTLVKQLSSNFGAISSVLNDILSRLDPPEAEVQIDRLITGRLQSLQTYVTQQLIRAAEIRASANLAATKMSECVLGQSKRVDFCGKGYHLMSFPQSAPHGVVFLHVTYVPAQEKNFTTAPAICHDGKAHFPREGVFVSNGTHWFVTQRNFYEPQIITTDNTFVSGNCDVVIGIVNNTVYDPLQPELDSFKEELDKYFKNHTSPDVDLGDISGINASVVNIQKEIDRLNEVAKNLNESLIDLQELGKYEQYIK

SEQ ID NO: 1698 - protein, 1211 aa, Artificial Sequence
  SARS-CoV-2/Hong Kong/case85_VM20002868/2020__EPI_ISL_414519 spike protein (1-1211)(K986P_V987P)
MFVFLVLVPLVSSQCVNLTTRTQLPPAYTNSFTRGVYYPDKVFRSSVLHSTQDLFLPFFSNVTWFHAIHVSGTNGTKRFDNPVLPFNDGVYFASTEKSNIIRGWIFGTTLDSKTQSLLIVNNATNVVIKVCEFQFCNDPFLGVYYHKNNKSWMESEFRVYSSANNCTFEYVSQPFLMDLEGKQGNFKNLREFVFKNIDGYFKIYSKHTPINLVRDLPQGFSALEPLVDLPIGINITRFQTLLALHRSYLTPGDSSSGWTAGAAAYYVGYLQPRTFLLKYNENGTITDAVDCALDPLSETKCTLKSFTVEKGIYQTSNFRVQPTESIVRFPNITNLCPFGEVFNATRFASVYAWNRKRISNCVADYSVLYNSASFSTFKCYGVSPTKLNDLCFTNVYADSFVIRGDEVRQIAPGQTGKIADYNYKLPDDFTGCVIAWNSNNLDSKVGGNYNYLYRLFRKSNLKPFERDISTEIYQAGSTPCNGVEGFNCYFPLQSYGFQPTNGVGYQPYRVVVLSFELLHAPATVCGPKKSTNLVKNKCVNFNFNGLTGTGVLTESNKKFLPFQQFGRDIADTTDAVRDPQTLEILDITPCSFGGVSVITPGTNTSNQVAVLYQDVNCTEVPVAIHADQLTPTWRVYSTGSNVFQTRAGCLIGAEHVNNSYECDIPIGAGICASYQTQTNSPRRARSVASQSIIAYTMSLGAENSVAYSNNSIAIPTNFTISVTTEILPVSMTKTSVDCTMYICGDSTECSNLLLQYGSFCTQLNRALTGIAVEQDKNTQEVFAQVKQIYKTPPIKDFGGFNFSQILPDPSKPSKRSFIEDLLFNKVTLADAGFIKQYGDCLGDIAARDLICAQKFNGLTVLPPLLTDEMIAQYTSALLAGTITSGWTFGAGAALQIPFAMQMAYRFNGIGVTQNVLYENQKLIANQFNSAIGKIQDSLSSTASALGKLQDVVNQNAQALNTLVKQLSSNFGAISSVLNDILSRLDPPEAEVQIDRLITGRLQSLQTYVTQQLIRAAEIRASANLAATKMSECVLGQSKRVDFCGKGYHLMSFPQSAPHGVVFLHVTYVPAQEKNFTTAPAICHDGKAHFPREGVFVSNGTHWFVTQRNFYEPQIITTDNTFVSGNCDVVIGIVNNTVYDPLQPELDSFKEELDKYFKNHTSPDVDLGDISGINASVVNIQKEIDRLNEVAKNLNESLIDLQELGKYEQYIK

SEQ ID NO: 1699 - protein, 1211 aa, Artificial Sequence; identical to SEQ ID NO: 48
  SARS-CoV-2/England/200990660/2020__EPI_ISL_414523 spike protein (1-1211)(K986P_V987P)

SEQ ID NO: 1700 - protein, 1211 aa, Artificial Sequence
  SARS-CoV-2/Australia/NSW09/2020__EPI_ISL_413595 spike protein (1-1211)(K986P_V987P)
MFVFLVLLPLVSSQCVNLTTRTQLPPAYTNSFTRGVYYPDKVFRSSVLHSTQDLFLPFFSNVTWFHAIHVSGTNGTKRFDNPVLPFNDGVYFASTEKSNIIRGWIFGTTLDSKTQSLLIVNNATNVVIKVCEFQFCNDPFLGVYYHKNNKSWMESEFRVYSSANNCTFEYVSQPFLMDLEGKQGNFKNLREFVFKNIDGYFKIYSKHTPINLVRDLPQGFSALEPLVDLPIGINITRFQTLLALHRSYLTPGDSSSGWTAGAAAYYVGYLQPRTFLLKYNENGTITDAVDCALDPLSETKCTLKSFTVEKGIYQTSNFRVQPTESIVRFPNITNLCPFGEVFNATRFASVYAWNRKRISNCVADYSVLYNSASFSTFKCYGVSPTKLNDLCFTNVYADSFVIRGDEVRQIAPGQTGKIADYNYKLPDDFTGCVIAWNSNNLDSKVGGNYNYLYRLFRKSNLKPFERDISTEIYQAGSTPCNGVEGFNCYFPLQSYGFQPTNGVGYQPYRVVVLSFELLHAPATVCGPKKSTNLVKNKCVNFNFNGLTGTGVLTESNKKFLPFQQFGRDIADTTDAVRDPQTLEILDITPCSFGGVSVITPGTNTSNQVAVLYQDVNCTEVPVAIHADQLTPTWRVYSTGSNVFQTRAGCLIGAEHVNNSYECDIPIGAGICASYQTQTNSPRRARSVASQSIIAYTMSLGAENSVAYSNNSIAIPTNFTISVTTEILPVSMTKTSVDCTMYICGDSTECSNLLLQYGSFCTQLNRALTGIAVEQDKNTQEVFAQVKQIYKTPPIKDFGGFNFSQILPDPSKPSKRSFIEDLLFNKVTLADAGFIKQYGDCLGDIAARDLICAQKFNGLTVLPPLLTDEMIAQYTSALLAGTITSGWTFGAGAALQIPFAMQMAYRFNGIGVTQNVLYENQKLIANQFNSAIGKIQDSLSFTASALGKLQDVVNQNAQALNTLVKQLSSNFGAISSVLNDILSRLDPPEAEVQIDRLITGRLQSLQTYVTQQLIRAAEIRASANLAATKMSECVLGQSKRVDFCGKGYHLMSFPQSAPHGVVFLHVTYVPAQEKNFTTAPAICHDGKAHFPREGVFVSNGTHWFVTQRNFYEPQIITTDNTFVSGNCDVVIGIVNNTVYDPLQPELDSFKEELDKYFKNHTSPDVDLGDISGINASVVNIQKEIDRLNEVAKNLNESLIDLQELGKYEQYIK

SEQ ID NO: 1701 - protein, 1211 aa, Artificial Sequence; identical to SEQ ID NO: 40
  SARS-CoV-2/Australia/NSW10/2020__EPI_ISL_413596 spike protein (1-1211)(K986P_V987P)

SEQ ID NO: 1702 - protein, 1211 aa, Artificial Sequence
  SARS-CoV-2/Switzerland/1000477797/2020__EPI_ISL_413023 spike protein (1-1211)(K986P_V987P)
MFVFLVLLPLVSSQCVNLTTRTQLPPAYTNSFTRGVYYPDKVFRSSVLHSTQDLFLPFFSNVTWFHAIHVSGTNGTKRFDNPVLPFNDGVYFASTEKSNIIRGWIFGTTLDSKTQSLLIVNNATNVVIKVCEFQFCNDPFLGVYYHKNNKSWMESEFRVYSSANNCTFEYVSQPFLMDLEGKQGNFKNLREFVFKNIDGYFNIYSKHTPINLVRDLPQGFSALEPLVDLPIGINITRFQTLLALHRSYLTPGDSSSGWTAGAAAYYVGYLQPRTFLLKYNENGTITDAVDCALDPLSETKCTLKSFTVEKGIYQTSNFRVQPTESIVRFPNITNLCPFGEVFNATRFASVYAWNRKRISNCVADYSVLYNSASFSTFKCYGVSPTKLNDLCFTNVYADSFVIRGDEVRQIAPGQTGKIADYNYKLPDDFTGCVIAWNSNNLDSKVGGNYNYLYRLFRKSNLKPFERDISTEIYQAGSTPCNGVEGFNCYFPLQSYGFQPTNGVGYQPYRVVVLSFELLHAPATVCGPKKSTNLVKNKCVNFNFNGLTGTGVLTESNKKFLPFQQFGRDIADTTDAVRDPQTLEILDITPCSFGGVSVITPGTNTSNQVAVLYQGVNCTEVPVAIHADQLTPTWRVYSTGSNVFQTRAGCLIGAEHVNNSYECDIPIGAGICASYQTQTNSPRRARSVASQSIIAYTMSLGAENSVAYSNNSIAIPTNFTISVTTEILPVSMTKTSVDCTMYICGDSTECSNLLLQYGSFCTQLNRALTGIAVEQDKNTQEVFAQVKQIYKTPPIKDFGGFNFSQILPDPSKPSKRSFIEDLLFNKVTLADAGFIKQYGDCLGDIAARDLICAQKFNGLTVLPPLLTDEMIAQYTSALLAGTITSGWTFGAGAALQIPFAMQMAYRFNGIGVTQNVLYENQKLIANQFNSAIGKIQDSLSSTASALGKLQDVVNQNAQALNTLVKQLSSNFGAISSVLNDILSRLDPPEAEVQIDRLITGRLQSLQTYVTQQLIRAAEIRASANLAATKMSECVLGQSKRVDFCGKGYHLMSFPQSAPHGVVFLHVTYVPAQEKNFTTAPAICHDGKAHFPREGVFVSNGTHWFVTQRNFYEPQIITTDNTFVSGNCDVVIGIVNNTVYDPLQPELDSFKEELDKYFKNHTSPDVDLGDISGINASVVNIQKEIDRLNEVAKNLNESLIDLQELGKYEQYIK

SEQ ID NO: 1703 - protein, 1211 aa, Artificial Sequence
  SARS-CoV-2/Belgium/BA-02291/2020__EPI_ISL_415159 spike protein (1-1211)(K986P_V987P)
MFVFLVLLPLVSSQCVNLTTRTQLPPAYTNSFTRGVYYPDKVFRSSVLHSTQDLFLPFFSNVTWFHAIHVSGTNGTKRFDNPVLPFNDGVYFASTEKSNIIRGWIFGTTLDSKTQSLLIVNNATNVVIKVCEFQFCNDPFLGVYYHKNNKSWMESEFRVYSSANNCTFEYVSQPFLMDLEGKQGNFKNLREFVFKNIDGYFKIYSKHTPINLVRDLPQGFSALEPLVDLPIGINITRFQTLLALHRSYLTPGDSSSGWTAGAAAYYVGYLQPRTFLLKYNENGTITDAVDCALDPLSETKCTLKSFTVEKGIYQTSNFRVQPTESIVRFPNITNLCPFGEVFNATRFASVYAWNRKRISNCVADYSVLYNSASFSTFKCYGVSPTKLNDLCFTNVYADSFVIRGDEVRQIAPGQTGKIADYNYKLPDDFTGCVIAWNSNNLDSKVGGNYNYLYRLFRRSNLKPFERDISTEIYQAGSTPCNGVEGFNCYFPLQSYGFQPTNGVGYQPYRVVVLSFELLPAPATVCGPKKSTNLVKNKCVNFNFNGLTGTGVLTESNKKFLPFQQFGRDIADTTDAVRDPQTLEILDITPCSFGGVSVITPGTNTSNQVAVLYQGVNCTEVPVAIHADQLTPTWRVYSTGSNVFQTRAGCLIGAEHVNNSYECDIPIGAGICASYQTQTNSPRRARSVASQSIIAYTMSLGAENSVAYSNNSIAIPTNFTISVTTEILPVSMTKTSVDCTMYICGDSTECSNLLLQYGSFCTQLNRALTGIAVEQDKNTQEVFAQVKQIYKTPPIKDFGGFNFSQILPDPSKPSKRSFIEDLLFNKVTLADAGFIKQYGDCLGDIAARDLICAQKFNGLTVLPPLLTDEMIAQYTSALLAGTITSGWTFGAGAALQIPFAMQMAYRFNGIGVTQNVLYENQKLIANQFNSAIGKIQDSLSSAAPALGKLQDVVNQNAQALNTLVKQLSSNFGAISSVLNDILSRLDPPEAEVQIDRLITGRLQSLQTYVTQQLIRAAEIRASANLAATKMSECVLGQSKRVDFCGKGYHLMSFPQSAPHGVVFLHVTYVPAQEKNFTTAPAICHDGKAHFPREGVFVSNGTHWFVTQRNFYEPQIITTDNTFVSGNCDVVIGIVNNTVYDPLQPELDSFKEELDKYFKNHTSPDVDLGDISGINASVVNIQKEIDRLNEVAKNLNESLIDLQELGKYEQYIK

SEQ ID NO: 1704 - protein, 1211 aa, Artificial Sequence
  SARS-CoV-2/USA/WA8-UW5/2020__EPI_ISL_413486 spike protein (1-1211)(K986P_V987P)
MFVFLVLLPLVSSQCVNLTTRTQLPPAYTNSFTRGVYYPDKVFRSSVLHSTQDLFLPFFSNVTWFHAIHVSGTNGTKRFDNPVLPFNDGVYFASTEKSNIIRGWIFGTTLDSKTQSLLIVNNATNVVIKVCEFQFCNDPFLGVYYHKNNKSWMESEFRVYSSANNCTFEYVSQPFLMDLEGKQGNFKNLREFVFKNIDGYFKIYSKHTPINLVRDLPQGFSALEPLVDLPIGINITRFQTLLALHRSYLTPGDSSSGWTAGAAAYYVGYLQPRTFLLKYNENGTITDAVDCALDPLSETKCTLKSFTVEKGIYQTSNFRVQPTESIVRFPNITNLCPFGEVFNATRFASVYAWNRKRISNCVADYSVLYNSASFSTFKCYGVSPTKLNDLCFTNVYADSFVIRGDEVRQIAPGQTGKIADYNYKLPDDFTGCVIAWNSNNLDSKVGGNYNYLYRLFRKSNLKPFERDISTEIYQAGSTPCNGVEGFNCYFPLQSYGFQPTNGVGYQPYRVVVLSFELLHAPATVCGPKKSTNLVKNKCVNFNFNGLTGTGVLTESNKKFLPFQQFGRDIADTTDAVRDPQTLEILDITPCSFGGVSVITPGTNTSNQVAVLYQDVNCTEVPVAIHADQLTPTWRVYSTGSNVFQTRAGCLIGAEYVNNSYECDIPIGAGICASYQTQTNSPRRARSVASQSIIAYTMSLGAENSVAYSNNSIAIPTNFTISVTTEILPVSMTKTSVDCTMYICGDSTECSNLLLQYGSFCTQLNRALTGIAVEQDKNTQEVFAQVKQIYKTPPIKDFGGFNFSQILPDPSKPSKRSFIEDLLFNKVTLADAGFIKQYGDCLGDIAARDLICAQKFNGLTVLPPLLTDEMIAQYTSALLAGTITSGWTFGAGAALQIPFAMQMAYRFNGIGVTQNVLYENQKLIANQFNSAIGKIQDSLSSTASALGKLQDVVNQNAQALNTLVKQLSSNFGAISSVLNDILSRLDPPEAEVQIDRLITGRLQSLQTYVTQQLIRAAEIRASANLAATKMSECVLGQSKRVDFCGKGYHLMSFPQSAPHGVVFLHVTYVPAQEKNFTTAPAICHDGKAHFPREGVFVSNGTHWFVTQRNFYEPQIITTDNTFVSGNCDVVIGIVNNTVYDPLQPELDSFKEELDKYFKNHTSPDVDLGDISGINASVVNIQKEIDRLNEVAKNLNESLIDLQELGKYEQYIK

SEQ ID NO: 1705 - protein, 1211 aa, Artificial Sequence
  SARS-CoV-2/England/20102000506/2020__EPI_ISL_415147 spike protein (1-1211)(K986P_V987P)
MFVFLVLLPLVSSQCVNLTTRTQLPPAYTNSFTRGVYYPDKVFRSSVLHSTQDLFLPFFSNVTWFHAIHVSGTNGTKRFDNPVLPFNDGVYFASTEKSNIIRGWIFGTTLDSKTQSLLIVNNATNVVIKVCEFQFCNDPFLGVYYHKNNKSWMESEFRVYSSANNCTFEYVSQPFLMDLEGKQGNFKNLREFVFKNIDGYFKIYSKHTPINLVRDLPQGFSALEPLVDLPIGINITRFQTLLALHRSYLTPGDSSSGWTAGAAAYYVGYLQPRTFLLKYNENGTITDAVDCALDPLSETKCTLKSFTVEKGIYQTSNFRVQPTESIVRFPNITNLCPFGEVFNATRFASVYAWNRKRISNCVADYSVLYNSASFSTFKCYGVSPTKLNDLCFTNVYADSFVIRGDEVRQIAPGQTGKIADYNYKLPDDFTGCVIAWNSNNLDSKVGGNYNYLYRLFRKSNLKPFERDISTEIYQAGSTPCNGVEGFNCYFPLQSYGFQPTNGVGYQPYRVVVLSFELLHAPATVCGPKKSTNLVKNKCVNFNFNGLTGTGVLTESNKKFLPFQQFGRDIADTTDAVRDPQTLEILDITPCSFGGVSVITPGTNTSNQVAVLYQGVNCTEVPVAIHADQLTPTWRVYSTGSNVFQTRAGCLIGAEHVNNSYECDIPIGAGICASYQTQTNSPRRARSVASQSIIAYTMSLGAENSVAYSNNSIAIPTNFTISVTTEILPVSMTKTSVDCTMYICGDSTECSNLLLQYGSFCTQLNRALTGIAVEQDKNTQEVFAQVKQIYKTPPIKDFGGFNFSQILPDPSKPSKRSFIEDLLFNKVTLADAGFIKQYGYCLGDIAARDLICAQKFNGLTVLPPLLTDEMIAQYTSALLAGTITSGWTFGAGAALQIPFAMQMAYRFNGIGVTQNVLYENQKLIANQFNSAIGKIQDSLSSTASALGKLQDVVNQNAQALNTLVKQLSSNFGAISSVLNDILSRLDPPEAEVQIDRLITGRLQSLQTYVTQQLIRAAEIRASANLAATKMSECVLGQSKRVDFCGKGYHLMSFPQSAPHGVVFLHVTYVPAQEKNFTTAPAICHDGKAHFPREGVFVSNGTHWFVTQRNFYEPQIITTDNTFVSGNCDVVIGIVNNTVYDPLQPELDSFKEELDKYFKNHTSPDVDLGDISGINASVVNIQKEIDRLNEVAKNLNESLIDLQELGKYEQYIK

SEQ ID NO: 1706 - protein, 1211 aa, Artificial Sequence
  SARS-CoV-2/Belgium/VAG-03013/2020__EPI_ISL_415155 spike protein (1-1211)(K986P_V987P)
MFVFLVLLPLVSSQCVNLTTRTQLPPAYTNSFTRGVYYPDKVFRSSVLHSTQDLFLPFFSNVTWFHAIHVSGTNGTKRFDNPVLPFNDGVYFASTEKSNIIRGWIFGTTLDSKTQSLLIVNNATNVVIKVCEFQFCNDPFLGVYYHKNNKSWMESEFRVYSSANNCTFEYVSQPFLMDLEGKQGNFKNLREFVFKNIDGYFKIYSKHTPINLVRDLPQGFSALEPLVDLPIGINITRFQTLLALHRSYLTPGDSSSGWTAGAAAYYVGYLQPRTFLLKYNENGTITDAVDCALDPLSETKCTLKSFTVEKGIYQTSNFRVQPTESIVRFPNITNLCPFGEVFNATRFASVYAWNRKRISNCVADYSVLYNSASFSTFKCYGVSPTKLNDLCFTNVYADSFVIRGDEVRQIAPGQTGKIADYNYKLPDDFTGCVIAWNSNNLDSKVGGNYNYLYRLFRKSNLKPFERDISTEIYQAGSTPCNGVEGFNCYFPLQSYGFQPTNGVGYQPYRVVVLSFELLHAPATVCGPKKSTNLVKNKCVNFNFNGLTGTGVLTESNKKFLPFQQFGRDIADTTDAVRDPQTLEILDITPCSFGGVSVITPGTNTSNQVAVLYQGVNCTEVPVAIHADQLTPTWRVYSTGSNVFQTRAGCLIGAEHVNNSYECDIPIGAGICASYQTQTNSPRRARSVASQSIIAYTMSLGAENSVAYSNNSIAIPTNFTISVTTEILPVSMTKTSVDCTMYICGDSTECSNLLLQYGSFCTQLNRALTGIAVEQDKNTQEVFAQVKQIYKTPPIKDFGGFNFSQILPDPSKPSKRSFIEDLLFNKVTLADAGFIKQYGDCLGDIAARDLICAQKFNGLTVLPPLLTDEMIAQYTSALLAGTITSGWTFGAGAALQIPFAMQMAYRFNGIGVTQNVLYENQKLIANQFNSAIGKIQDSLSSTATALGKLQDVVNQNAQALNTLVKQLSSNFGAISSVLNDILSRLDPPEAEVQIDRLITGRLQSLQTYVTQQLIRAAEIRASANLAATKMSECVLGQSKRVDFCGKGYHLMSFPQSAPHGVVFLHVTYVPAQEKNFTTAPAICHDGKAHFPREGVFVSNGTHWFVTQRNFYEPQIITTDNTFVSGNCDVVIGIVNNTVYDPLQPELDSFKEELDKYFKNHTSPDVDLGDISGINASVVNIQKEIDRLNEVAKNLNESLIDLQELGKYEQYIK

SEQ ID NO: 1707 - protein, 1211 aa, Artificial Sequence
  SARS-CoV-2/Belgium/BC-03016/2020__EPI_ISL_415157 spike protein (1-1211)(K986P_V987P)
MFVFLVLLPLVSSQCVNLTTRTQLPPAYTNSFTRGVYYPDKVFRSSVLHSTQDLFLPFFSNVTWFHAIHVSGTNGTKRFDNPVLPFNDGVYFASTEKSNIIRGWIFGTTLDSKTQSLLIVNNATNVVIKVCEFQFCNDPFLGVYYHKNNKSWMESEFRVYSSANNCTFEYVSQPFLMDLEGKQGNFKNLREFVFKNIDGYFKIYSKHTPINLVRDLPQGFSALEPLVDLPIGINITRFQTLLALHRSYLTPGDSSSGWTAGAAAYYVGYLQPRTFLLKYNENGTITDAVDCALDPLSETKCTLKSFTVEKGIYQTSNFRVQPTESIVRFPNITNLCPFGEVFNATRFASVYAWNRKRISNCVADYSVLYNSASFSTFKCYGVSPTKLNDLCFTNVYADSFVIRGDEVRQIAPGQTGKIADYNYKLPDDFTGCVIAWNSNNLDSKVGGNYNYLYRLFRKSNLKPFERDISTEIYQAGSTPCNGVEGFNCYFPLQSYGFQPTNGVGYQPYRVVVLSFELLHAPATVCGPKKSTNLVKNKCVNFNFNGLTGTGVLTESNKKFLPFQQFGRDIADTTDAVRDPQTLEILDITPCSFGGVSVITPGTNTSNQVAVLYQGVNCTEVPVAIHADQLTPTWRVYSTGSNVFQTRAGCLIGAEHVNNSYECDIPIGAGICASYQTQTNSPRRARSVASQSIIAYTMSLGAENSVAYSNNSIAIPTNFTISVTTEILPVSMTKTSVDCTMYICGDSTECSNLLLQYGSFCTQLNRALTGIAVEQDKNTQEVFAQVKQIYKTPPIKDFGGFNFSQILPDPSKPSKRSFIEDLLFNKVTLADAGFIKQYGDCLGDIAARDLICAQKFNGLTVLPPLLTDEMIAQYTSALLAGTITSGWTFGAGAALQIPFAMQMAYRFNGIGVTQNVLYENQKLIANQFNSAIGKIQDSLSSTAPALGKLQDVVNQNAQALNTLVKQLSSNFGAISSVLNDILSRLDPPEAEVQIDRLITGRLQSLQTYVTQQLIRAAEIRASANLAATKMSECVLGQSKRVDFCGKGYHLMSFPQSAPHGVVFLHVTYVPAQEKNFTTAPAICHDGKAHFPREGVFVSNGTHWFVTQRNFYEPQIITTDNTFVSGNCDVVIGIVNNTVYDPLQPELDSFKEELDKYFKNHTSPDVDLGDISGINASVVNIQKEIDRLNEVAKNLNESLIDLQELGKYEQYIK

SEQ ID NO: 1708 - protein, 1211 aa, Artificial Sequence
  SARS-CoV-2/Germany/BavPat3/2020__EPI_ISL_414521 spike protein (1-1211)(K986P_V987P)
MFVFLVLLPLVSSQCVNLTTRTQLPPAYTNSFTRGVYYPDKVFRSSVLHSTQDLFLPFFSNVTWFHAIHVSGTNGTKRFDNPVLPFNDGVYFASTEKSNIIRGWIFGTTLDSKTQSLLIVNNATNVVIKVCEFQFCNDPFLGVYYHKNNKSWMESEFRVYSSANNCTFEYVSQPFLMDLEGKQGNFKNLREFVFKNIDGYFKIYSKHTPINLVRDLPQGFSALEPLVDLPIGINITRFQTLLALHRSYLTPGDSSSGWTAGAAAYYVGYLQPRTFLLKYNENGTITDAVDCALDPLSETKCTLKSFTVEKGIYQTSNFRVQPTESIVRFPNITNLCPFGEVFNATRFASVYAWNRKRISNCVADYSVLYNSASFSTFKCYGVSPTKLNDLCFTNVYADSFVIRGDEVRQIAPGQTGKIADYNYKLPDDFTGCVIAWNSNNLDSKVGGNYNYLYRLFRKSNLKPFERDISTEIYQAGSTPCNGVEGFNCYFPLQSYGFQPTNGVGYQPYRVVVLSFELLHAPATVCGPKKSTNLVKNKCVNFNFNGLTGTGVLTESNKKFLPFQQFGRDIADTTDAVRDPQTLEILDITPCSFGGVSVITPGTNTSNQVAVLYQDVNCTEVPVAIHADQLTPTWRVYSTGSNVFQTRAGCLIGAEHVNNSYECDIPIGAGICASYQTQTNSPRRARSVASQSIIAYTMSLGAENSVAYSNNSIAIPTNFTISVTTEILPVSMTKTSVDCTMYICGDSTECSNLLLQYGSFCTQLNRALTGIAVEQDKNTQQVFAQVKQIYKTPPIKDFGGFNFSQILPDPSKPSKRSFIEDLLFNKVTLADAGFIKQYGDCLGDIAARDLICAQKFNGLTVLPPLLTDEMIAQYTSALLAGTITSGWTFGAGAALQIPFAMQMAYRFNGIGVTQNVLYENQKLIANQFNSAIGKIQDSLSSTASALGKLQDVVNQNAQALNTLVKQLSSNFGAISSVLNDILSRLDPPEAEVQIDRLITGRLQSLQTYVTQQLIRAAEIRASANLAATKMSECVLGQSKRVDFCGKGYHLMSFPQSAPHGVVFLHVTYVPAQEKNFTTAPAICHDGKAHFPREGVFVSNGTHWFVTQRNFYEPQIITTDNTFVSGNCDVVIGIVNNTVYDPLQPELDSFKEELDKYFKNHTSPDVDLGDISGINASVVNIQKEIDRLNEVAKNLNESLIDLQELGKYEQYIK

SEQ ID NO: 1709 - protein, 1211 aa, Artificial Sequence
  SARS-CoV-2/France/HF1805/2020__EPI_ISL_414628 spike protein (1-1211)(K986P_V987P)
MFVFLVLLPLVSSQCVNLTTRTQLPPAYTNSFTRGVYYPDKVFRSSVLHSTQDLFLPFFSNVTWFHAIHVSGTNGTKRFDNPVLPFNDGVYFASTEKSNIIRGWIFGTTLDSKTQSLLIVNNATNVVIKVCEFQFCNDPFLGVYYHKNNKSWMESEFRVYSSANNCTFEYVSQPFLMDLEGKQGNFKNLREFVFKNIDGYFKIYSKHTPINLVRDLPQGFSALEPLVDLPIGINITRFQTLLALHRSYLTPGDSSSGWTAGAAAYYVGYLQPRTFLLKYNENGTITDAVDCALDPLSETKCTLKSFTVEKGIYQTSNFRVQPTESIVRFPNITNLCPFGEVFNATRFASVYAWNRKRISNCVADYSVLYNSASFSTFKCYGVSPTKLNDLCFTNVYADSFVIRGDEVRQIAPGQTGKIADYNYKLPDDFTGCVIAWNSNNLDSKVGGNYNYLYRLFRKSNLKPFERDISTEIYQAGSTPCNGVEGFNCYFPLQSYGFQPTNGVGYQPYRVVVLSFELLHAPATVCGPKKSTNLVKNKCVNFNFNGLTGTGVLTESNKKFLPFQQFGRDIADTTDAVRDPQTLEILDITPCSFGGVSVITPGTNTSNQVAVLYQGVNCTEVPVAIHADQLTPTWRVYSTGSNVFQTRAGCLIGAEHVNNSYECDIPIGAGICASYQTQTNSPRRARSVASQSIIAYTMSLGAENSVAYSNNSIAIPTNFTISVTTEILPVSMTKTSVDCTMYICGDSTECSNLLLQYGSFCTQLNRALTGIAVEQDKNTQEVFAQVKQIYKTPPIKDFGGFNFSQILPDPSKPSKRSFIEDLLFNKVTLADAGFIKQYGDCLGDIAARDLICAQKFNGLTVLPPLLTDEMIAQYTSALLAGTITSGWTFGAGAALQIPFAMQMAYRFNGIGVTQNVLYENQKLIANQFNSAIGKIQDSLSSTASALGKLQDVVNQNAQALNTLVKQLSSNFGAISSVLNDILSRLDPPEAEVQIDRLITGRLQSLQTYVTQQLIRAAEIRASANLAATKMSECVLGQSKRVDFCGKGYHLMSFPQSAPHGVVFLHVTYVPAQEKNFTTAPAICHDGKAHFPREGVFVSNGTHWFVTQRNFYEPQIITTDNTFVSGNCDVVIGVVNNTVYDPLQPELDSFKEELDKYFKNHTSPDVDLGDISGINASVVNIQKEIDRLNEVAKNLNESLIDLQELGKYEQYIK

SEQ ID NO: 1710 - protein, 1211 aa, Artificial Sequence
  SARS-CoV-2/Netherlands/ZuidHolland_9/2020__EPI_ISL_414445 spike protein (1-1211)(K986P_V987P)
MFVFLVLLPLVSSQCVNLTTRTQLPPAYTNSFTRGVYYPDKVFRSSVLHSTQDLFLPFFSNVTWFHAIHVSGTNGTKRFDNPVLPFNDGVYFASTEKSNIIRGWIFGTTLDSKTQSLLIVNNATNVVIKVCEFQFCNDPFLGVYYHKNNKSWMESEFRVYSSANNCTFEYVSQPFLMDLEGKQGNFKNLREFVFKNIDGYFKIYSKHTPINLVRDLPQGFSALEPLVDLPIGINITRFQTLLALHRSYLTPGDSSSGWTAGAAAYYVGYLQPRTFLLKYNENGTITDAVDCALDPLSETKCTLKSFTVEKGIYQTSNFRVQPTESIVRFPNITNLCPFGEVFNATRFASVYAWNRKRISNCVADYSVLYNSASFSTFKCYGVSPTKLNDLCFTNVYADSFVIRGDEVRQIAPGQTGKIADYNYKLPDDFTGCVIAWNSNNLDSKVGGNYNYLYRLFRKSNLKPFERDISTEIYQAGSTPCNGVEGFNCYFPLQSYGFQPTNGVGYQPYRVVVLSFELLHAPATVCGPKKSTNLVKNKCVNFNFNGLTGTGVLTESNKKFLPFQQFGRDIADTTDAVRDPQTLEILDITPCSFGGVSVITPGTNTSNQVAVLYQGVNCTEVPVAIHADQLTPTWRVYSTGSNVFQTRAGCLIGAEHVNNSYECDIPIGAGICASYQTQTNSPRRARSVASQSIIAYTMSLGAENSVAYSNNSIAIPTNFTISVTTEILPVSMTKTSVDCTMYICGDSTECSNLLLQYGSFCTQLNRALTGIAVEQDKNTQEVFAQVKQIYKTPPIKDFGGFNFSQILPDPSKPSKRSFIEDLLFNKVTLADAGFIKQYGDCLGDIAARDLICVQKFNGLTVLPPLLTDEMIAQYTSALLAGTITSGWTFGAGAALQIPFAMQMAYRFNGIGVTQNVLYENQKLIANQFNSAIGKIQDSLSSTASALGKLQDVVNQNAQALNTLVKQLSSNFGAISSVLNDILSRLDPPEAEVQIDRLITGRLQSLQTYVTQQLIRAAEIRASANLAATKMSECVLGQSKRVDFCGKGYHLMSFPQSAPHGVVFLHVTYVPAQEKNFTTAPAICHDGKAHFPREGVFVSNGTHWFVTQRNFYEPQIITTDNTFVSGNCDVVIGIVNNTVYDPLQPELDSFKEELDKYFKNHTSPDVDLGDISGINASVVNIQKEIDRLNEVAKNLNESLIDLQELGKYEQYIK

SEQ ID NO: 1711 - protein, 1211 aa, Artificial Sequence
  SARS-CoV-2/Finland/FIN03032020A/2020__EPI_ISL_413602 spike protein (1-1211)(K986P_V987P)
MFVFLVLLPLVSSQCVNLTTRTQLPPAYTNSFTRGVYYPDKVFRSSVLHSTQDLFLPFFSNVTWFHAIHVSGTNGTKRFDNPVLPFNDGVYFASTEKSNIIRGWIFGTTLDSKTQSLLIVNNATNVVIKVCEFQFCNDPFLGVYYHKNNKSWMESEFRVYSSANNCTFEYVSQPFLMDLEGKQGNFKNLREFVFKNIDGYFKIYSKHTPINLVRDLPQGFSALEPLVDLPIGINITRFQTLLALHRSYLTPGDSSSGWTAGAAAYYVGYLQPRTFLLKYNENGTITDAVDCALDPLSETKCTLKSFTVEKGIYQTSNFRVQPTESIVRFPNITNLCPFGEVFNATRFASVYAWNRKRISNCVADYSVLYNSASFSTFKCYGVSPTKLNDLCFTNVYADSFVIRGDEVRQIAPGQTGKIADYNYKLPDDFTGCVISWNSNNLDSKVGGNYNYLYRLFRKSNLKPFERDISTEIYQAGSTPCNGVEGFNCYFPLQSYGFQPTNGVGYQPYRVVVLSFELLHAPATVCGPKKSTNLVKNKCVNFNFNGLTGTGVLTESNKKFLPFQQFGRDIADTTDAVRDPQTLEILDITPCSFGGVSVITPGTNTSNQVAVLYQGVNCTEVPVAIHADQLTPTWRVYSTGSNVFQTRAGCLIGAEHVNNSYECDIPIGAGICASYQTQTNSPRRARSVASQSIIAYTMSLGAENSVAYSNNSIAIPTNFTISVTTEILPVSMTKTSVDCTMYICGDSTECSNLLLQYGSFCTQLNRALTGIAVEQDKNTQEVFAQVKQIYKTPPIKDFGGFNFSQILPDPSKPSKRSFIEDLLFNKVTLADAGFIKQYGDCLGDIAARDLICAQKFNGLTVLPPLLTDEMIAQYTSALLAGTITSGWTFGAGAALQIPFAMQMAYRFNGIGVTQNVLYENQKLIANQFNSAIGKIQDSLSSTASALGKLQDVVNQNAQALNTLVKQLSSNFGAISSVLNDILSRLDPPEAEVQIDRLITGRLQSLQTYVTQQLIRAAEIRASANLAATKMSECVLGQSKRVDFCGKGYHLMSFPQSAPHGVVFLHVTYVPAQEKNFTTAPAICHDGKAHFPREGVFVSNGTHWFVTQRNFYEPQIITTDNTFVSGNCDVVIGIVNNTVYDPLQPELDSFKEELDKYFKNHTSPDVDLGDISGINASVVNIQKEIDRLNEVAKNLNESLIDLQELGKYEQYIK

SEQ ID NO: 1712 - protein, 1211 aa, Artificial Sequence
  SARS-CoV-2/France/GE1977/2020__EPI_ISL_414632 spike protein (1-1211)(K986P_V987P)
MFVFLVLLPLVSSQCVNLTTRTQLPPAYTNSFTRGVYYPDKVFRSSVLHSTQDLFLPFFSNVTWFHAIHVSGTNGTKRFDNPVLPFNDGVYFASTEKSNIIRGWIFGTTLDSKTQSLLIVNNATNVVIKVCEFQFCNDPFLGVYYHKNNKSWMESEFRVYSSANNCTFEYVSQPFLMDLEGKQGNFKNLREFVFKNIDGYFKIYSKHTPINLVRDLPQGFSALEPLVDLPIGINITRFQTLLALHRSYLTPGDSSSGWTAGAAAYYVGYLQPRTFLLKYNENGTITDAVDCALDPLSETKCTLKSFTVEKGIYQTSNFRVQPTESIVRFPNITNLCPFGEVFNATRFASVYAWNRKRISNCVADYSVLYNSASFSTFKCYGVSPTKLNDLCFTNVYADSFVIRGDEVRQIAPGQTGKIADYNYKLPDDFTGCVIAWNSNNLDSKVGGNYNYLYRLFRKSNLKPFERDISTEIYQAGSTPCNGVEGFNCYFPLQSYGFQPTNGVGYQPYRVVVLSFELLHAPATVCGPKKSTNLVKNKCVNFNFNGLTGTGVLTESNKKFLPFQQFGRDIADTTDAVRDPQTLEILDITPCSFGGVSVITPGTNTSNQVAVLYQGVNCTEVPVAIHADQLTPTWRVYSTGSNVFQTRAGCLIGAEHVNNSYECDIPIGAGICASYQTQTNSPRRARSVASQSIIAYTMSLGAENSVAYSNNSIAIPTNFTISVTTEILPVSMTKTSVDCTMYICGDSTECSNLLLQYGSFCTQLNRALTGIAVEQDKNTQEVFAQVKQIYKTPPIKDFGGFNFSQILPDPSKPSKRSFIEDLLFNKVTLADAGFIKQYGDCLGDIAARDLICAQKFNGLTVLPPLLTDEMIAQYTSALLAGTITSGWTFGAGAALQIPFAMQMAYRFNGIGVTQNVLYENQKLIANQFNSAIGKIQDSLFSTASALGKLQDVVNQNAQALNTLVKQLSSNFGAISSVLNDILSRLDPPEAEVQIDRLITGRLQSLQTYVTQQLIRAAEIRASANLAATKMSECVLGQSKRVDFCGKGYHLMSFPQSAPHGVVFLHVTYVPAQEKNFTTAPAICHDGKAHFPREGVFVSNGTHWFVTQRNFYEPQIITTDNTFVSGNCDVVIGIVNNTVYDPLQPELDSFKEELDKYFKNHTSPDVDLGDISGINASVVNIQKEIDRLNEVAKNLNESLIDLQELGKYEQYIK

SEQ ID NO: 1713 - protein, 1211 aa, Artificial Sequence
  SARS-CoV-2/Finland/FIN-313/2020__EPI_ISL_414641 spike protein (1-1211)(K986P_V987P)
MFVFLVLLPLVSSQCVNLTTRTQLPPAYTNSFTRGVYYPDKVFRSSVLHSTQDLFLPFFSNVTWFHAIHVSGTNGTKRFDNPVLPFNDGVYFASTEKSNIIRGWIFGTTLDSKTQSLLIVNNATNVVIKVCEFQFCNDPFLGVYYHKNNKSWMESEFRVYSSANNCTFEYVSQPFLMDLEGKQGNFKNLREFVFKNIDGYFKIYSKHTPINLVRDLPQGFSALEPLVDLPIGINITRFKTLLALHRSYLTPGDSSSGWTAGAAAYYVGYLQPRTFLLKYNENGTITDAVDCALDPLSETKCTLKSFTVEKGIYQTSNFRVQPTESIVRFPNITNLCPFGEVFNATRFASVYAWNRKRISNCVADYSVLYNSASFSTFKCYGVSPTKLNDLCFTNVYADSFVIRGDEVRQIAPGQTGKIADYNYKLPDDFTGCVIAWNSNNLDSKVGGNYNYLYRLFRKSNLKPFERDISTEIYQAGSTPCNGVEGFNCYFPLQSYGFQPTNGVGYQPYRVVVLSFELLHAPATVCGPKKSTNLVKNKCVNFNFNGLTGTGVLTESNKKFLPFQQFGRDIADTTDAVRDPQTLEILDITPCSFGGVSVITPGTNTSNQVAVLYQGVNCTEVPVAIHADQLTPTWRVYSTGSNVFQTRAGCLIGAEHVNNSYECDIPIGAGICASYQTQTNSPRRARSVASQSIIAYTMSLGAENSVAYSNNSIAIPTNFTISVTTEILPVSMTKTSVDCTMYICGDSTECSNLLLQYGSFCTQLNRALTGIAVEQDKNTQEVFAQVKQIYKTPPIKDFGGFNFSQILPDPSKPSKRSFIEDLLFNKVTLADAGFIKQYGDCLGDIAARDLICAQKFNGLTVLPPLLTDEMIAQYTSALLAGTITSGWTFGAGAALQIPFAMQMAYRFNGIGVTQNVLYENQKLIANQFNSAIGKIQDSLSSTASALGKLQDVVNQNAQALNTLVKQLSSNFGAISSVLNDILSRLDPPEAEVQIDRLITGRLQSLQTYVTQQLIRAAEIRASANLAATKMSECVLGQSKRVDFCGKGYHLMSFPQSAPHGVVFLHVTYVPAQEKNFTTAPAICHDGKAHFPREGVFVSNGTHWFVTQRNFYEPQIITTDNTFVSGNCDVVIGIVNNTVYDPLQPELDSFKEELDKYFKNHTSPDVDLGDISGINASVVNIQKEIDRLNEVAKNLNESLIDLQELGKYEQYIK

SEQ ID NO: 1714 - protein, 1211 aa, Artificial Sequence
  SARS-CoV-2/Netherlands/ZuidHolland_2/2020__EPI_ISL_414556 spike protein (1-1211)(K986P_V987P)
MFVFLVLLPLVSSQCVNLTTRTQLPPAYTNSFTRGVYYPDKVFRSSVLHSTQDLFLPFFSNVTWFHAIHVSGTNGTKRFDNPVLPFNDGVYFASTEKSNIIRGWIFGTTLDSKTQSLLIVNNATNVVIKVCEFQFCNDPFLGVYYHKNNKSWMESEFRVYSSANNCTFEYVSQPFLMDLEGKQGNFKNLREFVFKNIDGYFKIYSKHTPINLVRDLPQGFSALEPLVDLPIGINITRFQTLLALHRSYLTPGDSSSGWTAGAAAYYVGYLQPRTFLLKYNENGTITDAVDCALDPLSETKCTLKSFTVEKGIYQTSNFRVQPTESIVRFPNITNLCPFGEVFNATRFASVYAWNRKRISNCVADYSVLYNSASFSTFKCYGVSPTKLNDLCFTNVYADSFVIRGDEVRQIAPGQTGKIADYNYKLPDDFTGCVIAWNSNNLDSKVGGNYNYLYRLFRKSNLKPFERDISTEIYQAGSTPCNGVEGFNCYFPLQSYGFQPTNGVGYQPYRVVVLSFELLHAPATVCGPKKSTNLVKNKCVNFNFNGLTGTGVLTESNKKFLPFQQFGRDIADTTDAVRDPQTLEILDITPCSFGGVSVITPGTNTSNQVAVLYQGVNCTEVPVAIHADQLTPTWRVYSTGSNVFQTRAGCLIGAEHVNNSYECDIPIGAGICASYQTQTNSPRRARSVASQSIIAYTMSLGAENSVAYSNNSIAIPTNFTISVTTEILPVSMTKTSVDCTMYICGDSTECSNLLLQYGSFCTQLNRALTGIALEQDKNTQEVFAQVKQIYKTPPIKDFGGFNFSQILPDPSKPSKRSFIEDLLFNKVTLADAGFIKQYGDCLGDIAARDLICAQKFNGLTVLPPLLTDEMIAQYTSALLAGTITSGWTFGAGAALQIPFAMQMAYRFNGIGVTQNVLYENQKLIANQFNSAIGKIQDSLSSTASALGKLQDVVNQNAQALNTLVKQLSSNFGAISSVLNDILSRLDPPEAEVQIDRLITGRLQSLQTYVTQQLIRAAEIRASANLAATKMSECVLGQSKRVDFCGKGYHLMSFPQSAPHGVVFLHVTYVPAQEKNFTTAPAICHDGKAHFPREGVFVSNGTHWFVTQRNFYEPQIITTDNTFVSGNCDVVIGIVNNTVYDPLQPELDSFKEELDKYFKNHTSPDVDLGDISGINASVVNIQKEIDRLNEVAKNLNESLIDLQELGKYEQYIK

SEQ ID NO: 1715 - protein, 1211 aa, Artificial Sequence
  SARS-CoV-2/USA/WA-UW31/2020__EPI_ISL_414618 spike protein (1-1211)(K986P_V987P)
MFVFLVLLPLVSSQCVNLTTRTQLPPAYTNSFTRGVYYPDKVFRSSVLHSTQDLFLPFFSNVTWFHAIHVSGTNGTKRFDNPVLPFNDGVYFASTEKSNIIRGWIFGTTLDSKTQSLLIVNNATNVVIKVCEFQFCNDPFLGVYYHKNNKSWMESEFRVYSSANNCTFEYVSQPFLMDLEGKQGNFKNLREFVFKNIDGYFKIYSKHTPINLVRDLPQGFSALEPLVDLPIGINITRFQTLLALHRSYLTPGDSSSGWTAGAAAYYVGYLQPRTFLLKYNENGTITDAVDCALDPLSETKCTLKSFTVEKGIYQTSNFRVQPTESIVRFPNITNLCPFGEVFNATRFASVYAWNRKRISNCVADYSVLYNSASFSTFKCYGVSPTKLNDLCFTNVYADSFVIRGDEVRQIAPGQTGKIADYNYKLPDDFTGCVIAWNSNNLDSKVGGNYNYLYRLFRKSNLKPFERDISTEIYQAGSTPCNGAEGFNCYFPLQSYGFQPTNGVGYQPYRVVVLSFELLHAPATVCGPKKSTNLVKNKCVNFNFNGLTGTGVLTESNKKFLPFQQFGRDIADTTDAVRDPQTLEILDITPCSFGGVSVITPGTNTSNQVAVLYQDVNCTEVPVAIHADQLTPTWRVYSTGSNVFQTRAGCLIGAEHVNNSYECDIPIGAGICASYQTQTNSPRRARSVASQSIIAYTMSLGAENSVAYSNNSIAIPTNFTISVTTEILPVSMTKTSVDCTMYICGDSTECSNLLLQYGSFCTQLNRALTGIAVEQDKNTQEVFAQVKQIYKTPPIKDFGGFNFSQILPDPSKPSKRSFIEDLLFNKVTLADAGFIKQYGDCLGDIAARDLICAQKFNGLTVLPPLLTDEMIAQYTSALLAGTITSGWTFGAGAALQIPFAMQMAYRFNGIGVTQNVLYENQKLIANQFNSAIGKIQDSLSSTASALGKLQDVVNQNAQALNTLVKQLSSNFGAISSVLNDILSRLDPPEAEVQIDRLITGRLQSLQTYVTQQLIRAAEIRASANLAATKMSECVLGQSKRVDFCGKGYHLMSFPQSAPHGVVFLHVTYVPAQEKNFTTAPAICHDGKAHFPREGVFVSNGTHWFVTQRNFYEPQIITTDNTFVSGNCDVVIGIVNNTVYDPLQPELDSFKEELDKYFKNHTSPDVDLGDISGINASVVNIQKEIDRLNEVAKNLNESLIDLQELGKYEQYIK

SEQ ID NO: 1716 - protein, 1211 aa, Artificial Sequence
  SARS-CoV-2/South Korea/SNU01/2020__EPI_ISL_411929 spike protein (1-1211)(K986P_V987P)
MFVFLVLLPLVSSQCVNLTTRTQLPPAYTNSFTRGVYYPDKVFRSSVLHSTQDLFLPFFSNVTWFHAIHVSGTNGTKRFDNPVLPFNDGVYFASTEKSNIIRGWIFGTTLDSKTQSLLIVNNATNVVIKVCEFQFCNDPFLGVYYHKNNKSWMESEFRVYSSANNCTFEYVSQPFLMDLEGKQGNFKNLREFVFKNIDGYFKIYSKHTPINLVRDLPQGFWALEPLVDLPIGINITRFQTLLALHRSYLTPGDSSSGWTAGAAAYYVGYLQPRTFLLKYNENGTITDAVDCALDPLSETKCTLKSFTVEKGIYQTSNFRVQPTESIVRFPNITNLCPFGEVFNATRFASVYAWNRKRISNCVADYSVLYNSASFSTFKCYGVSPTKLNDLCFTNVYADSFVIRGDEVRQIAPGQTGKIADYNYKLPDDFTGCVIAWNSNNLDSKVGGNYNYLYRLFRKSNLKPFERDISTEIYQAGSTPCNGVEGFNCYFPLQSYGFQPTNGVGYQPYRVVVLSFELLHAPATVCGPKKSTNLVKNKCVNFNFNGLTGTGVLTESNKKFLPFQQFGRDIADTTDAVRDPQTLEILDITPCSFGGVSVITPGTNTSNQVAVLYQDVNCTEVPVAIHADQLTPTWRVYSTGSNVFQTRAGCLIGAEHVNNSYECDIPIGAGICASYQTQTNSPRRARSVASQSIIAYTMSLGAENSVAYSNNSIAIPTNFTISVTTEILPVSMTKTSVDCTMYICGDSTECSNLLLQYGSFCTQLNRALTGIAVEQDKNTQEVFAQVKQIYKTPPIKDFGGFNFSQILPDPSKPSKRSFIEDLLFNKVTLADAGFIKQYGDCLGDIAARDLICAQKFNGLTVLPPLLTDEMIAQYTSALLAGTITSGWTFGAGAALQIPFAMQMAYRFNGIGVTQNVLYENQKLIANQFNSAIGKIQDSLSSTASALGKLQDVVNQNAQALNTLVKQLSSNFGAISSVLNDILSRLDPPEAEVQIDRLITGRLQSLQTYVTQQLIRAAEIRASANLAATKMSECVLGQSKRVDFCGKGYHLMSFPQSAPHGVVFLHVTYVPAQEKNFTTAPAICHDGKAHFPREGVFVSNGTHWFVTQRNFYEPQIITTDNTFVSGNCDVVIGIVNNTVYDPLQPELDSFKEELDKYFKNHTSPDVDLGDISGINASVVNIQKEIDRLNEVAKNLNESLIDLQELGKYEQYIK

SEQ ID NO: 1717 - protein, 1211 aa, Artificial Sequence
  SARS-CoV-2/China/WF0004/2020__EPI_ISL_413694 spike protein (1-1211)(K986P_V987P)
MFVFLVLLPLVSSQCVNLTTRTQLPPAYTNSFTRGVYYPDKVFRSSVLHSTQDLFLPFFSNVTWFHAIHVSGTNGTKRFDNPVLPFNDGVYFASTEKSNIIRGWIFGTTLDSKTQSLLIVNNATNVVIKVCEFQFCNDPFLGVYYHKNNKSWTESEFRVYSSANNCTFEYVSQPFLMDLEGKQGNFKNLREFVFKNIDGYFKIYSKHTPINLVRDLPQGFSALEPLVDLPIGINITRFQTLLALHRSYLTPGDSSSGWTAGAAAYYVGYLQPRTFLLKYNENGTITDAVDCALDPLSETKCTLKSFTVEKGIYQTSNFRVQPTESIVRFPNITNLCPFGEVFNATRFASVYAWNRKRISNCVADYSVLYNSASFSTFKCYGVSPTKLNDLCFTNVYADSFVIRGDEVRQIAPGQTGKIADYNYKLPDDFTGCVIAWNSNNLDSKVGGNYNYLYRLFRKSNLKPFERDISTEIYQAGSTPCNGVEGFNCYFPLQSYGFQPTNGVGYQPYRVVVLSFELLHAPATVCGPKKSTNLVKNKCVNFNFNGLTGTGVLTESNKKFLPFQQFGRDIADTTDAVRDPQTLEILDITPCSFGGVSVITPGTNTSNQVAVLYQDVNCTEVPVAIHADQLTPTWRVYSTGSNVFQTRAGCLIGAEHVNNSYECDIPIGAGICASYQTQTNSPRRARSVASQSIIAYTMSLGAENSVAYSNNSIAIPTNFTISVTTEILPVSMTKTSVDCTMYICGDSTECSNLLLQYGSFCTQLNRALTGIAVEQDKNTQEVFAQVKQIYKTPPIKDFGGFNFSQILPDPSKPSKRSFIEDLLFNKVTLADAGFIKQYGDCLGDIAARDLICAQKFNGLTVLPPLLTDEMIAQYTSALLAGTITSGWTFGAGAALQIPFAMQMAYRFNGIGVTQNVLYENQKLIANQFNSAIGKIQDSLSSTASALGKLQDVVNQNAQALNTLVKQLSSNFGAISSVLNDILSRLDPPEAEVQIDRLITGRLQSLQTYVTQQLIRAAEIRASANLAATKMSECVLGQSKRFDFCGKGYHLMSFPQSAPHGVVFLHVTYVPAQEKNFTTAPAICHDGKAHFPREGVFVSNGTHWFVTQRNFYEPQIITTDNTFVSGNCDVVIGIVNNTVYDPLQPELDSFKEELDKYFKNHTSPDVDLGDISGINASVVNIQKEIDRLNEVAKNLNESLIDLQELGKYEQYIK

SEQ ID NO: 1718 - protein, 1211 aa, Artificial Sequence
  SARS-CoV-2/China/WF0028/2020__EPI_ISL_413791 spike protein (1-1211)(K986P_V987P)
MFVFLVLLPLVSSQCVNLTTRTQLPPAYTNSFTRGVYYPDKVFRSSVLHSTQDLFLPFFSNVTWFHAIHVSGTNGTKRFDNPVLPFNDGVYFASTEKSNIIRGWIFGTTLDSKTQSLLIVNNATNVVIKVCEFQFCNDPFLGVYYHKNNKSWMESEFRVYSSANNCTFEYVSQPFLMDLEGKQGNFKNLREFVFKNIDGYFKIYSKHTPINLVRDLPQGFSALEPLVDLPIGINITRFQTLLALHRSYLTPGDSSSGWTAGAAAYYVGYLQPRTFLLKYNENGTITDAVDCALDPLSETKCTLKSFTVEKGIYQTSNFRVQPTESIVRFPNITNLCPFGEVFNATRFASVYAWNRKRISNCVADYSVLYNSASFSTFKCYGVSPTKLNDLCFTNVYADSFVIRGDEVRQIAPGQTGKIADYNYKLPDDFTGCVIAWNSNNLDSKVGGNYNYLYRLFRKSNLKPFERDISTEIYQAGSTPCNGVEGFNCYFPLQSYGFQPTNGVGYQPYRVVVLSFELLHAPATVCGPKKSTNLVKNKCVNFNFNGLTGTGVLTESNKKFLPFQQFGRDIADTTDAVRDPQTLEILDITPCSFGGVSVITPGTNTSNQVAVLYQDVNCTEVPVAIHADQLTPTWRVYSTGSNVFQTRAGCLIGAEHVNNSYECDIPIGAGICASYQTQTNSPRRARSVASQSIIAYTMSLGAENSVAYSNNSIAIPTNFTISVTTEILPVSMTKTSVDCTMYICGDSTECSNLLLQYGSFCTQLNRALTGIAVEQDKNTQEVFAQVKQIYKTPPIKDFGGFNFSQILPDPSKPSKRSFIEDLLFNKVTLADAGFIKQYGDCLGDIAARDLICAQKFNGLTVLPPLLTDEMIAQYTSALLAGTITSGWTFGAGAALQIPFAMQMAYRFNGIGVTQNVLYENQKLIANQFNSAIGKIQDSLSSTASALGKLQDVVNQNAQALNTLVKQLSSNFGAISSVLNDILSRLDPPEAEVQIDRLITGRLQSLQTYVTQQLIRAAEIRASANLAATKMSECVLGQSKRVDFCGKGYHLMSFPQSAPHGVVFLHVTYVPAQEKNFTTAPAICHDGKAHFPREGVFVSNGTHWFVTQRNFYEPQIITTDNTFVSGNCDVVIGIVNNTVYDPLQPELESFKEELDKYFKNHTSPDVDLGDISGINASVVNIQKEIDRLNEVAKNLNESLIDLQELGKYEQYIK

SEQ ID NO: 1719 - protein, 1211 aa, Artificial Sequence
  SARS-CoV-2/2019-nCoV/USA-CruiseA-18/2020__MT159716.1 spike protein (1-1211)(K986P_V987P)
MFVFLVLLPLVSSQCVNLTTRTQLPPAYTNSFTRGVYYPDKVFRSSVLHSTQDLFLPFFSNVTWFHAIHVSGTNGTKRFDNPVLPFNDGVYFASTEKSNIIRGWIFGTTLDSKTQSLLIVNNATNVVIKVCEFQFCNDPFLGVYYHKNNKSWMESELRVYSSANNCTFEYVSQPFLMDLEGKQGNFKNLREFVFKNIDGYFKIYSKHTPINLVRDLPQGFSALEPLVDLPIGINITRFQTLLALHRSYLTPGDSSSGWTAGAAAYYVGYLQPRTFLLKYNENGTITDAVDCALDPLSETKCTLKSFTVEKGIYQTSNFRVQPTESIVRFPNITNLCPFGEVFNATRFASVYAWNRKRISNCVADYSVLYNSASFSTFKCYGVSPTKLNDLCFTNVYADSFVIRGDEVRQIAPGQTGKIADYNYKLPDDFTGCVIAWNSNNLDSKVGGNYNYLYRLFRKSNLKPFERDISTEIYQAGSTPCNGVEGFNCYFPLQSYGFQPTNGVGYQPYRVVVLSFELLHAPATVCGPKKSTNLVKNKCVNFNFNGLTGTGVLTESNKKFLPFQQFGRDIADTTDAVRDPQTLEILDITPCSFGGVSVITPGTNTSNQVAVLYQDVNCTEVPVAIHADQLTPTWRVYSTGSNVFQTRAGCLIGAEHVNNSYECDIPIGAGICASYQTQTNSPRRARSVASQSIIAYTMSLGAENSVAYSNNSIAIPTNFTISVTTEILPVSMTKTSVDCTMYICGDSTECSNLLLQYGSFCTQLNRALTGIAVEQDKNTQEVFAQVKQIYKTPPIKDFGGFNFSQILPDPSKPSKRSFIEDLLFNKVTLADAGFIKQYGDCLGDIAARDLICAQKFNGLTVLPPLLTDEMIAQYTSALLAGTITSGWTFGAGAALQIPFAMQMAYRFNGIGVTQNVLYENQKLIANQFNSAIGKIQDSLSSTASALGKLQDVVNQNAQALNTLVKQLSSNFGAISSVLNDILSRLDPPEAEVQIDRLITGRLQSLQTYVTQQLIRAAEIRASANLAATKMSECVLGQSKRVDFCGKGYHLMSFPQSAPHGVVFLHVTYVPAQEKNFTTAPAICHDGKAHFPREGVFVSNGTHWFVTQRNFYEPQIITTDNTFVSGNCDVVIGIVNNTVYDPLQPELDSFKEELDKYFKNHTSPDVDLGDISGINASVVNIQKEIDRLNEVAKNLNESLIDLQELGKYEQYIK

SEQ ID NO: 1720 - protein, 1211 aa, Artificial Sequence
  SARS-CoV-2/SARS-CoV-2/Yunnan-01/human/2020/CHN__MT049951.1 spike protein (1-1211)(K986P_V987P)
MFVFLVLLPLVSSQCVNLTTRTQLPPANTNSFTRGVYYPDKVFRSSVLHSTQDLFLPFFSNVTWFHAIHVSGTNGTKRFDNPVLPFNDGVYFASTEKSNIIRGWIFGTTLDSKTQSLLIVNNATNVVIKVCEFQFCNDPFLGVYYHKNNKSWMESEFRVYSSANNCTFEYVSQPFLMDLEGKQGNFKNLREFVFKNIDGYFKIYSKHTPINLVRDLPQGFSALEPLVDLPIGINITRFQTLLALHRSYLTPGDSSSGWTAGAAAYYVGYLQPRTFLLKYNENGTITDAVDCALDPLSETKCTLKSFTVEKGIYQTSNFRVQPTESIVRFPNITNLCPFGEVFNATRFASVYAWNRKRISNCVADYSVLYNSASFSTFKCYGVSPTKLNDLCFTNVYADSFVIRGDEVRQIAPGQTGKIADYNYKLPDDFTGCVIAWNSNNLDSKVGGNYNYLYRLFRKSNLKPFERDISTEIYQAGSTPCNGVEGFNCYFPLQSYGFQPTNGVGYQPYRVVVLSFELLHAPATVCGPKKSTNLVKNKCVNFNFNGLTGTGVLTESNKKFLPFQQFGRDIADTTDAVRDPQTLEILDITPCSFGGVSVITPGTNTSNQVAVLYQDVNCTEVPVAIHADQLTPTWRVYSTGSNVFQTRAGCLIGAEHVNNSYECDIPIGAGICASYQTQTNSPRRARSVASQSIIAYTMSLGAENSVAYSNNSIAIPTNFTISVTTEILPVSMTKTSVDCTMYICGDSTECSNLLLQYGSFCTQLNRALTGIAVEQDKNTQEVFAQVKQIYKTPPIKDFGGFNFSQILPDPSKPSKRSFIEDLLFNKVTLADAGFIKQYGDCLGDIAARDLICAQKFNGLTVLPPLLTDEMIAQYTSALLAGTITSGWTFGAGAALQIPFAMQMAYRFNGIGVTQNVLYENQKLIANQFNSAIGKIQDSLSSTASALGKLQDVVNQNAQALNTLVKQLSSNFGAISSVLNDILSRLDPPEAEVQIDRLITGRLQSLQTYVTQQLIRAAEIRASANLAATKMSECVLGQSKRVDFCGKGYHLMSFPQSAPHGVVFLHVTYVPAQEKNFTTAPAICHDGKAHFPREGVFVSNGTHWFVTQRNFYEPQIITTDNTFVSGNCDVVIGIVNNTVYDPLQPELDSFKEELDKYFKNHTSPDVDLGDISGINASVVNIQKEIDRLNEVAKNLNESLIDLQELGKYEQYIK

SEQ ID NO: 1721 - protein, 1211 aa, Artificial Sequence
  SARS-CoV-2/USA/WA-UW292/2020__EPI_ISL_418077 spike protein (1-1211)(K986P_V987P)
MFVFLVLLPLVSSQCVNLTTRTQLPPAYTNSFTRGVYYPDKVFRSSVLHSTQDLFLPFFSNVTWFHAIHVSGTNGTKRFDNPVLPFNDGVYFASTEKSNIIRGWIFGTTLDSKTQSLLIVNNATNVVIKVCEFQFCNDPFLGVYYHKNNKSWMESEFRVYSSANNCTFEYVSQPFLMDLEGKQGNFKNLREFVFKNIDGYFKIYSKHTPINLVRDLPQGFSALEPLVDLPIGINITRFQTLLALHRSYLTPGDSSSGWTAGAAAYYVGYLQPRTFLLKYNENGTITDAVDCALDPLSETKCTLKSFTVEKGIYQTSNFRVQPTESIVRFPNITNLCPFGEVFNATRFASVYAWNRKRISNCVADYSVLYNSASFSTFKCYGVSPTKLNDLCFTNVYADSFVIRGDEVRQIAPGQTGKIADYNYKLPDDFTGCVIAWNSNNLDSKVGGNYNYLYRLFRKSNLKPFERDISTEIYQASSTPCNGVEGFNCYFPLQSYGFQPTNGVGYQPYRVVVLSFELLHAPATVCGPKKSTNLVKNKCVNFNFNGLTGTGVLTESNKKFLPFQQFGRDIADTTDAVRDPQTLEILDITPCSFGGVSVITPGTNTSNQVAVLYQDVNCTEVPVAIHADQLTPTWRVYSTGSNVFQTRAGCLIGAEHVNNSYECDIPIGAGICASYQTQTNSPRRARSVASQSIIAYTMSLGAENSVAYSNNSIAIPTNFTISVTTEILPVSMTKTSVDCTMYICGDSTECSNLLLQYGSFCTQLNRALTGIAVEQDKNTQEVFAQVKQIYKTPPIKDFGGFNFSQILPDPSKPSKRSFIEDLLFNKVTLADAGFIKQYGDCLGDIAARDLICAQKFNGLTVLPPLLTDEMIAQYTSALLAGTITSGWTFGAGAALQIPFAMQMAYRFNGIGVTQNVLYENQKLIANQFNSAIGKIQDSLSSTASALGKLQDVVNQNAQALNTLVKQLSSNFGAISSVLNDILSRLDPPEAEVQIDRLITGRLQSLQTYVTQQLIRAAEIRASANLAATKMSECVLGQSKRVDFCGKGYHLMSFPQSAPHGVVFLHVTYVPAQEKNFTTAPAICHDGKAHFPREGVFVSNGTHWFVTQRNFYEPQIITTDNTFVSGNCDVVIGIVNNTVYDPLQPELDSFKEELDKYFKNHTSPDVDLGDISGINASVVNIQKEIDRLNEVAKNLNESLIDLQELGKYEQYIK

SEQ ID NO: 1722 - protein, 1211 aa, Artificial Sequence
  SARS-CoV-2/Iceland/192/2020__EPI_ISL_417819 spike protein (1-1211)(K986P_V987P)
MFVFFVLLPLVSSQCVNLTTRTQLPPAYTNSFTRGVYYPDKVFRSSVLHSTQDLFLPFFSNVTWFHAIHVSGTNGTKRFDNPVLPFNDGVYFASTEKSNIIRGWIFGTTLDSKTQSLLIVNNATNVVIKVCEFQFCNDPFLGVYYHKNNKSWMESEFRVYSSANNCTFEYVSQPFLMDLEGKQGNFKNLREFVFKNIDGYFKIYSKHTPINLVRDLPQGFSALEPLVDLPIGINITRFQTLLALHRSYLTPGDSSSGWTAGAAAYYVGYLQPRTFLLKYNENGTITDAVDCALDPLSETKCTLKSFTVEKGIYQTSNFRVQPTESIVRFPNITNLCPFGEVFNATRFASVYAWNRKRISNCVADYSVLYNSASFSTFKCYGVSPTKLNDLCFTNVYADSFVIRGDEVRQIAPGQTGKIADYNYKLPDDFTGCVIAWNSNNLDSKVGGNYNYLYRLFRKSNLKPFERDISTEIYQAGSTPCNGVEGFNCYFPLQSYGFQPTNGVGYQPYRVVVLSFELLHAPATVCGPKKSTNLVKNKCVNFNFNGLTGTGVLTESNKKFLPFQQFGRDIADTTDAVRDPQTLEILDITPCSFGGVSVITPGTNTSNQVAVLYQGVNCTEVPVAIHADQLTPTWRVYSTGSNVFQTRAGCLIGAEHVNNSYECDIPIGAGICASYQTQTNSPRRARSVASQSIIAYTMSLGAENSVAYSNNSIAIPTNFTISVTTEILPVSMTKTSVDCTMYICGDSTECSNLLLQYGSFCTQLNRALTGIAVEQDKNTQEVFAQVKQIYKTPPIKDFGGFNFSQILPDPSKPSKRSFIEDLLFNKVTLADAGFIKQYGDCLGDIAARDLICAQKFNGLTVLPPLLTDEMIAQYTSALLAGTITSGWTFGAGAALQIPFAMQMAYRFNGIGVTQNVLYENQKLIANQFNSAIGKIQDSLSSTASALGKLQDVVNQNAQALNTLVKQLSSNFGAISSVLNDILSRLDPPEAEVQIDRLITGRLQSLQTYVTQQLIRAAEIRASANLAATKMSECVLGQSKRVDFCGKGYHLMSFPQSAPHGVVFLHVTYVPAQEKNFTTAPAICHDGKAHFPREGVFVSNGTHWFVTQRNFYEPQIITTDNTFVSGNCDVVIGIVNNTVYDPLQPELDSFKEELDKYFKNHTSPDVDLGDISGINASVVNIQKEIDRLNEVAKNLNESLIDLQELGKYEQYIK

SEQ ID NO: 1723 - protein, 1211 aa, Artificial Sequence
  SARS-CoV-2/Belgium/ULG-6939/2020__EPI_ISL_417020 spike protein (1-1211)(K986P_V987P)
MFVFLVLLPLVSSQCVNLTTRTQLPPAYTNSFTRGVYYPDKVFRSSVLHSTQDLFLPFFSNVTWFHAIHVSGTNGTKRFDNPVLPFNDGVYFASTEKSNIIRGWIFGTTLDSKTQSLLIVNNATNVVIKVCEFQFCNDPFLGVYYHKNNKSWMESEFRVYSSANNCTFEYVSQPFLMDLEGKQGNFKNLREFVFKNIDGYFKIYSKHTPINLVRDLPQGFSALEPLVDLPIGINITRFQTLLALHRSYLTPGDSSSGWTAGAAAYYVGYLQPRTFLLKYNENGTITDAVDCALDPLSETKCTLKSFTVEKGIYQTSNFRVQPTESIVRFPNITNLCPFGEVFNATRFASVYAWNRKRISNCVADYSVLYNSASFSTFKCYGVSPTKLNDLCFTNVYADSFVIRGDEVRQIAPGQTGKIADYNYKLPDDFTGCVIAWNSNNLDSKVGGNYNYLYRLFRKSNLKPFERDISTEIYQAGSTPCNGVEGFNCYFPLQSYGFQPTNGVGYQPYRVVVLSFELLHAPATVCGPKKSTNLVKNKCVNFNFNGLTGTGVLTESNKKFLPFQQFGRDIADTTDAVRDPQTLEILDITPCSFGGVSVITPGTNTSNQVAVLYQGVNCTEVPVAIHADQLTPTWRVYSTGSNVFQTRAGCLIGAEHVNNSYECDIPIGAGICASYQTQTNSPRRARSVASQSIIAYTMSLGAENSVVYSNNSIAIPTNFTISVTTEILPVSMTKTSVDCTMYICGDSTECSNLLLQYGSFCTQLNRALTGIAVEQDKNTQEVFAQVKQIYKTPPIKDFGGFNFSQILPDPSKPSKRSFIEDLLFNKVTLADAGFIKQYGDCLGDIAARDLICAQKFNGLTVLPPLLTDEMIAQYTSALLAGTITSGWTFGAGAALQIPFAMQMAYRFNGIGVTQNVLYENQKLIANQFNSAIGKIQDSLSSTASALGKLQDVVNQNAQALNTLVKQLSSNFGAISSVLNDILSRLDPPEAEVQIDRLITGRLQSLQTYVTQQLIRAAEIRASANLAATKMSECVLGQSKRVDFCGKGYHLMSFPQSAPHGVVFLHVTYVPAQEKNFTTAPAICHDGKAHFPREGVFVSNGTHWFVTQRNFYEPQIITTDNTFVSGNCDVVIGIVNNTVYDPLQPELDSFKEELDKYFKNHTSPDVDLGDISGINASVVNIQKEIDRLNEVAKNLNESLIDLQELGKYEQYIK

SEQ ID NO: 1724 - protein, 1211 aa, Artificial Sequence
  SARS-CoV-2/France/HF2496/2020__EPI_ISL_418231 spike protein (1-1211)(K986P_V987P)
MFVFLVLLPLVSSQCVNLTTRTQLPPAYTNSFTRGVYYPDKVFRSSVLHSTQDLFLPFFSNVTWFHAIHVSGTNGTKRFDNPVLPFNDGVYFASTEKSNIIRGWIFGTTLDSKTQSLLIVNNATNVVIKVCEFQFCNDPFLGVYYHKNNKSWMESEFRVYSSANNCTFEYVSQPFLMDLEGKQGNFKNLREFVFKNIDGYFKIYSKHTPINLVRDLPQGFSALEPLVDLPIGINITRFQTLLALHRSYLTPGDSSSGWTAGAAAYYVGYLQPRTFLLKYNENGTITDAVDCALDPLSETKCTLKSFTVEKGIYQTSNFRVQPTESIVRFPNITNLCPFGEVFNATRFASVYAWNRKRISNCVADYSVLYNSASFSTFKCYGVSPTKLNDLCFTNVYADSFVIRGDEVRQIAPGQTGKIADYNYKLPDDFTGCVIAWNSNNLDSKVGGNYNYLYRLFRKSNLKPFERDISTEIYQAGSTPCNGVEGFNCYFPLQSYGFQPTNGVGYQPYRVVVLSFELLHAPATVCGPKKSTNLVKNKCVNFNFNGLTGTGVLTESNKKFLPFQQFGRDIADTTDAVRDPQTLEILDITPCSFGGVSVITPGTNTSNQVAVLYQGVNCTEVPVAIHADQLTPTWRVYSTGSNVFQTRAGCLIGAEHVNNSYECDIPIGAGICASYQTQTNSPRRARSVASQSIIAYTMSLGAENSVAYSNNSIAIPTNFTISVTTEILPVSMTKTSVDCTMYICGDSTECSNLLLQYGSFCTQLNRALTGIAVEQDKNTQEVFAQVKQIYKTPPIKDFGGFNFSQILPDPSKPSKRSFIEDLLFNKVTLADAGFIKQYGDCLGDIVARDLICAQKFNGLTVLPPLLTDEMIAQYTSALLAGTITSGWTFGAGAALQIPFAMQMAYRFNGIGVTQNVLYENQKLIANQFNSAIGKIQDSLSSTASALGKLQDVVNQNAQALNTLVKQLSSNFGAISSVLNDILSRLDPPEAEVQIDRLITGRLQSLQTYVTQQLIRAAEIRASANLAATKMSECVLGQSKRVDFCGKGYHLMSFPQSAPHGVVFLHVTYVPAQEKNFTTAPAICHDGKAHFPREGVFVSNGTHWFVTQRNFYEPQIITTDNTFVSGNCDVVIGIVNNTVYDPLQPELDSFKEELDKYFKNHTSPDVDLGDISGINASVVNIQKEIDRLNEVAKNLNESLIDLQELGKYEQYIK

SEQ ID NO: 1725 - protein, 1211 aa, Artificial Sequence
  SARS-CoV-2/USA/WA-UW291/2020__EPI_ISL_418076 spike protein (1-1211)(K986P_V987P)
MFVFLVLLPLVSSQCVNLTTRTQLPPAYTNSFTRGVYYPDKVFRSSVLHSTQDLFLPFFSNVTWFHAIHVSGTNGTKRFDNPVLPFNDGVYFASTEKSNIIRGWIFGTTLDSKTQSLLIVNNATNVVIKVCEFQFCNDPFLGVYYHKNNKSWMESEFRVYSSANNCTFEYVSQPFLMDLEGKQGNFKNLREFVFKNIDGYFKIYSKHTPINLVRDLPQGFSALEPLVDLPIGINITRFQTLLALHRSYLTPGDSSSGWTAGAAAYYVGYLQPRTFLLKYNENGTITDAVDCALDPLSETKCTLKSFTVEKGIYQTSNFRVQPTESIVRFPNITNLCPFGEVFNATRFASVYAWNRKRISNCVADYSVLYNSASFSTFKCYGVSPTKLNDLCFTNVYADSFVIRGDEVRQIAPGQTGKIADYNYKLPDDFTGCVIAWNSNNLDSKVGGNYNYLYRLFRKSNLKPFERDISTEIYQAGSTPCNGVEGFNCYFPLQSYGFQPTNGVGYQPYRVVVLSFELLHAPATVCGPKKSTNLVKNKCVNFNFNGLTGTGVLTESNKKFLPFQQFGRDIADTTDAVRDPQTLEILDITPCSFGGVSVITPGTNTSNQVAVLYQGVNCTEVPVAIHADQLTPTWRVYSTGSNVFQTRAGCLIGAEHVNNSYECDIPIGAGICASYQTQTNSPRRARSVASQSIIAYTMSLGAENSVAYSNNSIAIPTNFTISVTTEILPVSMTKTSVDCTMYICGDSTECSNLLLQYGSFCTQLNRALTGIAVEQDKNTQEVFAQVKQIYKTPPIKDFGGFNFSQILPDPSKPSKRSFIEDLLFNKVTLADAGFIKQYGDCLGDIAARDLICAQKFNGLTVLPPLLTDEMIAQYTSALLAGTITSGWTFGAGAALQIPFAMQMAYRFNGIGVTQNVLYENQKLIANQFNSAIGKIQYSLSSTASALGKLQDVVNQNAQALNTLVKQLSSNFGAISSVLNDILSRLDPPEAEVQIDRLITGRLQSLQTYVTQQLIRAAEIRASANLAATKMSECVLGQSKRVDFCGKGYHLMSFPQSAPHGVVFLHVTYVPAQEKNFTTAPAICHDGKAHFPREGVFVSNGTHWFVTQRNFYEPQIITTDNTFVSGNCDVVIGIVNNTVYDPLQPELDSFKEELDKYFKNHTSPDVDLGDISGINASVVNIQKEIDRLNEVAKNLNESLIDLQELGKYEQYIK

SEQ ID NO: 1726 - protein, 1211 aa, Artificial Sequence; identical to SEQ ID NO: 48
  SARS-CoV-2/Portugal/PT0034/2020__EPI_ISL_418019 spike protein (1-1211)(K986P_V987P)

SEQ ID NO: 1727 - protein, 1211 aa, Artificial Sequence
  SARS-CoV-2/Iceland/202/2020__EPI_ISL_417750 spike protein (1-1211)(K986P_V987P)
MFVFLVLLPLVSSQCVNLTTRTQLPPAYTNSFTRGVYYPDKVFRSSVLHSTQDLFLPFFSNVTWFHAIHVSGTNGTKRFDNPVLPFNDGVYFASTEKSNIIRGWIFGTTLDSKTQSLLIVNNATNVVIKVCEFQFCNDPFLGVYYHKNNKSWMESEFRVYSSANNCTFEYVSQPFLMDLEGKQGNFKNLREFVFKNIDGYFKIYSKHTPINLVRDLPQGFSALEPLVDLPIGINITRFQTLLALHRSYLTPGDSSSGWTAGAAAYYVGYLQPRTFLLKYNENGTITDAVDCALDPLSETKCTLKSFTVEKGIYQTSNFRVQPTESIVRFPNITNLCPFGEVFNATRFASVYAWNRKRISNCVADYSVLYNSASFSTFKCYGVSPTKLNDLCFTNVYADSFVIRGDEVRQIAPGQTGKIADYNYKLPDDFTGCVIAWNSNNLDSKVGGNYNYLYRLFRKSNLKPFERDISTEIYQAGSTPCNGVEGFNCYFPLQSYGFQPTNGVGYQPYRVVVLSFELLHAPATVCGPKKSTNLVKNKCVNFNFNGLTGTGVLTESNKKFLPFQQFGRDIADTTDAVRDPQTLEILDITPCSFGGVSVITPGTNTSNQVAVLYQDVNCTEVPVAIHADQLTPTWRVYSTGSNVFQTRAGCLIGAEHVNNSYECDIPIGAGICASYQTQTNSPRRARSVASQSIIAYTMSLGAENSVAYSNNSIAIPTNFTISVTTEILPVSMTKTSVDCTMYICGDSTECSNLLLQYGSFCTQLNRALTGIAVEQDKNTQEVFAQVKQIYKTPPIKDFGGFNFSQILPDPSKPSKRSFIEDLLFNKVTLADAGFIKQYGDCLGDIAARDLICAQKFNGLTVLPPLLTDEMIAQYTSALLAGTITSGWTFGAGAALQIPFAMQMAYRFNGIGVTQNVLYENQKLIANQFNSAIGKIQDSLSSTASALGKLQDVVNQNAQALNTLVKQLSSNFGAISSVLNDILSRLDPPEAEVQIDRLITGRLQSLQTYVTQQLIRAAEIRASANLAATKMSECVLGQSKRVDFCGKGYHLMSFPQSAPHGVVFLHVTYVPAQEKNFTTAPAICHDGKAHFPREGVFVSNGTHWFVTQRNFYEPQIITTDNTFVSGNCDVVIGIVNNTVYDPLQPELDSFKEELDKYFKNHTSPDVDLGDIPGINASVVNIQKEIDRLNEVAKNLNESLIDLQELGKYEQYIK

SEQ ID NO: 1728 - protein, 1211 aa, Artificial Sequence
  SARS-CoV-2/USA/WA-UW261/2020__EPI_ISL_418046 spike protein (1-1211)(K986P_V987P)
MFVFLVLLPLVSSQCVNLTTRTQLPPAYTNSFTRGVYYPDKVFRSSVLHSTQDLFLPFFSNVTWFHAIHVSGTNGTKRFDNPVLPFNDGVYFASTEKSNIIRGWIFGTTLDSKTQSLLIVNNATNVVIKVCEFQFCNDPFLGVYYHKNNKSWMESEFRVYSSANNCTFEYVSQPFLMDLEGKQGNFKNLREFVFKNIDGYFKIYSKHTPINLVRDLPQGFSALEPLVDLPIGINITRFQTLLALHRSYLTPGDSSSGWTAGAAAYYVGYLQPRTFLLKYNENGTITDAVDCALDPLSETKCTLKSFTVEKGIYQTSNFRVQPTESIVRFPNITNLCPFGEVFNATRFTSVYAWNRKRISNCVADYSVLYNSASFSTFKCYGVSPTKLNDLCFTNVYADSFVIRGDEVRQIAPGQTGKIADYNYKLPDDFTGCVIAWNSNNLDSKVGGNYNYLYRLFRKSNLKPFERDISTEIYQAGSTPCNGVEGFNCYFPLQSYGFQPTNGVGYQPYRVVVLSFELLHAPATVCGPKKSTNLVKNKCVNFNFNGLTGTGVLTESNKKFLPFQQFGRDIADTTDAVRDPQTLEILDITPCSFGGVSVITPGTNTSNQVAVLYQDVNCTEVPVAIHADQLTPTWRVYSTGSNVFQTRAGCLIGAEHVNNSYECDIPIGAGICASYQTQTNSPRRARSVASQSIIAYTMSLGAENSVAYSNNSIAIPTNFTISVTTEILPVSMTKTSVDCTMYICGDSTECSNLLLQYGSFCTQLNRALTGIAVEQDKNTQEVFAQVKQIYKTPPIKDFGGFNFSQILPDPSKPSKRSFIEDLLFNKVTLADAGFIKQYGDCLGDIAARDLICAQKFNGLTVLPPLLTDEMIAQYTSALLAGTITSGWTFGAGAALQIPFAMQMAYRFNGIGVTQNVLYENQKLIANQFNSAIGKIQDSLSSTASALGKLQDVVNQNAQALNTLVKQLSSNFGAISSVLNDILSRLDPPEAEVQIDRLITGRLQSLQTYVTQQLIRAAEIRASANLAATKMSECVLGQSKRVDFCGKGYHLMSFPQSAPHGVVFLHVTYVPAQEKNFTTAPAICHDGKAHFPREGVFVSNGTHWFVTQRNFYEPQIITTDNTFVSGNCDVVIGIVNNTVYDPLQPELDSFKEELDKYFKNHTSPDVDLGDISGINASVVNIQKEIDRLNEVAKNLNESLIDLQELGKYEQYIK

SEQ ID NO: 1729 - protein, 1211 aa, Artificial Sequence
  SARS-CoV-2/Portugal/PT0035/2020__EPI_ISL_418020 spike protein (1-1211)(K986P_V987P)
MFVFLVLLPLVSSQCVNLTTRTQLPPAYTNSFTRGVYYPDKVFRSSVLHSTQDLFLPFFSNVTWFHAIHVSGTNGTKRFDNPVLPFNDGVYFASTEKSNIIRGWIFGTTLDSKTQSLLIVNNATNVVIKVCEFQFCNDPFLGVYYHKNNKSWMESEFRVYSSANNCTFEYVSQPFLMDLEGKQGNFKNLREFVFKNIDGYFKIYSKHTPINLVRDLPQGFSALEPLVDLPIGINITRFQTLLALHRSYLTPGDSSSGWTAGAAAYYVGYLQPRTFLLKYNENGTITDAVDCALDPLSETKCTLKSFTVEKGIYQTSNFRVQPTESIVRFPNITNLCPFGEVFNATRFASVYAWNRKRISNCVADYSVLYNSASFSTFKCYGVSPTKLNDLCFTNVYADSFVIRGDEVRQIAPGQTGKIADYNYKLPDDFTGCVIAWNSNNLDSKVGGNYNYLYRLFRKSNLKPFERDISTEIYQAGSTPCNGVEGFNCYFPLQSYGFQPTNGVGYQPYRVVVLSFELLHAPATVCGPKKSTNLVKNKCVNFNFNGLTGTGVLTESNKKFLPFQQFGRDIADTTDAVRDPQTLEILDITPCSFGGVSVITPGTNTSNQVAVLYQDVNCTEVPVAIHADQLTPTWRVYSTGSNVFQTRAGCLIGAEHVNNSYECDIPIGAGICASYQTQTNSPRRARSVASQSIIAYTMSLGAENSVAYSNNSIAIPTNFTISVTTEILPVSMTKTSVDCTMYICGDSTECSNLLLQYGSFCTQLNRALTGIAVEQDKNTQEVFAQVKQIYKTPPIKDFGGFNFSQILPDPSKPSKRSFIEDLLFNKVTLADAGFIKQYGDCLGDISARDLICAQKFNGLTVLPPLLTDEMIAQYTSALLAGTITSGWTFGAGAALQIPFAMQMAYRFNGIGVTQNVLYENQKLIANQFNSAIGKIQDSLSSTASALGKLQDVVNQNAQALNTLVKQLSSNFGAISSVLNDILSRLDPPEAEVQIDRLITGRLQSLQTYVTQQLIRAAEIRASANLAATKMSECVLGQSKRVDFCGKGYHLMSFPQSAPHGVVFLHVTYVPAQEKNFTTAPAICHDGKAHFPREGVFVSNGTHWFVTQRNFYEPQIITTDNTFVSGNCDVVIGIVNNTVYDPLQPELDSFKEELDKYFKNHTSPDVDLGDISGINASVVNIQKEIDRLNEVAKNLNESLIDLQELGKYEQYIK

SEQ ID NO: 1730 - protein, 1211 aa, Artificial Sequence
  SARS-CoV-2/USA/NY-NYUMC7/2020__EPI_ISL_418192 spike protein (1-1211)(K986P_V987P)
MFVFLVLLPLVSSQCVNLTTRTQLPPAYTNSFTRGVYYPDKVFRSSVLHSTQDLFLPFFSNVTWFHAIHVSGTNGTKRFDNPVLPFNDGVYFASTEKSNIIRGWIFGTTLDSKTQSLLIVNNATNVVIKVCEFQFCNDPFLGVYHHKNNKSWMESEFRVYSSANNCTFEYVSQPFLMDLEGKQGNFKNLREFVFKNIDGYFKIYSKHTPINLVRDLPQGFSALEPLVDLPIGINITRFQTLLALHRSYLTPGDSSSGWTAGAAAYYVGYLQPRTFLLKYNENGTITDAVDCALDPLSETKCTLKSFTVEKGIYQTSNFRVQPTESIVRFPNITNLCPFGEVFNATRFASVYAWNRKRISNCVADYSVLYNSASFSTFKCYGVSPTKLNDLCFTNVYADSFVIRGDEVRQIAPGQTGKIADYNYKLPDDFTGCVIAWNSNNLDSKVGGNYNYLYRLFRKSNLKPFERDISTEIYQAGSTPCNGVEGFNCYFPLQSYGFQPTNGVGYQPYRVVVLSFELLHAPATVCGPKKSTNLVKNKCVNFNFNGLTGTGVLTESNKKFLPFQQFGRDIADTTDAVRDPQTLEILDITPCSFGGVSVITPGTNTSNQVAVLYQGVNCTEVPVAIHADQLTPTWRVYSTGSNVFQTRAGCLIGAEHVNNSYECDIPIGAGICASYQTQTNSPRRARSVASQSIIAYTMSLGAENSVAYSNNSIAIPTNFTISVTTEILPVSMTKTSVDCTMYICGDSTECSNLLLQYGSFCTQLNRALTGIAVEQDKNTQEVFAQVKQIYKTPPIKDFGGFNFSQILPDPSKPSKRSFIEDLLFNKVTLADAGFIKQYGDCLGDIAARDLICAQKFNGLTVLPPLLTDEMIAQYTSALLAGTITSGWTFGAGAALQIPFAMQMAYRFNGIGVTQNVLYENQKLIANQFNSAIGKIQDSLSSTASALGKLQDVVNQNAQALNTLVKQLSSNFGAISSVLNDILSRLDPPEAEVQIDRLITGRLQSLQTYVTQQLIRAAEIRASANLAATKMSECVLGQSKRVDFCGKGYHLMSFPQSAPHGVVFLHVTYVPAQEKNFTTAPAICHDGKAHFPREGVFVSNGTHWFVTQRNFYEPQIITTDNTFVSGNCDVVIGIVNNTVYDPLQPELDSFKEELDKYFKNHTSPDVDLGDISGINASVVNIQKEIDRLNEVAKNLNESLIDLQELGKYEQYIK

SEQ ID NO: 1731 - protein, 1211 aa, Artificial Sequence
  SARS-CoV-2/Iceland/189/2020__EPI_ISL_417709 spike protein (1-1211)(K986P_V987P)
MFVFLVLLPLVSSQCVNLTTRTQLPPAYTNSFTRGVYYPDKVFRSSVLHSTQDLFLPFFSNVTWFHAIHVSGTNGTKRFDNPVLPFNDGVYFASTEKSNIIRGWIFGTTLDSKTQSLLIVNNATNVVIKVCEFQFCNDPFLGVYYHKNNKSWMESEFRVYSSANNCTFEYVSQPFLMDLEGKQGNFKNLREFVFKNIDGYFKIYSKHTPINLVRDLPQGFSALEPLVDLPIGINITRFQTLLALHRSYLTPGDSSSGWTAGAAAYYVGYLQPRTFLLKYNENGTITDAVDCALDPLSETKCTLKSFTVEKGIYQTSNFRVQPTESIVRFPNITNLCPFGEVFNATRFASVYAWNRKRISNCVADYSVLYNSASFSTFKCYGVSPTKLNDLCFTNVYADSFVIRGDEVRQIAPGQTGKIADYNYKLPDDFTGCVIAWNSNNLDSKVGGNYNYLYRLFRKSNLKPFERDISTEIYQAGSTPCNGVEGFNCYFPLQSYGFQPTNGVGYQPYRVVVLSFELLHAPATVCGPKKSTNLVKNKCVNFNFNGLTGTGVLTESNKKFLPFQQFGRDIADTTDAVRDPQTLEILDITPCSFGGVSVITPGTNTSNQVAVLYQGVNCTEVPVAIHADQLTPTWRVYSTGSNVFQTRAGCLIGAEHVNNSYECDIPIGAGICASYQTQTNSPRRARSVASQSIIAYTMSLGAENSVAYSNNSIAIPTNFTISVTTEILPVSMTKTSVDCTMYICGDSTECSNLLLQYGSFCTQLNRALTGIAVEQDKNTQEVFAQVKQIYKTPPIKDFGGFNFSQILPDPSKPSKRSFIEDLLFNKVTLADAGFTKQYGDCLGDIAARDLICAQKFNGLTVLPPLLTDEMIAQYTSALLAGTITSGWTFGAGAALQIPFAMQMAYRFNGIGVTQNVLYENQKLIANQFNSAIGKIQDSLSSTASALGKLQDVVNQNAQALNTLVKQLSSNFGAISSVLNDILSRLDPPEAEVQIDRLITGRLQSLQTYVTQQLIRAAEIRASANLAATKMSECVLGQSKRVDFCGKGYHLMSFPQSAPHGVVFLHVTYVPAQEKNFTTAPAICHDGKAHFPREGVFVSNGTHWFVTQRNFYEPQIITTDNTFVSGNCDVVIGIVNNTVYDPLQPELDSFKEELDKYFKNHTSPDVDLGDISGINASVVNIQKEIDRLNEVAKNLNESLIDLQELGKYEQYIK

SEQ ID NO: 1732 - protein, 1211 aa, Artificial Sequence
  SARS-CoV-2/Australia/NSW56/2020__EPI_ISL_417408 spike protein (1-1211)(K986P_V987P)
MFVFLVLLPLVSSQCVNLTTRTQLPPAYTNSFTRGVYYPDKVFRSSVLHSTQDLFLPFFSNVTWFHAIHVSGTNGTKRFDNPVLPFNDGVYFASTEKSNIIRGWIFGTTLDSKTQSLLIVNNATNVVIKVCEFQFCNDPFLGVYYHKNNKSWMESEFRVYSSANNCTFEYVSQPFLMDLEGKQGNFKNLREFVFKNIDGYFKIYSKHTPINLVRDLPQGFSALEPLVDLPIGINITRFQTLLALHRSYLTPGDSSSGWTAGAAAYYVGYLQPRTFLLKYNENGTITDAVDCALDPLSETKCTLKSFTVEKGIYQTSNFRVQPTESIVRFPNITNLCPFGEVFNATRFASVYAWNRKRISNCVADYSVLYNSASFSTFKCYGVSPTKLNDLCFTNVYADSFVIRGDEVRQIAPGQTGKIADYNYKLPDDFTGCVIAWNSNNLDSKVGGNYNYLYRLFRKSNLKPFERDISTEIYQAGSTPCNGVEGFNCYFPLQSYGFQPTNGVGYQPYRVVVLSFELLHAPATVCGPKKSTNLVKNKCVNFNFNGLTGTGVLTESNKKFLPFQQFGRDIADTTDAVRDPQTLEILDITPCSFGGVSVITPGTNTSNQVAVLYQDVNCTEVPVAIHADQLTPTWRVYSTGSNVFQTRAGCLIGAEHVNNSYECDIPIGAGICASYQTQTNSPRRARSVASQSIIAYTMSLGAENSVAYSNNSIAIPTNFTISVTTEILPVSMTKTSVDCTMYICGDSTECSNLLLQYGSFCTQLNRALTGIAVEQDKNTQEVFAQVKQIYKTPPIKDFGGFNFSQILPDSSKPSKRSFIEDLLFNKVTLADAGFIKQYGDCLGDIAARDLICAQKFNGLTVLPPLLTDEMIAQYTSALLAGTITSGWTFGAGAALQIPFAMQMAYRFNGIGVTQNVLYENQKLIANQFNSAIGKIQDSLSSTASALGKLQDVVNQNAQALNTLVKQLSSNFGAISSVLNDILSRLDPPEAEVQIDRLITGRLQSLQTYVTQQLIRAAEIRASANLAATKMSECVLGQSKRVDFCGKGYHLMSFPQSAPHGVVFLHVTYVPAQEKNFTTAPAICHDGKAHFPREGVFVSNGTHWFVTQRNFYEPQIITTDNTFVSGNCDVVIGIVNNTVYDPLQPELDSFKEELDKYFKNHTSPDVDLGDISGINASVVNIQKEIDRLNEVAKNLNESLIDLQELGKYEQYIK

SEQ ID NO: 1733 - protein, 1211 aa, Artificial Sequence
  SARS-CoV-2/Iceland/280/2020__EPI_ISL_417608 spike protein (1-1211)(K986P_V987P)
MFVFLVLLPLVSSQCVNLTTRTQLPPAYTNSFTRGVYYPDKVFRSSVLHSTQDLFLPFFSNVTWFHAIHVSGTNGTKRFDNPVLPFNDGVYFASTEKSNIIRGWIFGTTLDSKTQSLLIVNNATNVVIKVCEFQFCNDPFLGVYYHKNNKSWMESEFRVYSSANNCTFEYVSQPFLMDLEGKQGNFKNLREFVFKNIDGYFKIYSKHTPINLVRDLPQGFSALEPLVDLPIGINITRFQTLLALHRSYLTPGDSSSGWTAGAAAYYVGYLQPRTFLLKYNENGTITDAVDCALDPLSETKCTLKSFTVEKGIYQTSNFRVQPTESIVRFPNITNLCPFGEVFNATRFASVYAWNRKRISNCVADYSVLYNSASFSTFKCYGVSPTKLNDLCFTNVYADSFVIRGDEVRQIAPGQTGKIADYNYKLPDDFTGCVIAWNSNNLDSKVGGNYNYLYRLFRKSNLKPFERDISTEIYQAGSTPCNGVEGFNCYFPLQSYGFQPTNGVGYQPYRVVVLSFELLHAPATVCGPKKSTNLVKNKCVNFNFNGLTGTGVLTESNKKFLPFQQFGRDIADTTDAVRDPQTLEILDITPCSFGGVSVITPGTNTSNQVAVLYQGVNCTEVPVAIHADQLTPTWRVYSTGSNVFQTRAGCLIGAEHVNNSYECDIPIGAGICASYHTQTNSPRRARSVASQSIIAYTMSLGAENSVAYSNNSIAIPTNFTISVTTEILPVSMTKTSVDCTMYICGDSTECSNLLLQYGSFCTQLNRALTGIAVEQDKNTQEVFAQVKQIYKTPPIKDFGGFNFSQILPDPSKPSKRSFIEDLLFNKVTLADAGFIKQYGDCLGDIAARDLICAQKFNGLTVLPPLLTDEMIAQYTSALLAGTITSGWTFGAGAALQIPFAMQMAYRFNGIGVTQNVLYENQKLIANQFNSAIGKIQDSLSSTASALGKLQDVVNQNAQALNTLVKQLSSNFGAISSVLNDILSRLDPPEAEVQIDRLITGRLQSLQTYVTQQLIRAAEIRASANLAATKMSECVLGQSKRVDFCGKGYHLMSFPQSAPHGVVFLHVTYVPAQEKNFTTAPAICHDGKAHFPREGVFVSNGTHWFVTQRNFYEPQIITTDNTFVSGNCDVVIGIVNNTVYDPLQPELDSFKEELDKYFKNHTSPDVDLGDISGINASVVNIQKEIDRLNEVAKNLNESLIDLQELGKYEQYIK

SEQ ID NO: 1734 - protein, 1211 aa, Artificial Sequence; identical to SEQ ID NO: 48
  SARS-CoV-2/Iceland/247/2020__EPI_ISL_417575 spike protein (1-1211)(K986P_V987P)

SEQ ID NO: 1735 - protein, 1211 aa, Artificial Sequence
  SARS-CoV-2/Iceland/238/2020__EPI_ISL_417566 spike protein (1-1211)(K986P_V987P)
MFVFLVLLPLVSSQCVNLTTRTQLPPAYTNSFTRGVYYPDKVFRSSVLHSTQDLFLPFFSNVTWFHAIHVSGTNGTKRFDNPVLPFNDGVYFASTEKSNIIRGWIFGTTLDSKTQSLLIVNNATNVVIKVCEFQFCNDPFLGVYYHKNNKSWMESEFRVYSSANNCTFEYVSQPFLMDLEGKQGNFKNLREFVFKNIDGYFKIYSKHTPINLVRDLPQGFSALEPLVDLPIGINITRFQTLLALHRSYLTPGDSSSGWTAGAAAYYVGYLQPRTFLLKYNENGTITDAVDCALDPLSETKCTLKSFTVEKGIYQTSNFRVQPTESIVRFPNITNLCPFGEVFNATRFASVYAWNRKRISNCVADYSVLYNSASFSTFKCYGVSPTKLNDLCFTNVYADSFVIRGDEVRQIAPGQTGKIADYNYKLPDDFTGCVIAWNSNNLDSKVGGNYNYLYRLFRKSNLKPFERDISTEIYQAGSTPCNGVEGFNCYFPLQSYGFQPTNGVGYQPYRVVVLSFELLHAPATVCGPKKSTNLVKNKCVNFNFNGLTGTGVLTESNKKFLPFQQFGRDIADTTDAVRDPQTLEILDITPCSFGGVSVITPGTNTSNQVAVLYQGVNCTEVPVAIHADQLTPTWRVYSTGSNVFQTRAGCLIGAEHVNNSYECDIPIGAGICASYQTQTNSPRRARSVASQSIIAYTMSLGAENSVAYSNNSIAIPTNFTISVTTEILPVSMTKTSVDCTMYICGDSTECSNLLLQYGSFCTQLNRALTGIAVEQDKNTQEVFAQVKQIYKTPPIKDFGGFNFSQILPDPSKPSKRSFIEDLLFNKVTLADVGFIKQYGDCLGDIAARDLICAQKFNGLTVLPPLLTDEMIAQYTSALLAGTITSGWTFGAGAALQIPFAMQMAYRFNGIGVTQNVLYENQKLIANQFNSAIGKIQDSLSSTASALGKLQDVVNQNAQALNTLVKQLSSNFGAISSVLNDILSRLDPPEAEVQIDRLITGRLQSLQTYVTQQLIRAAEIRASANLAATKMSECVLGQSKRVDFCGKGYHLMSFPQSAPHGVVFLHVTYVPAQEKNFTTAPAICHDGKAHFPREGVFVSNGTHWFVTQRNFYEPQIITTDNTFVSGNCDVVIGIVNNTVYDPLQPELDSFKEELDKYFKNHTSPDVDLGDISGINASVVNIQKEIDRLNEVAKNLNESLIDLQELGKYEQYIK

SEQ ID NO: 1736 - protein, 1211 aa, Artificial Sequence
  SARS-CoV-2/Greece/16/2020__EPI_ISL_418265 spike protein (1-1211)(K986P_V987P)
MFVFLVLLPLVSSQCVNLTTRTQLPPAYTNSFTRGVYYPDKVFRSSVLHSTQDLFLPFFSNVTWFHAIHVSGTNGTKRFDNPVLPFNDGVYFASTEKSNIIRGWIFGTTLDSKTQSLLIVNNATNVVIKVCEFQFCNDPFLGVYYHKNNKSWMESEFRVYSSANNCTFEYVSQPFLMDLEGKQGNFKNLREFVFKNVDGYFKIYSKHTPINLVRDLPQGFSALEPLVDLPIGINITRFQTLLALHRSYLTPGDSSSGWTAGAAAYYVGYLQPRTFLLKYNENGTITDAVDCALDPLSETKCTLKSFTVEKGIYQTSNFRVQPTESIVRFPNITNLCPFGEVFNATRFASVYAWNRKRISNCVADYSVLYNSASFSTFKCYGVSPTKLNDLCFTNVYADSFVIRGDEVRQIAPGQTGKIADYNYKLPDDFTGCVIAWNSNNLDSKVGGNYNYLYRLFRKSNLKPFERDISTEIYQAGSTPCNGVEGFNCYFPLQSYGFQPTNGVGYQPYRVVVLSFELLHAPATVCGPKKSTNLVKNKCVNFNFNGLTGTGVLTESNKKFLPFQQFGRDIADTTDAVRDPQTLEILDITPCSFGGVSVITPGTNTSNQVAVLYQDVNCTEVPVAIHADQLTPTWRVYSTGSNVFQTRAGCLIGAEHVNNSYECDIPIGAGICASYQTQTNSPRRARSVASQSIIAYTMSLGAENSVAYSNNSIAIPTNFTISVTTEILPVSMTKTSVDCTMYICGDSTECSNLLLQYGSFCTQLNRALTGIAVEQDKNTQEVFAQVKQIYKTPPIKDFGGFNFSQILPDPSKPSKRSFIEDLLFNKVTLADAGFIKQYGDCLGDIAARDLICAQKFNGLTVLPPLLTDEMIAQYTSALLAGTITSGWTFGAGAALQIPFAMQMAYRFNGIGVTQNVLYENQKLIANQFNSAIGKIQDSLSSTASALGKLQDVVNQNAQALNTLVKQLSSNFGAISSVLNDILSRLDPPEAEVQIDRLITGRLQSLQTYVTQQLIRAAEIRASANLAATKMSECVLGQSKRVDFCGKGYHLMSFPQSAPHGVVFLHVTYVPAQEKNFTTAPAICHDGKAHFPREGVFVSNGTHWFVTQRNFYEPQIITTDNTFVSGNCDVVIGIVNNTVYDPLQPELDSFKEELDKYFKNHTSPDVDLGDISGINASVVNIQKEIDRLNEVAKNLNESLIDLQELGKYEQYIK

SEQ ID NO: 1737 - protein, 1211 aa, Artificial Sequence
  SARS-CoV-2/Iceland/319/2020__EPI_ISL_417648 spike protein (1-1211)(K986P_V987P)
MFVFLVLLPLVSSQCVNLTTRTQLPPAYTNSFTRGVYYPDKVFRSSVLHSTQDLFLPFFSNVTWFHAIHVSGTNGTKRFDNPVLPFNDGVYFASTEKSNIIRGWIFGTTLDSKTQSLLIVNNATNVVIKVCEFQFCNDPFLGVYYHKNNKSWMESEFRVYSSANNCTFEYVSQPFLIDLEGKQGNFKNLREFVFKNIDGYFKIYSKHTPINLVRDLPQGFSALEPLVDLPIGINITRFQTLLALHRSYLTPGDSSSGWTAGAAAYYVGYLQPRTFLLKYNENGTITDAVDCALDPLSETKCTLKSFTVEKGIYQTSNFRVQPTESIVRFPNITNLCPFGEVFNATRFASVYAWNRKRISNCVADYSVLYNSASFSTFKCYGVSPTKLNDLCFTNVYADSFVIRGDEVRQIAPGQTGKIADYNYKLPDDFTGCVIAWNSNNLDSKVGGNYNYLYRLFRKSNLKPFERDISTEIYQAGSTPCNGVEGFNCYFPLQSYGFQPTNGVGYQPYRVVVLSFELLHAPATVCGPKKSTNLVKNKCVNFNFNGLTGTGVLTESNKKFLPFQQFGRDIADTTDAVRDPQTLEILDITPCSFGGVSVITPGTNTSNQVAVLYQGVNCTEVPVAIHADQLTPTWRVYSTGSNVFQTRAGCLIGAEHVNNSYECDIPIGAGICASYQTQTNSPRRARSVASQSIIAYTMSLGAENSVAYSNNSIAIPTNFTISVTTEILPVSMTKTSVDCTMYICGDSTECSNLLLQYGSFCTQLNRALTGIAVEQDKNTQEVFAQVKQIYKTPPIKDFGGFNFSQILPDPSKPSKRSFIEDLLFNKVTLADAGFIKQYGDCLGDIAARDLICAQKFNGLTVLPPLLTDEMIAQYTSALLAGTITSGWTFGAGAALQIPFAMQMAYRFNGIGVTQNVLYENQKLIANQFNSAIGKIQDSLSSTASALGKLQDVVNQNAQALNTLVKQLSSNFGAISSVLNDILSRLDPPEAEVQIDRLITGRLQSLQTYVTQQLIRAAEIRASANLAATKMSECVLGQSKRVDFCGKGYHLMSFPQSAPHGVVFLHVTYVPAQEKNFTTAPAICHDGKAHFPREGVFVSNGTHWFVTQRNFYEPQIITTDNTFVSGNCDVVIGIVNNTVYDPLQPELDSFKEELDKYFKNHTSPDVDLGDISGINASVVNIQKEIDRLNEVAKNLNESLIDLQELGKYEQYIK

SEQ ID NO: 1738 - protein, 1211 aa, Artificial Sequence
  SARS-CoV-2/Congo/94/2020__EPI_ISL_417947 spike protein (1-1211)(K986P_V987P)
MFVFLVLLPLVSSQCVNLTTRTQLPPAYTNSFTRGVYYPDKVFRSSVLHSTQDLFLPFFSNVTWFHAIHVSGTNGTKRFDNPVLPFNDGVYFASTEKSNIIRGWIFGTTLDSKTQSLLIVNNATNVVIKVCEFQFCNDPFLGVYYHKNNKSWMESEFRVYSSANNCTFEYVSQPFLMDLEGKQGNFKNLREFVFKNIDGYFKIYSKHTPINLVRDLPQGFSALEPLVDLPIGINITRFQTLLALHRSYLTPGDSSSGWTAGAAAYYVGYLQPRTFLLKYNENGTITDAVDCALDPLSETKCTLKSFTVEKGIYQTSNFRVQPTESIVRFPNITNLCPFGEVFNATRFASVYAWNRKRISNCVADYSVLYNSASFSTFKCYGVSPTKLNDLCFTNVYADSFVIRGDEVRQIAPGQTGKIADYNYKLPDDFTGCVIAWNSNNLDSKVGGNYNYLYRLFRKSNLKPFERDISTEIYQAGSTPCNGVEGFNCYFPLQSYGFQPTNGVGYQPYRVVVLSFELLHAPATVCGPKKSTNLVKNKCVNFNFNGLTGTGVLTESNKKFLPFQQFGRDIADTTDAVRDPQTLEILDITPCSFGGVSVITPGTNTSNQVAVLYQGVNCTEVPVAIHADQLTPTWRVYSTGSNVFQTRAGCLIGAEHVNNSYECDIPIGAGICASYQTQTNSPRRARSVASQSIIAYTMSLGAENSVAYSNNSIAIPTNFTISVTTEILPVSMTKTSVDCTMYICGDSTECSNLLLQYGSFCTQLNRALTGIAVEQDKNTQEVFAQVKQIYKTPPIKDFGGFNFSQILPDPSKPSKRSFIEDILFNKVTLADAGFIKQYGDCLGDIAARDLICAQKFNGLTVLPPLLTDEMIAQYTSALLAGTITSGWTFGAGAALQIPFAMQMAYRFNGIGVTQNVLYENQKLIANQFNSAIGKIQDSLSSTASALGKLQDVVNQNAQALNTLVKQLSSNFGAISSVLNDILSRLDPPEAEVQIDRLITGRLQSLQTYVTQQLIRAAEIRASANLAATKMSECVLGQSKRVDFCGKGYHLMSFPQSAPHGVVFLHVTYVPAQEKNFTTAPAICHDGKAHFPREGVFVSNGTHWFVTQRNFYEPQIITTDNTFVSGNCDVVIGIVNNTVYDPLQPELDSFKEELDKYFKNHTSPDVDLGDISGINASVVNIQKEIDRLNEVAKNLNESLIDLQELGKYEQYIK

SEQ ID NO: 1739 - protein, 1211 aa, Artificial Sequence
  SARS-CoV-2/Congo/158/2020__EPI_ISL_417950 spike protein (1-1211)(K986P_V987P)
MFVFLVLLPLVSSQCVNLTTRTQLPPAYTNSFTRGVYYPDKVFRSSVLHSTQDLFLPFFSNVTWFHAIHVSGTNGTKRFDNPVLPFNDGVYFASTEKSNIIRGWIFGTTLDSKTQSLLIVNNATNVVIKVCEFQFCNDPFLGVYYHKNNKSWMESEFRVYSSANNCTFEYVSQPFLMDLEGKQGNFKNLREFVFKNIDGYFKIYSKHTPINLVRDLPQGFSALEPLVDLPIGINITRFQTLLALHRSYLTPGDSSSGWTAGAAAYYVGYLQPRTFLLKYNENGTITDAVDCALDPLSETKCTLKSFTVEKGIYQTSNFRVQPTESIVRFPNITNLCPFGEVFNATRFASVYAWNRKRISNCVADYSVLYNSASFSTFKCYGVSPTKLNDLCFTNVYADSFVIRGDEVRQIAPGQTGKIADYNYKLPDDFTGCVIAWNSNNLDSKVGGNYNYLYRLFRKSNLKPFERDISTEIYQAGSTPCNGVEGFNCYFPLQSYGFQPTNGVGYQPYRVVVLSFELLHAPATVCGPKKSTNLVKNKCVNFNFNGLTGTGVLTESNKKFLPFQQFGRDIADTTDAVRDPQTLEILDITPCSFGGVSVITPGTNTSNQVAVLYQDVNCTEVPVAIHADQLTPTWRVYSTGSNVFQTRAGCLIGAEHVNNSYECDIPIGAGICASYQTQTNSPRRARSVASQSIIAYTMSLGAENSVAYSNNSIAIPTNFTISVTTEILPVSMTKTSVDCTMYICGDSTECSNLLLQYGSFCTQLNRALTGIAVEQDKNTQEVFAQVKQIYKTPPIKDFGGFNFSQILPDPSKPSKRSFIEDLLFNKVTLADAGFIKQYGDCLGDIAARDLICAQKFNGLTVLPPLLTDEMIAQYTSALLAGTITSGWTFGAGAALQIPFAMQMAYRFNGIGVTQNVLYENQKLIANQFNSAIGKIQDSLSSTASALGKLQDVVNQNAQALNTLVKQLSSNFGAISSVLNDILSRLDPPEAEVQIDRLITGRLQSLQTYVTQQLIRAAEIRASANLAATKMSECVLGQSKRVDFCGKGYHLMSFPQSAPHGVVFLHVTYVPAQEKNFTTAPAICHDGKAHFPREGVFVSNGTHWFVTQRNFYEPQIITTDNTFLSGNCDVVIGIVNNTVYDPLQPELDSFKEELDKYFKNHTSPDVDLGDISGINASVVNIQKEIDRLNEVAKNLNESLIDLQELGKYEQYIK

SEQ ID NO: 1740 - protein, 1211 aa, Artificial Sequence
  SARS-CoV-2/USA/UT-00034/2020__EPI_ISL_417977 spike protein (1-1211)(K986P_V987P)
MFVFLVLLPLVSSQCVNLTTRTQLPPAYTNSFTRGVYYPDKVFRSSVLHSTQDLFLPFFSNVTWFHAIHVSGTNGTKRFDNPVLPFNDGVYFASTEKSNIIRGWIFGTTLDSKTQSLLIVNNATNVVIKVCEFQFCNDPFLGVYYYKNNKSWMESEFRVYSSANNCTFEYVSQPFLMDLEGKQGNFKNLREFVFKNIDGYFKIYSKHTPINLVRDLPQGFSALEPLVDLPIGINITRFQTLLALHRSYLTPGDSSSGWTAGAAAYYVGYLQPRTFLLKYNENGTITDAVDCALDPLSETKCTLKSFTVEKGIYQTSNFRVQPTESIVRFPNITNLCPFGEVFNATRFASVYAWNRKRISNCVADYSVLYNSASFSTFKCYGVSPTKLNDLCFTNVYADSFVIRGDEVRQIAPGQTGKIADYNYKLPDDFTGCVIAWNSNNLDSKVGGNYNYLYRLFRKSNLKPFERDISTEIYQAGSTPCNGVEGFNCYFPLQSYGFQPTNGVGYQPYRVVVLSFELLHAPATVCGPKKSTNLVKNKCVNFNFNGLTGTGVLTESNKKFLPFQQFGRDIADTTDAVRDPQTLEILDITPCSFGGVSVITPGTNTSNQVAVLYQGVNCTEVPVAIHADQLTPTWRVYSTGSNVFQTRAGCLIGAEHVNNSYECDIPIGAGICASYQTQTNSPRRARSVASQSIIAYTMSLGAENSVAYSNNSIAIPTNFTISVTTEILPVSMTKTSVDCTMYICGDSTECSNLLLQYGSFCTQLNRALTGIAVEQDKNTQEVFAQVKQIYKTPPIKDFGGFNFSQILPDPSKPSKRSFIEDLLFNKVTLADAGFIKQYGDCLGDIAARDLICAQKFNGLTVLPPLLTDEMIAQYTSALLAGTITSGWTFGAGAALQIPFAMQMAYRFNGIGVTQNVLYENQKLIANQFNSAIGKIQDSLSSTASALGKLQDVVNQNAQALNTLVKQLSSNFGAISSVLNDILSRLDPPEAEVQIDRLITGRLQSLQTYVTQQLIRAAEIRASANLAATKMSECVLGQSKRVDFCGKGYHLMSFPQSAPHGVVFLHVTYVPAQEKNFTTAPAICHDGKAHFPREGVFVSNGTHWFVTQRNFYEPQIITTDNTFVSGNCDVVIGIVNNTVYDPLQPELDSFKEELDKYFKNHTSPDVDLGDISGINASVVNIQKEIDRLNEVAKNLNESLIDLQELGKYEQYIK

SEQ ID NO: 1741 - protein, 1211 aa, Artificial Sequence
  SARS-CoV-2/USA/UT-00033/2020__EPI_ISL_417976 spike protein (1-1211)(K986P_V987P)
MFVFLVLLPLVSSQCVNLTTRTQLPPAYTNSFTRGVYYPDKVFRSSVLHSTQDLFLPFFSNVTWFHAIHVSGTNGTKRFDNPVLPFNDGVYFASTEKSNIIRGWIFGTTLDSKTQSLLIVNNATNVVIKVCEFQFCNDPFLGVYYHKNNKSWMESEFRVYSSANNCTFEYVSQPFLMDLEGKQGNFKNLREFVFKNIDGYFKIYSKHTPINLVRDLPQGFSALEPLVDLPIGINITRFQTLLALHRSYLTPGDSSSGLTAGAAAYYVGYLQPRTFLLKYNENGTITDAVDCALDPLSETKCTLKSFTVEKGIYQTSNFRVQPTESIVRFPNITNLCPFGEVFNATRFASVYAWNRKRISNCVADYSVLYNSASFSTFKCYGVSPTKLNDLCFTNVYADSFVIRGDEVRQIAPGQTGKIADYNYKLPDDFTGCVIAWNSNNLDSKVGGNYNYLYRLFRKSNLKPFERDISTEIYQAGSTPCNGVEGFNCYFPLQSYGFQPTNGVGYQPYRVVVLSFELLHAPATVCGPKKSTNLVKNKCVNFNFNGLTGTGVLTESNKKFLPFQQFGRDIADTTDAVRDPQTLEILDITPCSFGGVSVITPGTNTSNQVAVLYQGVNCTEVPVAIHADQLTPTWRVYSTGSNVFQTRAGCLIGAEHVNNSYECDIPIGAGICASYQTQTNSPRRARSVASQSIIAYTMSLGAENSVAYSNNSIAIPTNFTISVTTEILPVSMTKTSVDCTMYICGDSTECSNLLLQYGSFCTQLNRALTGIAVEQDKNTQEVFAQVKQIYKTPPIKDFGGFNFSQILPDPSKPSKRSFIEDLLFNKVTLADAGFIKQYGDCLGDIAARDLICAQKFNGLTVLPPLLTDEMIAQYTSALLAGTITSGWTFGAGAALQIPFAMQMAYRFNGIGVTQNVLYENQKLIANQFNSAIGKIQDSLSSTASALGKLQDVVNQNAQALNTLVKQLSSNFGAISSVLNDILSRLDPPEAEVQIDRLITGRLQSLQTYVTQQLIRAAEIRASANLAATKMSECVLGQSKRVDFCGKGYHLMSFPQSAPHGVVFLHVTYVPAQEKNFTTAPAICHDGKAHFPREGVFVSNGTHWFVTQRNFYEPQIITTDNTFVSGNCDVVIGIVNNTVYDPLQPELDSFKEELDKYFKNHTSPDVDLGDISGINASVVNIQKEIDRLNEVAKNLNESLIDLQELGKYEQYIK

SEQ ID NO: 1742 - protein, 1211 aa, Artificial Sequence
  SARS-CoV-2/USA/WI-13/2020__EPI_ISL_417516 spike protein (1-1211)(K986P_V987P)
MFVFLVLLPLVSSQCVNLTTRTQLPPAYTNSFTRGVYYPDKVFRSSVLHSTQDLFLPFFSNVTWFHAIHVSGTNGTKRFDNPVLPFNDGVYFASTEKSNIIRGWIFGTTLDSKTQSLLIVNNATNVVIKVCEFQFCNDPFLGVYYHKNNKSWMESEFRVYSSANNCTFEYVSQPFLMDLEGKQGNFKNLREFVFKNIDGYFKIYSKHTPINLVRDLPQGFSALEPLVDLPIGINITRFQTLLALHRSYLTPGDSSSGWTAGAAAYYVGYLQPRTFLLKYNENGTITDAVDCALDPLSETKCTLKSFTVEKGIYQTSNFRVLPTESIVRFPNITNLCPFGEVFNATRFASVYAWNRKRISNCVADYSVLYNSASFSTFKCYGVSPTKLNDLCFTNVYADSFVIRGDEVRQIAPGQTGKIADYNYKLPDDFTGCVIAWNSNNLDSKVGGNYNYLYRLFRKSNLKPFERDISTEIYQAGSTPCNGVEGFNCYFPLQSYGFQPTNGVGYQPYRVVVLSFELLHAPATVCGPKKSTNLVKNKCVNFNFNGLTGTGVLTESNKKFLPFQQFGRDIADTTDAVRDPQTLEILDITPCSFGGVSVITPGTNTSNQVAVLYQGVNCTEVPVAIHADQLTPTWRVYSTGSNVFQTRAGCLIGAEHVNNSYECDIPIGAGICASYQTQTNSPRRARSVASQSIIAYTMSLGAENSVAYSNNSIAIPTNFTISVTTEILPVSMTKTSVDCTMYICGDSTECSNLLLQYGSFCTQLNRALTGIAVEQDKNTQEVFAQVKQIYKTPPIKDFGGFNFSQILPDPSKPSKRSFIEDLLFNKVTLADAGFIKQYGDCLGDIAARDLICAQKFNGLTVLPPLLTDEMIAQYTSALLAGTITSGWTFGAGAALQIPFAMQMAYRFNGIGVTQNVLYENQKLIANQFNSAIGKIQDSLSSTASALGKLQDVVNQNAQALNTLVKQLSSNFGAISSVLNDILSRLDPPEAEVQIDRLITGRLQSLQTYVTQQLIRAAEIRASANLAATKMSECVLGQSKRVDFCGKGYHLMSFPQSAPHGVVFLHVTYVPAQEKNFTTAPAICHDGKAHFPREGVFVSNGTHWFVTQRNFYEPQIITTDNTFVSGNCDVVIGIVNNTVYDPLQPELDSFKEELDKYFKNHTSPDVDLGDISGINASVVNIQKEIDRLNEVAKNLNESLIDLQELGKYEQYIK

SEQ ID NO: 1743 - protein, 1210 aa, Artificial Sequence
  SARS-CoV-2/India/1-27/2020__EPI_ISL_413522 spike protein (1-1210)(K985P_V986P)
MFVFLVLLPLVSSQCVNLTTRTQLPPAYTNSFTRGVYYPDKVFRSSVLHSTQDLFLPFFSNVTWFHAIHVSGTNGTKRFDNPVLPFNDGVYFASTEKSNIIRGWIFGTTLDSKTQSLLIVNNATNVVIKVCEFQFCNDPFLGVYHKNNKSWMESEFRVYSSANNCTFEYVSQPFLMDLEGKQGNFKNLREFVFKNIDGYFKIYSKHTPINLVRDLPQGFSALEPLVDLPIGINITRFQTLLALHRSYLTPGDSSSGWTAGAAAYYVGYLQPRTFLLKYNENGTITDAVDCALDPLSETKCTLKSFTVEKGIYQTSNFRVQPTESIVRFPNITNLCPFGEVFNATRFASVYAWNRKRISNCVADYSVLYNSASFSTFKCYGVSPTKLNDLCFTNVYADSFVIRGDEVIQIAPGQTGKIADYNYKLPDDFTGCVIAWNSNNLDSKVGGNYNYLYRLFRKSNLKPFERDISTEIYQAGSTPCNGVEGFNCYFPLQSYGFQPTNGVGYQPYRVVVLSFELLHAPATVCGPKKSTNLVKNKCVNFNFNGLTGTGVLTESNKKFLPFQQFGRDIADTTDAVRDPQTLEILDITPCSFGGVSVITPGTNTSNQVAVLYQDVNCTEVPVAIHADQLTPTWRVYSTGSNVFQTRAGCLIGAEHVNNSYECDIPIGAGICASYQTQTNSPRRARSVASQSIIAYTMSLGAENSVAYSNNSIAIPTNFTISVTTEILPVSMTKTSVDCTMYICGDSTECSNLLLQYGSFCTQLNRALTGIAVEQDKNTQEVFAQVKQIYKTPPIKDFGGFNFSQILPDPSKPSKRSFIEDLLFNKVTLADAGFIKQYGDCLGDIAARDLICAQKFNGLTVLPPLLTDEMIAQYTSALLAGTITSGWTFGAGAALQIPFAMQMAYRFNGIGVTQNVLYENQKLIANQFNSAIGKIQDSLSSTASALGKLQDVVNQNAQALNTLVKQLSSNFGAISSVLNDILSRLDPPEAEVQIDRLITGRLQSLQTYVTQQLIRAAEIRASANLAATKMSECVLGQSKRVDFCGKGYHLMSFPQSAPHGVVFLHVTYVPAQEKNFTTAPAICHDGKAHFPREGVFVSNGTHWFVTQRNFYEPQIITTDNTFVSGNCDVVIGIVNNTVYDPLQPELDSFKEELDKYFKNHTSPDVDLGDISGINASVVNIQKEIDRLNEVAKNLNESLIDLQELGKYEQYIK

SEQ ID NO: 1744 - protein, 1205 aa, Artificial Sequence
  SARS-CoV-2/pangolin/Guangxi/P4L/2017__EPI_ISL_410538 spike protein (1-1205)(K980P_V981P)
MFVFLFVLPLVSSQCVNLTTRTGIPPGYTNSSTRGVYYPDKVFRSSILHLTQDLFLPFFSNVTWFNTINYQGGFKKFDNPVLPFNDGVYFASTEKSNIIRGWIFGTTLDARTQSLLIVNNATNVVIKVCEFQFCTDPFLGVYYHNNNKTWVENEFRVYSSANNCTFEYISQPFLMDLEGKQGNFKNLREFVFKNVDGYFKIYSKHTPIDLVRDLPRGFAALEPLVDLPIGINITRFQTLLALHRSYLTPGNLESGWTTGAAAYYVGYLQQRTFLLSYNQNGTITDAVDCSLDPLSETKCTLKSLTVEKGIYQTSNFRVQPTISIVRFPNITNLCPFGEVFNASKFASVYAWNRKRISNCVADYSVLYNSTSFSTFKCYGVSPTKLNDLCFTNVYADSFVVKGDEVRQIAPGQTGVIADYNYKLPDDFTGCVIAWNSVKQDALTGGNYGYLYRLFRKSKLKPFERDISTEIYQAGSTPCNGQVGLNCYYPLERYGFHPTTGVNYQPFRVVVLSFELLNGPATVCGPKLSTTLVKDKCVNFNFNGLTGTGVLTTSKKQFLPFQQFGRDISDTTDAVRDPQTLEILDITPCSFGGVSVITPGTNTSNQVAVLYQDVNCTEVPMAIHAEQLTPAWRVYSAGANVFQTRAGCLVGAEHVNNSYECDIPVGAGICASYHSMSSLRSVNQRSIIAYTMSLGAENSVAYSNNSIAIPTNFTISVTTEILPVSMTKTSVDCTMYICGDSIECSNLLLQYGSFCTQLNRALTGIAVEQDKNTQEVFAQVKQIYKTPPIKDFGGFNFSQILPDPSKPSKRSFIEDLLFNKVTLADAGFIKQYGDCLGDIAARDLICAQKFNGLTVLPPLLTDEMIAQYTSALLAGTITSGWTFGAGAALQIPFAMQMAYRFNGIGVTQNVLYENQKLIANQFNSAIGKIQDSLSSTASALGKLQDVVNQNAQALNTLVKQLSSNFGAISSVLNDILSRLDPPEAEVQIDRLITGRLQSLQTYVTQQLIRAAEIRASANLAATKMSECVLGQSKRVDFCGKGYHLMSFPQSAPHGVVFLHVTYVPAQEKNFTTAPAICHEGKAHFPREGVFVSNGTHWFITQRNFYEPQIITTDNTFVSGSCDVVIGIVNNTVYDPLQPELDSFKEELDKYFKNHTSPDVDLGDISGINASVVNIQKEIDRLNEVAKNLNESPIDLQELGKYEQYIK

SEQ ID NO: 1745 - protein, 1205 aa, Artificial Sequence
  SARS-CoV-2/pangolin/Guangxi/P5L/2017__EPI_ISL_410540 spike protein (1-1205)(K980P_V981P)
MFVFLFVLPLVSSQCVNLTTRTGIPPGYTNSSTRGVYYPDKVFRSSILHLTQDLFLPFFSNVTWFNTINYQGGFKKFDNPVLPFNDGVYFASTEKSNIIRGWIFGTTLDARTQSLLIVNNATNVVIKVCEFQFCTDPFLGVYYHNNNKTWVENEFRVYSSANNCTFEYISQPFLMDLEGKQGNFKNLREFVFKNVDGYFKIYSKHTPIDLVRDLPRGFAALEPLVDLPIGINITRFQTLLALHRSYLTPGKLESGWTTGAAAYYVGYLQQRTFLLSYNQNGTITDAVDCSLDPLSETKCTLKSLTVEKGIYQTSNFRVQPTISIVRFPNITNLCPFGEVFNASKFASVYAWNRKRISNCVADYSVLYNSTSFSTFKCYGVSPTKLNDLCFTNVYADSFVVKGDEVRQIAPGQTGVIADYNYKLPDDFTGCVIAWNSVKQDALTGGNYGYLYRLFRKSKLKPFERDISTEIYQAGSTPCNGQVGLNCYYPLERYGFHPTTGVNYQPFRVVVLSFELLNGPATVCGPKLSTTLVKDKCVNFNFNGLTGTGVLTTSKKQFLPFQQFGRDISDTTDAVRDPQTLEILDITPCSFGGVSVITPGTNTSNQVAVLYQDVNCTEVPMAIHAEQLTPAWRVYSAGANVFQTRAGCLVGAEHVNNSYECDIPVGAGICASYHSMSSFRSVNQRSIIAYTMSLGAENSVAYSNNSIAIPTNFTISVTTEILPVSMTKTSVDCTMYICGDSIECSNLLLQYGSFCTQLNRALTGIAVEQDKNTQEVFAQVKQIYKTPPIKDFGGFNFSQILPDPSKPSKRSFIEDLLFNKVTLADAGFIKQYGDCLGDIAARDLICAQKFNGLTVLPPLLTDEMIAQYTSALLAGTITSGWTFGAGAALQIPFAMQMAYRFNGIGVTQNVLYENQKLIANQFNSAIGKIQDSLSSTASALGKLQDVVNQNAQALNTLVKQLSSNFGAISSVLNDILSRLDPPEAEVQIDRLITGRLQSLQTYVTQQLIRAAEIRASANLAATKMSECVLGQSKRVDFCGKGYHLMSFPQSAPHGVVFLHVTYVPAQEKNFTTAPAICHEGKAHFPREGVFVSNGTHWFITQRNFYEPQIITTDNTFVSGSCDVVIGIVNNTVYDPLQPELDSFKEELDKYFKNHTSPDVDLGDISGINASVVNIQKEIDRLNEVAKNLNESLIDLQELGKYEQYIK

SEQ ID NO: 1746 - protein, 1205 aa, Artificial Sequence
  SARS-CoV-2/pangolin/Guangxi/P5E/2017__EPI_ISL_410541 spike protein (1-1205)(K980P_V981P)
MFVFLFVLPLVSSQCVNLTTRTGIPPGYTNSSTRGVYYPDKVFRSSILHLTQDLFLPFFSNVTWFNTITYQGGSKKFDNPVLPFNDGVYFASTEKSNIIRGWIFGTTLDARTQSLLIVNNATNVVIKVCEFQFCTDPFLGVYYHNNNKTWVENEFRVYSSANNCTFEYISQPFLMDLEGKQGNFKNLREFVFKNVDGYFKIYSKHTPIDLVRDLPRGFAALEPLVDLPIGINITRFQTLLALHRSYLTPGKLESGWTTGAAAYYVGYLQQRTFLLSYNQNGTITDAVDCSLDPLSETKCTLKSLTVEKGIYQTSNFRVQPTISIVRFPNITNLCPFGEVFNASKFASVYAWNRKRISNCVADYSVLYNSTSFSTFKCYGVSPTKLNDLCFTNVYADSFVVKGDEVRQIAPGQTGVIADYNYKLPDDFTGCVIAWNSVKQDALTGDNYGYLYRLFRKSKLKPFERDISTEIYQAGSTPCNGQVGLNCYYPLERYGFHPTTGVNYQPFRVVVLSFELLNGPATVCGPKLSTTLVKDKCVNFNFNGLTGTGVLTTSKKQFLPFQQFGRDISDTTDAVRDPQTLEILDITPCSFGGVSVITPGTNTSNQVAVLYQDVNCTEVPMAIHAEQLTPAWRVYSAGANVFQTRAGCLVGAEHVNNSYECDIPVGAGICASYHSMSSFRSVNQRSIIAYTMSLGAENSVAYSNNSIAIPTNFTISVTTEILPVSMTKTSVDCTMYICGDSIECSNLLLQYGSFCTQLNRALTGIAVEQDKNTQEVFAQVKQIYKTPPIKDFGGFNFSQILPDPSKPSKRSFIEDLLFNKVTLADAGFIKQYGDCLGDIAARDLICAQKFNGLTVLPPLLTDEMIAQYTSALLAGTITSGWTFGAGAALQIPFAMQMAYRFNGIGVTQNVLYENQKLIANQFNSAIGKIQDSLSSTASALGKLQDVVNQNAQALNTLVKQLSSNFGAISSVLNDILSRLDPPEAEVQIDRLITGRLQSLQTYVTQQLIRAAEIRASANLAATKMSECVLGQSKRVDFCGKGYHLMSFPQSAPHGVVFLHVTYVPAQEKNFTTAPAICHEGKAHFPREGVFVSNGTHWFITQRNFYEPQIITTDNTFVSGSCDVVIGIVNNTVYDPLQPELDSFKEELDKYFKNHTSPDVDLGDISGINASVVNIQKEIDRLNEVAKNLNESLIDLQELGKYEQYIK

SEQ ID NO: 1747 - protein, 1203 aa, Artificial Sequence
  SARS-CoV-2/pangolin/Guangxi/P1E/2017__EPI_ISL_410539 spike protein (1-1203)(K978P_V979P)
MFVFLFVLPLVSSQCVNLTTRTGIQPGYTNSSTRGVYYPDKVFRSSILHLTQDLFLPFFSNVTWFNTINYQGGFKKFDNPVLPFNDGVYFASTEKSNIIRGWIFGTTLDARTQSLLIVNNATNVVIKVCEFQFCTDPFLGVYYHNNNKTWVENEFRVYSSANNCTFEYISQPFLMDLEGKQGNFKNLREFVFKNVDGYFKIYSKHTPIDLVRDLPRGFAALEPLVDLPIGINITRFQTLLALHRSYLTPGKLESGWTTGAAAYYVGYLQQRTFLLSYNQNGTITDAVDCSLDPLSETKCTLKSLTVEKGIYQTSNFRVQPTISIVRFPNITNLCPFGEVFNASKFASVYAWNRKRISNCVADYSVLYNSTSFSTFKCYGVSPTKLNDLCFTNVYADSFVVKGDEVRQIAPGQTGVIADYNYKLPDDFTGCVIAWNSVKQDALTGGNYLYRLFRKSKLKPFERDISTEIYQAGSTPCNGQVGLNCYYPLERYGFHPTTGVNYQPFRVVVLSFELLNGPATVCGPKLSTTLVKDKCVNFNFNGLTGTGVLTTSKKQFLPFQQFGRDISDTTDAVRDPQTLEILDITPCSFGGVSVITPGTNTSNQVAVLYQDVNCTEVPMAIHAEQLTPAWRVYSAGANVFQTRAGCLVGAEHVNNSYECDIPVGAGICASYHSMSSLRSVNQRSIIAYTMSLGAENSVAYSNNSIAIPTNFTISVTTEILPVSMTKTSVDCTMYICGDSIECSNLLLQYGSFCTQLNRALTGIAVEQDKNTQEVFAQVKQIYKTPPIKDFGGFNFSQILPDPSKPSKRSFIEDLLFNKVTLADAGFIKQYGDCLGDIAARDLICAQKFNGLTVLPPLLTDEMIAQYTSALLAGTITSGWTFGAGAALQIPFAMQMAYRFNGIGVTQNVLYENQKLIANQFNSAIGKIQDSLSSTASALGKLQDVVNQNAQALNTLVKQLSSNFGAISSVLNDILSRLDPPEAEVQIDRLITGRLQSLQTYVTQQLIRAAEIRASANLAATKMSECVLGQSKRVDFCGKGYHLMSFPQSAPHGVVFLHVTYVPAQEKNFTTAPAICHEGKAHFPREGVFVSNGTHWFITQRNFYEPQIITTDNTFVSGSCDVVIGIVNNTVYDPLQPELDSFKEELDKYFKNHTSPDVDLGDISGINASVVNIQKEIDRLNEVAKNLNESLIDLQELGKYEQYIK

SEQ ID NO: 1748 - protein, 1211 aa, Artificial Sequence
  SARS-CoV-2/Wuhan/WIV05/2019__EPI_ISL_402128 spike protein (1-1211)(K986P_V987P_T887W_A1020W)
MFVFLVLLPLVSSQCVNLTTRTQLPPAYTNSFTRGVYYPDKVFRSSVLHSTQDLFLPFFSNVTWFHAIHVSGTNGTKRFDNPVLPFNDGVYFASTEKSNIIRGWIFGTTLDSKTQSLLIVNNATNVVIKVCEFQFCNDPFLGVYYHKNNKSWMESEFRVYSSANNCTFEYVSQPFLMDLEGKQGNFKNLREFVFKNIDGYFKIYSKHTPINLVRDLPQGFSALEPLVDLPIGINITRFQTLLALHRSYLTPGDSSSGWTAGAAAYYVGYLQPRTFLLKYNENGTITDAVDCALDPLSETKCTLKSFTVEKGIYQTSNFRVQPTESIVRFPNITNLCPFGEVFNATRFASVYAWNRKRISNCVADYSVLYNSASFSTFKCYGVSPTKLNDLCFTNVYADSFVIRGDEVRQIAPGQTGKIADYNYKLPDDFTGCVIAWNSNNLDSKVGGNYNYLYRLFRKSNLKPFERDISTEIYQAGSTPCNGVEGFNCYFPLQSYGFQPTNGVGYQPYRVVVLSFELLHAPATVCGPKKSTNLVKNKCVNFNFNGLTGTGVLTESNKKFLPFQQFGRDIADTTDAVRDPQTLEILDITPCSFGGVSVITPGTNTSNQVAVLYQDVNCTEVPVAIHADQLTPTWRVYSTGSNVFQTRAGCLIGAEHVNNSYECDIPIGAGICASYQTQTNSPRRARSVASQSIIAYTMSLGAENSVAYSNNSIAIPTNFTISVTTEILPVSMTKTSVDCTMYICGDSTECSNLLLQYGSFCTQLNRALTGIAVEQDKNTQEVFAQVKQIYKTPPIKDFGGFNFSQILPDPSKPSKRSFIEDLLFNKVTLADAGFIKQYGDCLGDIAARDLICAQKFNGLTVLPPLLTDEMIAQYTSALLAGTITSGWWFGAGAALQIPFAMQMAYRFNGIGVTQNVLYENQKLIANQFNSAIGKIQDSLSSTASALGKLQDVVNQNAQALNTLVKQLSSNFGAISSVLNDILSRLDPPEAEVQIDRLITGRLQSLQTYVTQQLIRAAEIRWSANLAATKMSECVLGQSKRVDFCGKGYHLMSFPQSAPHGVVFLHVTYVPAQEKNFTTAPAICHDGKAHFPREGVFVSNGTHWFVTQRNFYEPQIITTDNTFVSGNCDVVIGIVNNTVYDPLQPELDSFKEELDKYFKNHTSPDVDLGDISGINASVVNIQKEIDRLNEVAKNLNESLIDLQELGKYEQYIK

SEQ ID NO: 1749 - protein, 1207 aa, Artificial Sequence
  SARS-CoV-2/bat/Yunnan/RaTG13/2013__EPI_ISL_402131 spike protein (1-1207)(K982P_V983P_T883W_A1016W)
MFVFLVLLPLVSSQCVNLTTRTQLPPAYTNSSTRGVYYPDKVFRSSVLHLTQDLFLPFFSNVTWFHAIHVSGTNGIKRFDNPVLPFNDGVYFASTEKSNIIRGWIFGTTLDSKTQSLLIVNNATNVVIKVCEFQFCNDPFLGVYYHKNNKSWMESEFRVYSSANNCTFEYVSQPFLMDLEGKQGNFKNLREFVFKNIDGYFKIYSKHTPINLVRDLPPGFSALEPLVDLPIGINITRFQTLLALHRSYLTPGDSSSGWTAGAAAYYVGYLQPRTFLLKYNENGTITDAVDCALDPLSETKCTLKSFTVEKGIYQTSNFRVQPTDSIVRFPNITNLCPFGEVFNATTFASVYAWNRKRISNCVADYSVLYNSTSFSTFKCYGVSPTKLNDLCFTNVYADSFVITGDEVRQIAPGQTGKIADYNYKLPDDFTGCVIAWNSKHIDAKEGGNFNYLYRLFRKANLKPFERDISTEIYQAGSKPCNGQTGLNCYYPLYRYGFYPTDGVGHQPYRVVVLSFELLNAPATVCGPKKSTNLVKNKCVNFNFNGLTGTGVLTESNKKFLPFQQFGRDIADTTDAVRDPQTLEILDITPCSFGGVSVITPGTNASNQVAVLYQDVNCTEVPVAIHADQLTPTWRVYSTGSNVFQTRAGCLIGAEHVNNSYECDIPIGAGICASYQTQTNSRSVASQSIIAYTMSLGAENSVAYSNNSIAIPTNFTISVTTEILPVSMTKTSVDCTMYICGDSTECSNLLLQYGSFCTQLNRALTGIAVEQDKNTQEVFAQVKQIYKTPPIKDFGGFNFSQILPDPSKPSKRSFIEDLLFNKVTLADAGFIKQYGDCLGDIAARDLICAQKFNGLTVLPPLLTDEMIAQYTSALLAGTITSGWWFGAGAALQIPFAMQMAYRFNGIGVTQNVLYENQKLIANQFNSAIGKIQDSLSSTASALGKLQDVVNQNAQALNTLVKQLSSNFGAISSVLNDILSRLDPPEAEVQIDRLITGRLQSLQTYVTQQLIRAAEIRWSANLAATKMSECVLGQSKRVDFCGKGYHLMSFPQSAPHGVVFLHVTYVPAQEKNFTTAPAICHDGKAHFPREGVFVSNGTHWFVTQRNFYEPQIITTDNTFVSGSCDVVIGIVNNTVYDPLQPELDSFKEELDKYFKNHTSPDVDLGDISGINASVVNIQKEIDRLNEVAKNLNESLIDLQELGKYEQYIK

SEQ ID NO: 1750 - protein, 1211 aa, Artificial Sequence
  SARS-CoV-2/Wuhan/HBCDC-HB-01/2019__EPI_ISL_402132 spike protein (1-1211)(K986P_V987P_T887W_A1020W)
MFVFLVLLPLVSSQCVNLTTRTQLPPAYTNSITRGVYYPDKVFRSSVLHSTQDLFLPFFSNVTWFHAIHVSGTNGTKRFDNPVLPFNDGVYFASTEKSNIIRGWIFGTTLDSKTQSLLIVNNATNVVIKVCEFQFCNDPFLGVYYHKNNKSWMESEFRVYSSANNCTFEYVSQPFLMDLEGKQGNFKNLREFVFKNIDGYFKIYSKHTPINLVRDLPQGFSALEPLVDLPIGINITRFQTLLALHRSYLTPGDSSSGWTAGAAAYYVGYLQPRTFLLKYNENGTITDAVDCALDPLSETKCTLKSFTVEKGIYQTSNFRVQPTESIVRFPNITNLCPFGEVFNATRFASVYAWNRKRISNCVADYSVLYNSASFSTFKCYGVSPTKLNDLCFTNVYADSFVIRGDEVRQIAPGQTGKIADYNYKLPDDFTGCVIAWNSNNLDSKVGGNYNYLYRLFRKSNLKPFERDISTEIYQAGSTPCNGVEGFNCYFPLQSYGFQPTNGVGYQPYRVVVLSFELLHAPATVCGPKKSTNLVKNKCVNFNFNGLTGTGVLTESNKKFLPFQQFGRDIADTTDAVRDPQTLEILDITPCSFGGVSVITPGTNTSNQVAVLYQDVNCTEVPVAIHADQLTPTWRVYSTGSNVFQTRAGCLIGAEHVNNSYECDIPIGAGICASYQTQTNSPRRARSVASQSIIAYTMSLGAENSVAYSNNSIAIPTNFTISVTTEILPVSMTKTSVDCTMYICGDSTECSNLLLQYGSFCTQLNRALTGIAVEQDKNTQEVFAQVKQIYKTPPIKDFGGFNFSQILPDPSKPSKRSFIEDLLFNKVTLADAGFIKQYGDCLGDIAARDLICAQKFNGLTVLPPLLTDEMIAQYTSALLAGTITSGWWFGAGAALQIPFAMQMAYRFNGIGVTQNVLYENQKLIANQFNSAIGKIQDSLSSTASALGKLQDVVNQNAQALNTLVKQLSSNFGAISSVLNDILSRLDPPEAEVQIDRLITGRLQSLQTYVTQQLIRAAEIRWSANLAATKMSECVLGQSKRVDFCGKGYHLMSFPQSAPHGVVFLHVTYVPAQEKNFTTAPAICHDGKAHFPREGVFVSNGTHWFVTQRNFYEPQIITTDNTFVSGNCDVVIGIVNNTVYDPLQPELDSFKEELDKYFKNHTSPDVDLGDISGINASVVNIQKEIDRLNEVAKNLNESLIDLQELGKYEQYIK

SEQ ID NO: 1751 - protein, 1211 aa, Artificial Sequence
  SARS-CoV-2/Guangdong/20SF028/2020__EPI_ISL_403936 spike protein (1-1211)(K986P_V987P_T887W_A1020W)
MFVFLVLLPLVSSQCVNLTTRTQLPPAYTNSFTRGVYYPDKVFRSSVLYSTQDLFLPFFSNVTWFHAIHVSGTNGTKRFDNPVLPFNDGVYFASTEKSNIIRGWIFGTTLDSKTQSLLIVNNATNVVIKVCEFQFCNDPFLGVYYHKNNKSWMESEFRVYSSANNCTFEYVSQPFLMDLEGKQGNFKNLREFVFKNIDGYFKIYSKHTPINLVRDLPQGFSALEPLVDLPIGINITRFQTLLALHRSYLTPGDSSSGWTAGAAAYYVGYLQPRTFLLKYNENGTITDAVDCALDPLSETKCTLKSFTVEKGIYQTSNFRVQPTESIVRFPNITNLCPFGEVFNATRFASVYAWNRKRISNCVADYSVLYNSASFSTFKCYGVSPTKLNDLCFTNVYADSFVIRGDEVRQIAPGQTGKIADYNYKLPDDFTGCVIAWNSNNLDSKVGGNYNYLYRLFRKSNLKPFERDISTEIYQAGSTPCNGVEGFNCYFPLQSYGFQPTNGVGYQPYRVVVLSFELLHAPATVCGPKKSTNLVKNKCVNFNFNGLTGTGVLTESNKKFLPFQQFGRDIADTTDAVRDPQTLEILDITPCSFGGVSVITPGTNTSNQVAVLYQDVNCTEVPVAIHADQLTPTWRVYSTGSNVFQTRAGCLIGAEHVNNSYECDIPIGAGICASYQTQTNSPRRARSVASQSIIAYTMSLGAENSVAYSNNSIAIPTNFTISVTTEILPVSMTKTSVDCTMYICGDSTECSNLLLQYGSFCTQLNRALTGIAVEQDKNTQEVFAQVKQIYKTPPIKDFGGFNFSQILPDPSKPSKRSFIEDLLFNKVTLADAGFIKQYGDCLGDIAARDLICAQKFNGLTVLPPLLTDEMIAQYTSALLAGTITSGWWFGAGAALQIPFAMQMAYRFNGIGVTQNVLYENQKLIANQFNSAIGKIQDSLSSTASALGKLQDVVNQNAQALNTLVKQLSSNFGAISSVLNDILSRLDPPEAEVQIDRLITGRLQSLQTYVTQQLIRAAEIRWSANLAATKMSECVLGQSKRVDFCGKGYHLMSFPQSAPHGVVFLHVTYVPAQEKNFTTAPAICHDGKAHFPREGVFVSNGTHWFVTQRNFYEPQIITTDNTFVSGNCDVVIGIVNNTVYDPLQPELDSFKEELDKYFKNHTSPDVDLGDISGINASVVNIQKEIDRLNEVAKNLNESLIDLQELGKYEQYIK

SEQ ID NO: 1752 - protein, 1211 aa, Artificial Sequence
  SARS-CoV-2/Shenzhen/SZTH-001/2020__EPI_ISL_406592 spike protein (1-1211)(K986P_V987P_T887W_A1020W)
MFVFLVLLPLVSSQCVNLTTRTQLPPAYTNSFTRGVYYPDKVFRSSVLHSTQDLFLPFFSNVTWFHAIHVSGTNGTKRFDNPVLPFNDGVYFASTEKSNIIRGWIFGTTLDSKTQSLLIVNNATNVVIKVCEFQFCNDPFLGVYYHKNNKSWMESEFRVYSSANNCTFEYVSQPFLMDLEGKQGNFKNLREFVFKNIDGYFKIYSKHTPINLVRDLPQGFSALEPLVDLPIGINITRFQTLLALHRSYLTPGDSSSGWTAGAAAYYVGYLQPRTFLLKYNENGTITDAVDCALDPLSETKCTLKSFTVEKGIYQTSNFRVQPTESIVRFPNITNLCPFGEVFNATRFASVYAWNRKRISNCVADYSVLYNSASFSTFKCYGVSPTKLNDLCFTNVYADSFVIRGDEVRQIAPGQTGKIADYNYKLPDDFTGCVIAWNSNNLDSKVGGNYNYLYRLFRKSNLKPFERDISTEIYQAGSTPCNGVEGFNCYFPLQSYGFQPTNGVGYQPYRVVVLSFELLHAPATVCGPKKSTNLVKNKCVNFNFNGLTGTGVLTESNKKFLPFQQFGRDIADTTDAVRDPQTLEILDITPCSFGGVSVITPGTNTSNQVAVLYQDVNCTEVPVAIHADQLTPTWRVYSTGSNVFQTRAGCLIGAEHVNNSYECDIPIGAGICASYQTQTNSPRRARSVASQSIIAYTMSLGAENSVAYSNNSIAIPTNFTISVTTEILPVSMTKTSVDCTMYICGDSTECSNLLLQYGSFCTQLNRALTGIAVEQDKNTQEVFAQVKQIYKTPPIKDFGGFNFSQILPDPSKPSKRSFIEDLLFNKVTLADAGFIKQYGDCLGDIAARDLICAQKFNGLTVLPPLLTDEMIAQYTSALLAGTITSGWWFGAGAALQIPFAMQMAYRFNGIGVTQNVLYENQKLIANQFNSAIGKIQDSLSSTASALGKLQDVVNQNAQALNTLVKQLSSNFGAISSVLNDILSRLDPPEAEVQIDRLITGRLQSLQTYVTQQLIRAAEIRWSANLAATKMSECVLGQSKRVDFCGKGYHLMSFPQSAPHGVVFLHVTYVPAQEKNFTTAPAICHDGKAHFPREGVFVSNGTHWFVTQRNFYEPQIITTDNTFVSGNCDVLIGIVNNTVYDPLQPELDSFKEELDKYFKNHTSPDVDLGDISGINASVVNIQKEIDRLNEVAKNLNESLIDLQELGKYEQYIK

SEQ ID NO: 1753 - protein, 1211 aa, Artificial Sequence
  SARS-CoV-2/Shenzhen/SZTH-004/2020__EPI_ISL_406595 spike protein (1-1211)(K986P_V987P_T887W_A1020W)
MFVFLVLLPLVSSQCVNLTTRTQLPPAYTNSFTRGVYYPDKVFRSSVLHSTQDLFLPFFSNVTWFHAIHVSGTNGTKRFDNPVLPFNDGVYFASTEKSNIIRGWIFGTTLDSKTQSLLIVNNATNVVIKVCEFQFCNDPFLGVYYHKNNKSWMESEFRVYSSANNCTFEYVSQPFLMDLEGKQGNFKNLREFVFKNIDGYFKIYSKHTPINLVRDLPQGFSALEPLVDLPIGINITRFQTLLALHRSYLTPGDSSSGWTAGAAAYYVGYLQPRTFLLKYNENGTITDAVDCALDPLSETKCTLKSFTVEKGIYQTSNFRVQPTESIVRFPNITNLCPFGEVFNATRFASVYAWDRKRISNCVAYYSVLYNSASFSTFKCYGVSPTKLNDLCFTNVYADSFVIRGDEVRQIAPGQTGKIADYNYKLPDDFTGCVIAWNSNNLDSKVGGNYNYLYRLFRKSNLKPFERDISTEIYQAGSTPCNGVEGFNCYFPLQSYGFQPTNGVGYQPYRVVVLSFELLHAPATVCGPKKSTNLVKNKCVNFNFNGLTGTGVLTESNKKFLPFQQFGRDIADTTDAVRDPQTLEILDITPCSFGGVSVITPGTNTSNQVAVLYQDVNCTEVPVAIHADQLTPTWRVYSTGSNVFQTRAGCLIGAEHVNNSYECDIPIGAGICASYQTQTNSPRRARSVASQSIIAYTMSLGAENSVAYSNNSIAIPTNFTISVTTEILPVSMTKTSVDCTMYICGDSTECSNLLLQYGSFCTQLNRALTGIAVEQDKNTQEVFAQVKQIYKTPPIKDFGGFNFSQILPDPSKPSKRSFIEDLLFNKVTLADAGFIKQYGDCLGDIAARDLICAQKFNGLTVLPPLLTDEMIAQYTSALLAGTITSGWWFGAGAALQIPFAMQMAYRFNGIGVTQNVLYENQKLIANQFNSAIGKIQDSLSSTASALGKLQDVVNQNAQALNTLVKQLSSNFGAISSVLNDILSRLDPPEAEVQIDRLITGRLQSLQTYVTQQLIRAAEIRWSANLAATKMSECVLGQSKRVDFCGKGYHLMSFPQSAPHGVVFLHVTYVPAQEKNFTTAPAICHDGKAHFPREGVFVSNGTHWFVTQRNFYEPQIITTDNTFVSGNCDVVIGIVNNTVYDPLQPELDSFKEELDKYFKNHTSPDVDLGDISGINASVVNIQKEIDRLNEVAKNLNESLIDLQELGKYEQYIK

SEQ ID NO: 1754 - protein, 1211 aa, Artificial Sequence
  SARS-CoV-2/France/IDF0372/2020__EPI_ISL_406596 spike protein (1-1211)(K986P_V987P_T887W_A1020W)
MFVFLVLLPLVSSQCVNLTTRTQLPPAYTNSFTRGVYYPDKVFRSSVLHSTQDLFLPFFSNVTWFHAIHVSGTNGTKRFDNPVLPFNDGVYFASTEKSNIIRGWIFGTTLDSKTQSLLIVNNATNVVIKVCEFQFCNDPFLGVYYHKNNKSWMESEFRVYSSANNCTFEYVSQPFLMDLEGKQGNFKNLREFVFKNIDGYFKIYSKHTPINLVRDLPQGFSALEPLVDLPIGINITRFQTLLALHRSYLTPGDSSSGWTAGAAAYYVGYLQPRTFLLKYNENGTITDAVDCALDPLSETKCTLKSFTVEKGIYQTSNFRVQPTESIVRFPNITNLCPFGEVFNATRFASVYAWNRKRISNCVADYSFLYNSASFSTFKCYGVSPTKLNDLCFTNVYADSFVIRGDEVRQIAPGQTGKIADYNYKLPDDFTGCVIAWNSNNLDSKVGGNYNYLYRLFRKSNLKPFERDISTEIYQAGSTPCNGVEGFNCYFPLQSYGFQPTNGVGYQPYRVVVLSFELLHAPATVCGPKKSTNLVKNKCVNFNFNGLTGTGVLTESNKKFLPFQQFGRDIADTTDAVRDPQTLEILDITPCSFGGVSVITPGTNTSNQVAVLYQDVNCTEVPVAIHADQLTPTWRVYSTGSNVFQTRAGCLIGAEHVNNSYECDIPIGAGICASYQTQTNSPRRARSVASQSIIAYTMSLGAENSVAYSNNSIAIPTNFTISVTTEILPVSMTKTSVDCTMYICGDSTECSNLLLQYGSFCTQLNRALTGIAVEQDKNTQEVFAQVKQIYKTPPIKDFGGFNFSQILPDPSKPSKRSFIEDLLFNKVTLADAGFIKQYGDCLGDIAARDLICAQKFNGLTVLPPLLTDEMIAQYTSALLAGTITSGWWFGAGAALQIPFAMQMAYRFNGIGVTQNVLYENQKLIANQFNSAIGKIQDSLSSTASALGKLQDVVNQNAQALNTLVKQLSSNFGAISSVLNDILSRLDPPEAEVQIDRLITGRLQSLQTYVTQQLIRAAEIRWSANLAATKMSECVLGQSKRVDFCGKGYHLMSFPQSAPHGVVFLHVTYVPAQEKNFTTAPAICHDGKAHFPREGVFVSNGTHWFVTQRNFYEPQIITTDNTFVSGNCDVVIGIVNNTVYDPLQPELDSFKEELDKYFKNHTSPDVDLGDISGINASVVNIQKEIDRLNEVAKNLNESLIDLQELGKYEQYIK

SEQ ID NO: 1755 - protein, 1211 aa, Artificial Sequence
  SARS-CoV-2/Australia/VIC01/2020__EPI_ISL_406844 spike protein (1-1211)(K986P_V987P_T887W_A1020W)
MFVFLVLLPLVSSQCVNLTTRTQLPPAYTNSFTRGVYYPDKVFRSSVLHSTQDLFLPFFSNVTWFHAIHVSGTNGTKRFDNPVLPFNDGVYFASTEKSNIIRGWIFGTTLDSKTQSLLIVNNATNVVIKVCEFQFCNDPFLGVYYHKNNKSWMESEFRVYSSANNCTFEYVSQPFLMDLEGKQGNFKNLREFVFKNIDGYFKIYSKHTPINLVRDLPQGFSALEPLVDLPIGINITRFQTLLALHRRYLTPGDSSSGWTAGAAAYYVGYLQPRTFLLKYNENGTITDAVDCALDPLSETKCTLKSFTVEKGIYQTSNFRVQPTESIVRFPNITNLCPFGEVFNATRFASVYAWNRKRISNCVADYSVLYNSASFSTFKCYGVSPTKLNDLCFTNVYADSFVIRGDEVRQIAPGQTGKIADYNYKLPDDFTGCVIAWNSNNLDSKVGGNYNYLYRLFRKSNLKPFERDISTEIYQAGSTPCNGVEGFNCYFPLQSYGFQPTNGVGYQPYRVVVLSFELLHAPATVCGPKKSTNLVKNKCVNFNFNGLTGTGVLTESNKKFLPFQQFGRDIADTTDAVRDPQTLEILDITPCSFGGVSVITPGTNTSNQVAVLYQDVNCTEVPVAIHADQLTPTWRVYSTGSNVFQTRAGCLIGAEHVNNSYECDIPIGAGICASYQTQTNSPRRARSVASQSIIAYTMSLGAENSVAYSNNSIAIPTNFTISVTTEILPVSMTKTSVDCTMYICGDSTECSNLLLQYGSFCTQLNRALTGIAVEQDKNTQEVFAQVKQIYKTPPIKDFGGFNFSQILPDPSKPSKRSFIEDLLFNKVTLADAGFIKQYGDCLGDIAARDLICAQKFNGLTVLPPLLTDEMIAQYTSALLAGTITSGWWFGAGAALQIPFAMQMAYRFNGIGVTQNVLYENQKLIANQFNSAIGKIQDSLSSTASALGKLQDVVNQNAQALNTLVKQLSSNFGAISSVLNDILSRLDPPEAEVQIDRLITGRLQSLQTYVTQQLIRAAEIRWSANLAATKMSECVLGQSKRVDFCGKGYHLMSFPQSAPHGVVFLHVTYVPAQEKNFTTAPAICHDGKAHFPREGVFVSNGTHWFVTQRNFYEPQIITTDNTFVSGNCDVVIGIVNNTVYDPLQPELDSFKEELDKYFKNHTSPDVDLGDISGINASVVNIQKEIDRLNEVAKNLNESLIDLQELGKYEQYIK

SEQ ID NO: 1756 - protein, 1211 aa, Artificial Sequence
  SARS-CoV-2/Germany/BavPat1/2020__EPI_ISL_406862 spike protein (1-1211)(K986P_V987P_T887W_A1020W)
MFVFLVLLPLVSSQCVNLTTRTQLPPAYTNSFTRGVYYPDKVFRSSVLHSTQDLFLPFFSNVTWFHAIHVSGTNGTKRFDNPVLPFNDGVYFASTEKSNIIRGWIFGTTLDSKTQSLLIVNNATNVVIKVCEFQFCNDPFLGVYYHKNNKSWMESEFRVYSSANNCTFEYVSQPFLMDLEGKQGNFKNLREFVFKNIDGYFKIYSKHTPINLVRDLPQGFSALEPLVDLPIGINITRFQTLLALHRSYLTPGDSSSGWTAGAAAYYVGYLQPRTFLLKYNENGTITDAVDCALDPLSETKCTLKSFTVEKGIYQTSNFRVQPTESIVRFPNITNLCPFGEVFNATRFASVYAWNRKRISNCVADYSVLYNSASFSTFKCYGVSPTKLNDLCFTNVYADSFVIRGDEVRQIAPGQTGKIADYNYKLPDDFTGCVIAWNSNNLDSKVGGNYNYLYRLFRKSNLKPFERDISTEIYQAGSTPCNGVEGFNCYFPLQSYGFQPTNGVGYQPYRVVVLSFELLHAPATVCGPKKSTNLVKNKCVNFNFNGLTGTGVLTESNKKFLPFQQFGRDIADTTDAVRDPQTLEILDITPCSFGGVSVITPGTNTSNQVAVLYQGVNCTEVPVAIHADQLTPTWRVYSTGSNVFQTRAGCLIGAEHVNNSYECDIPIGAGICASYQTQTNSPRRARSVASQSIIAYTMSLGAENSVAYSNNSIAIPTNFTISVTTEILPVSMTKTSVDCTMYICGDSTECSNLLLQYGSFCTQLNRALTGIAVEQDKNTQEVFAQVKQIYKTPPIKDFGGFNFSQILPDPSKPSKRSFIEDLLFNKVTLADAGFIKQYGDCLGDIAARDLICAQKFNGLTVLPPLLTDEMIAQYTSALLAGTITSGWWFGAGAALQIPFAMQMAYRFNGIGVTQNVLYENQKLIANQFNSAIGKIQDSLSSTASALGKLQDVVNQNAQALNTLVKQLSSNFGAISSVLNDILSRLDPPEAEVQIDRLITGRLQSLQTYVTQQLIRAAEIRWSANLAATKMSECVLGQSKRVDFCGKGYHLMSFPQSAPHGVVFLHVTYVPAQEKNFTTAPAICHDGKAHFPREGVFVSNGTHWFVTQRNFYEPQIITTDNTFVSGNCDVVIGIVNNTVYDPLQPELDSFKEELDKYFKNHTSPDVDLGDISGINASVVNIQKEIDRLNEVAKNLNESLIDLQELGKYEQYIK

SEQ ID NO: 1757 - protein, 1211 aa, Artificial Sequence
  SARS-CoV-2/Wuhan/HBCDC-HB-02/2020__EPI_ISL_412978 spike protein (1-1211)(K986P_V987P_T887W_A1020W)
MFVFLVLLPLVSSQCVNLTTRTQLPPAYTNSFTRGVYYPDKVFRSSVLHSTQDLFLPFFSNVTWFHAIHVSGTNGTKRFDNPVLPFNDGVYFASTEKSNIIRGWIFGTTLDSKTQSLLIVNNATNVVIKVCEFQFCNDPFLGVYYHKNNKSWMESEFRVYSSANNCTFEYVSQPFLMDLEGKQGNFKNLREFVFKNIDGYFKIYSKHTPINLVRDLPQGFSALEPLVDLPIGINITRFQTLLALHRSYLTPGDSSSGWTAGAAAYYVGYLQPRTFLLKYNENGTITDAVDCALDPLSETKCTLKSFTVEKGIYQTSNFRVQPTESIVRFPNITNLCPFGEVFNATRFASVYAWNRKRISNCVADYSVLYNSASFSTFKCYGVSPTKLNDLCFTNVYADSFVIRGDEVRQIAPGQTGKIADYNYKLPDDFTGCVIAWNSNNLDSKVGGNYNYLYRLFRKSNLKPFERDISTEIYQAGSTPCNGVEGFNCYFPLQSYGFQPTNGVGYQPYRVVVLSFELLHAPATVCGPKKSTNLVKNKCVNFNFNGLTGTGVLTESNKKFLPFQQFGRDIADTTDAVRDPQTLEILDITPCSFGGVSVITPGTNTSNQVAVLYQDVNCTEVPVAIHADQLTPTWRVYSTGSNVFQTRAGCLIGAEHVNNSYECDIPIGAGICASYQTQTNSPRRARSVASQSIIAYTMSLGAENSVAYSNNSIAIPTNFTISVTTEILPVSMTKTSVDCTMYICGDSTECSNFLLQYGSFCTQLNRALTGIAVEQDKNTQEVFAQVKQIYKTPPIKDFGGFNFSQILPDPSKPSKRSFIEDLLFNKVTLADAGFIKQYGDCLGDIAARDLICAQKFNGLTVLPPLLTDEMIAQYTSALLAGTITSGWWFGAGAALQIPFAMQMAYRFNGIGVTQNVLYENQKLIANQFNSAIGKIQDSLSSTASALGKLQDVVNQNAQALNTLVKQLSSNFGAISSVLNDILSRLDPPEAEVQIDRLITGRLQSLQTYVTQQLIRAAEIRWSANLAATKMSECVLGQSKRVDFCGKGYHLMSFPQSAPHGVVFLHVTYVPAQEKNFTTAPAICHDGKAHFPREGVFVSNGTHWFVTQRNFYEPQIITTDNTFVSGNCDVVIGIVNNTVYDPLQPELDSFKEELDKYFKNHTSPDVDLGDISGINASVVNIQKEIDRLNEVAKNLNESLIDLQELGKYEQYIK

SEQ ID NO: 1758 - protein, 1211 aa, Artificial Sequence
  SARS-CoV-2/Australia/QLD02/2020__EPI_ISL_407896 spike protein (1-1211)(K986P_V987P_T887W_A1020W)
MFVFLVLLPLVSSQCVNLTTRTQLPPAYTNSFTRGVYYPDKVFRSSVLHSTQDLFLPFFSNVTWFHAIHVSGTNGTKRFDNPVLPFNDGVYFASTEKSNIIRGWIFGTTLDSKTQSLLIVNNATNVVIKVCEFQFCNDPFLGVYYHKNNKSWMESEFRVYSSANNCTFEYVSQPFLMDLEGKQGNFKNLREFVFKNIDGYFKIYSKHTPINLVRDLPQGFSALEPLVDLPIGINITRFQTLLALHRSYLTPGDSSSGWTAGAAAYYVGYLQPRTFLLKYNENGTITDAVDCALDPLSETKCTLKSFTVEKGIYQTSNFRVQPTESIVRFPNITNLCPFGEVFNATRFASVYAWNRKRISNCVADYSVLYNSASFSTFKCYGVSPTKLNDLCFTNVYADSFVIRGDEVRQIAPGQTGKIADYNYKLPDDFTGCVIAWNSNNLDSKVGGNYNYLYRLFRKSNLKPFERDISTEIYQAGSTPCNGVEGFNCYFPLQSYGFQPTNGVGYQPYRVVVLSFELLHAPATVCGPKKSTNLVKNKCVNFNFNGLTGTGVLTESNKKFLPFQQFGRDIADTTDAVRDPQTLEILDITPCSFGGVSVITPGTNTSNQVAVLYQDVNCTEVPVAIHADQLTPTWRVYSTGSNVFQTRAGCLIGAEHVNNSYECDIPIGAGICASYQTQTNSPRRARSVASQSIIAYTMSLGAENSVAYSNNSIAIPTNFTISVTTEILPVSMTKTSVDCTMYICGDSTECSNLLLQYGSFCTQLNRALTGIAVEQDKNTQEVFAQVKQIYKTPPIKDFGGFNFSQILPDPSKPSKRSFIEDLLFNKVTLADAGFIKQYGDCLGDIAARDLICAQKFNGLTVLPPLLTDEMIAQYTSALLAGTITSGWWFGAGAALQIPFAMQMAYRFNGIGVTQNVLYENQKLIANQFNSAIGKIQDSLSSTASALGKLQDVVNQNAQALNTLVKQLSSNFGAISSVLNDILSRLDPPEAEVQIDRLITGRLQSLQTYVTQQLIRAAEIRWSANLAATKMSECVLGQSKRVDFCGKGYHLMSFPQSAPHGVVFLHVTYVPAQEKNFTTAPAICHDGKAHFPREGVFVSNGTHWFVTQRNFYEPQIITTDNTFVSGNCDVVIGIVNNTVYDPLQLELDSFKEELDKYFKNHTSPDVDLGDISGINASVVNIQKEIDRLNEVAKNLNESLIDLQELGKYEQYIK

SEQ ID NO: 1759 - protein, 1211 aa, Artificial Sequence
  SARS-CoV-2/India/1-31/2020__EPI_ISL_413523 spike protein (1-1211)(K986P_V987P_T887W_A1020W)
MFVFLVLLPLVSSQCVNLTTRTQLPPAYTNSFTRGVYYPDKVFRSSVLHSTQDLFLPFFSNVTWFHAIHVSGTNGTKRFDNPVLPFNDGVYFASTEKSNIIRGWIFGTTLDSKTQSLLIVNNATNVVIKVCEFQFCNDPFLGVYYHKNNKSWMESEFRVYSSANNCTFEYVSQPFLMDLEGKQGNFKNLREFVFKNIDGYFKIYSKHTPINLVRDLPQGFSALEPLVDLPIGINITRFQTLLALHRSYLTPGDSSSGWTAGAAAYYVGYLQPRTFLLKYNENGTITDAVDCALDPLSETKCTLKSFTVEKGIYQTSNFRVQPTESIVRFPNITNLCPFGEVFNATRFASVYAWNRKRISNCVADYSVLYNSASFSTFKCYGVSPTKLNDLCFTNVYADSFVIRGDEVRQIAPGQTGKIADYNYKLPDDFTGCVIAWNSNNLDSKVGGNYNYLYRLFRKSNLKPFERDISTEIYQAGSTPCNGVEGFNCYFPLQSYGFQPTNGVGYQPYRVVVLSFELLHAPATVCGPKKSTNLVKNKCVNFNFNGLTGTGVLTESNKKFLPFQQFGRDIADTTDAVRDPQTLEILDITPCSFGGVSVITPGTNTSNQVAVLYQDVNCTEVPVAIHADQLTPTWRVYSTGSNVFQTRAGCLIGAEHVNNSYECDIPIGAGICASYQTQTNSPRRARSVASQSIIAYTMSLGAENSVAYSNNSIAIPTNFTISVTTEILPVSMTKTSVDCTMYICGDSTECSNLLLQYGSFCTQLNRALTGIAVEQDKNTQEVFAQVKQIYKTPPIKDFGGFNFSQILPDPSKPSKRSFIEDLLFNKVTLADAGFIKQYGDCLGDIAARDLICAQKFNGLTVLPPLLTDEMIAQYTSALLAGTITSGWWFGAGAALQIPFAMQMAYRFNGIGVTQNVLYENQKLIANQFNSVIGKIQDSLSSTASALGKLQDVVNQNAQALNTLVKQLSSNFGAISSVLNDILSRLDPPEAEVQIDRLITGRLQSLQTYVTQQLIRAAEIRWSANLAATKMSECVLGQSKRVDFCGKGYHLMSFPQSAPHGVVFLHVTYVPAQEKNFTTAPAICHDGKAHFPREGVFVSNGTHWFVTQRNFYEPQIITTDNTFVSGNCDVVIGIVNNTVYDPLQPELDSFKEELDKYFKNHTSPDVDLGDISGINASVVNIQKEIDRLNEVAKNLNESLIDLQELGKYEQYIK

SEQ ID NO: 1760 - protein, 1211 aa, Artificial Sequence
  SARS-CoV-2/Guangdong/GD2020087-P0008/2020__EPI_ISL_413863 spike protein (1-1211)(K986P_V987P_T887W_A1020W)
MFVFLVLLPLVSSQCVNLTTRTQLPPAYTNSFTRGVYYPDKVFRSSVLHSTQDLFLPFFSNVTWFHAIHVSGTNGTKRFDNPVLPFNDGVYFASTEKSNIIRGWIFGTTLDSKTQSLLIVNNATNVVIKVCEFQFCNDPFLGVYYHKNNKSWMESEFRVYSSANNCTFEYVSQPFLMDLEGKQGNFKNLREFVFKNIDGYFKIYSKHTPINLVRDLPQGFSALEPLVDLPIGINITRFQTLLALHRSYLTPGDSSSGWTAGAAAYYVGYLQPRTFLLKYNENGTITDAVDCALDPLSETKCTLKSFTVEKGIYQTSNFRVQPTESIVRFPNITNLCPFGEVFNATRFASVYAWNRKRISNCVADYSVLYNSASFSTFKCYGVSPTKLNDLCFTNVYADSFVIRGDEVREIAPGQTGKIADYNYKLPDDFTGCVIAWNSNNLDSKVGGNYNYLYRLFRKSNLKPFERDISTEIYQAGSTPCNGVEGFNCYFPLQSYGFQPTNGVGYQPYRVVVLSFELLHAPATVCGPKKSTNLVKNKCVNFNFNGLTGTGVLTESNKKFLPFQQFGRDIADTTDAVRDPQTLEILDITPCSFGGVSVITPGTNTSNQVAVLYQDVNCTEVPVAIHADQLTPTWRVYSTGSNVFQTRAGCLIGAEHVNNSYECDIPIGAGICASYQTQTNSPRRARSVASQSIIAYTMSLGAENSVAYSNNSIAIPTNFTISVTTEILPVSMTKTSVDCTMYICGDSTECSNLLLQYGSFCTQLNRALTGIAVEQDKNTQEVFAQVKQIYKTPPIKDFGGFNFSQILPDPSKPSKRSFIEDLLFNKVTLADAGFIKQYGDCLGDIAARDLICAQKFNGLTVLPPLLTDEMIAQYTSALLAGTITSGWWFGAGAALQIPFAMQMAYRFNGIGVTQNVLYENQKLIANQFNSAIGKIQDSLSSTASALGKLQDVVNQNAQALNTLVKQLSSNFGAISSVLNDILSRLDPPEAEVQIDRLITGRLQSLQTYVTQQLIRAAEIRWSANLAATKMSECVLGQSKRVDFCGKGYHLMSFPQSAPHGVVFLHVTYVPAQEKNFTTAPAICHDGKAHFPREGVFVSNGTHWFVTQRNFYEPQIITTDNTFVSGNCDVVIGIVNNTVYDPLQPELDSFKEELDKYFKNHTSPDVDLGDISGINASVVNIQKEIDRLNEVAKNLNESLIDLQELGKYEQYIK

SEQ ID NO: 1761 - protein, 1211 aa, Artificial Sequence
  SARS-CoV-2/Sweden/01/2020__EPI_ISL_411951 spike protein (1-1211)(K986P_V987P_T887W_A1020W)
MFVFLVLLPLVSSQCVNLTTRTQLPPAYTNSFTRGVYYPDKVFRSSVLHSTQDLFLPFFSNVTWFHAIHVSGTNGTKRFDNPVLPFNDGVYFASTEKSNIIRGWIFGTTLDSKTQSLLIVNNATNVVIKVCEFQFCNDPFLGVYYHKNNKSWMESEFRVYSSANNCTFEYVSQPFLMDLEGKQGNFKNLREFVFKNIDGYFKIYSKHTPINLVRDLPQGFSALEPLVDLPIGINITRFQTLLALHRSYLTPGDSSSGWTAGAAAYYVGYLQPRTFLLKYNENGTITDAVDCALDPLSETKCTLKSFTVEKGIYQTSNFRVQPTESIVRFPNITNLCPFGEVFNATRFASVYAWNRKRISNCVADYSVLYNSASFSTFKCYGVSPTKLNDLCFTNVYADSFVIRGDEVRQIAPGQTGKIADYNYKLPDDFTGCVIAWNSNNLDSKVGGNYNYLYRLFRKSNLKPFERDISTEIYQAGSTPCNGVEGFNCYFPLQSYGFQPTNGVGYQPYRVVVLSFELLHAPATVCGPKKSTNLVKNKCVNFNFNGLTGTGVLTESNKKFLPFQQFGRDIADTTDAVRDPQTLEILDITPCSFGGVSVITPGTNTSNQVAVLYQDVNCTEVPVAIHADQLTPTWRVYSTGSNVFQTRAGCLIGAEHVNNSYECDIPIGAGICASYQTQTNSPRRARSVASQSIIAYTMSLGAENSVAYSNNSIAIPTNFTISVTTEILPVSMTKTSVDCTMYICGDSTECSNLLLQYGSFCTQLNRALTGIAVEQDKNTQEVFAQVKQIYKTPPIKDCGGFNFSQILPDPSKPSKRSFIEDLLFNKVTLADAGFIKQYGDCLGDIAARDLICAQKFNGLTVLPPLLTDEMIAQYTSALLAGTITSGWWFGAGAALQIPFAMQMAYRFNGIGVTQNVLYENQKLIANQFNSAIGKIQDSLSSTASALGKLQDVVNQNAQALNTLVKQLSSNFGAISSVLNDILSRLDPPEAEVQIDRLITGRLQSLQTYVTQQLIRAAEIRWSANLAATKMSECVLGQSKRVDFCGKGYHLMSFPQSAPHGVVFLHVTYVPAQEKNFTTAPAICHDGKAHFPREGVFVSNGTHWFVTQRNFYEPQIITTDNTFVSGNCDVVIGIVNNTVYDPLQPELDSFKEELDKYFKNHTSPDVDLGDISGINASVVNIQKEIDRLNEVAKNLNESLIDLQELGKYEQYIK

SEQ ID NO: 1762 - protein, 1211 aa, Artificial Sequence
  SARS-CoV-2/Tianmen/HBCDC-HB-07/2020__EPI_ISL_412983 spike protein (1-1211)(K986P_V987P_T887W_A1020W)
MFVFLVLLPLVSSQCVNLTTRTQLPPAYTNSFTRGVYYPDKVFRSSVLHSTQDLFLPFFSNVTWFHAIHVSGTNGTKRFDNPVLPFNDGVYFASTEKSNIIRGWIFGTTLDSKTQSLLIVNNATNVVIKVCEFQFCNDPFLGVYYHKNNKSWMESEFRVYSSANNCTFEYVSQPFLMDLEGKQGNFKNLREFVFKNIDGYFKIYSKHTPINLVRDLPQGFSALEPLVDLPIGINITRFQTLLALHRSYLTPGDSSSGWTAGAAAYYVGYLQPRTFLLKYNENGTITDAVDCALDPLSETKCTLKSFTVEKGIYQTSNFRVQPTESIVRFPNITNLCPFGEVFNATRFASVYAWNRKRISNCVADYSVLYNSASFSTFKCYGVSPTKLNDLCFTNVYADSFVIRGDEVRQIAPGQTGKIADYNYKLPDDFTGCVIAWNSNNLDSKVGGNYNYLYRLFRKSNLKPFERDISTEIYQAGSTPCNGVEGFNCYFPLQSYGFQPTNGVGYQPYRVVVLSFELLHAPATVCGPKKSTNLVKNKCVNFNFNGLTGTGVLTESNKKFLPFQQFGRDIADTTDAVRDPQTLEILDITPCSFGGVSVITPGTNTSNQVAVLYQDLNCTEVPVAIHADQLTPTWRVYSTGSNVFQTRAGCLIGAEHVNNSYECDIPIGAGICASYQTQTNSPRRARSVASQSIIAYTMSLGAENSVAYSNNSIAIPTNFTISVTTEILPVSMTKTSVDCTMYICGDSTECSNLLLQYGSFCTQLNRALTGIAVEQDKNTQEVFAQVKQIYKTPPIKDFGGFNFSQILPDPSKPSKRSFIEDLLFNKVTLADAGFIKQYGDCLGDIAARDLICAQKFNGLTVLPPLLTDEMIAQYTSALLAGTITSGWWFGAGAALQIPFAMQMAYRFNGIGVTQNVLYENQKLIANQFNSAIGKIQDSLSSTASALGKLQDVVNQNAQALNTLVKQLSSNFGAISSVLNDILSRLDPPEAEVQIDRLITGRLQSLQTYVTQQLIRAAEIRWSANLAATKMSECVLGQSKRVDFCGKGYHLMSFPQSAPHGVVFLHVTYVPAQEKNFTTAPAICHDGKAHFPREGVFVSNGTHWFVTQRNFYEPQIITTDNTFVSGNCDVVIGIVNNTVYDPLQPELDSFKEELDKYFKNHTSPDVDLGDISGINASVVNIQKEIDRLNEVAKNLNESLIDLQELGKYEQYIK

SEQ ID NO: 1763 - protein, 1211 aa, Artificial Sequence
  SARS-CoV-2/Hong Kong/case42_VM20002493/2020__EPI_ISL_414527 spike protein (1-1211)(K986P_V987P_T887W_A1020W)
MFVFLVLLPLVSSQCVNLTTRTQLPPAYTNSFTRGVYYPDKVFRSSVLHSTQDLFLPFFSNVTWFHAIHVSGTNGTKRFDNPVLPFNDGVYFASTEKSNIIRGWIFGTTLDSKTQSLLIVNNATNVVIKVCEFQFCNDPFLGVYYHKNNKSWMESEFRVYSSANNCTFEYVSQPFLMDLEGKQGNFKNLREFVFKNIDGYFKIYSKHTPINLVRDLPQGFSALEPLVDLPIGINITRFQTLLALHRSYLTPGDSSSGWTAGAAAYYVGYLQPRTFLLKYNENGTITDAVDCALDPLSETKCTLKSFTVEKGIYQTSNFRVQPTESIVRFPNITNLCPFGEVFNATRFASVYAWNRKRISNCVADYSVLYNSASFSTFKCYGVSPTKLNDLCFTNVYADSFVIRGDEVRQIAPGQTGKIADYNYKLPDDFTGCVIAWNSNNLDSKVGGNYNYLYRLFRKSNLKPFERDISTEIYQAGSTPCNGVEGFNCYFPLQSYGFQPTNGVGYQPYRVVVLSFELLHAPATVCGPKKSTNLVKNKCVNFNFNGLTGTGVLTESNKKFLPFQQFGRDIADTTDAVRDPQTLEILDITPCSFGGVSVITPGTNTSNQVAVLYQDVNCTEVPVAIHADQLTPTWRVYSTGSNVFQTRAGCLIGAEHVNNSYECDIPIGAGICASYQTQTNSPRRARSVASQSIIAYTMSLGAENSVAYSNNSIAIPTNFAISVTTEILPVSMTKTSVDCTMYICGDSTECSNLLLQYGSFCTQLNRALTGIAVEQDKNTQEVFAQVKQIYKTPPIKDFGGFNFSQILPDPSKPSKRSFIEDLLFNKVTLADAGFIKQYGDCLGDIAARDLICAQKFNGLTVLPPLLTDEMIAQYTSALLAGTITSGWWFGAGAALQIPFAMQMAYRFNGIGVTQNVLYENQKLIANQFNSAIGKIQDSLSSTASALGKLQDVVNQNAQALNTLVKQLSSNFGAISSVLNDILSRLDPPEAEVQIDRLITGRLQSLQTYVTQQLIRAAEIRWSANLAATKMSECVLGQSKRVDFCGKGYHLMSFPQSAPHGVVFLHVTYVPAQEKNFTTAPAICHDGKAHFPREGVFVSNGTHWFVTQRNFYEPQIITTDNTFVSGNCDVVIGIVNNTVYDPLQPELDSFKEELDKYFKNHTSPDVDLGDISGINASVVNIQKEIDRLNEVAKNLNESLIDLQELGKYEQYIK

SEQ ID NO: 1764 - protein, 1211 aa, Artificial Sequence
  SARS-CoV-2/USA/CruiseA-23/2020__EPI_ISL_414482 spike protein (1-1211)(K986P_V987P_T887W_A1020W)
MFVFLVLLPLVSSQCVNLTTRTQLPPAYTNSFTRGVYYPDKVFRSSVLHSTQDLFLPFFSNVTWFHAIHVSGTNGTKRFDNPVLPFNDGVYFASTEKSNIIRGWIFGTTLDSKTQSLLIVNNATNVVIKVCEFQFCNDPFLGVYYHKNNKSWMESEFRVYSSANNCTFEYVSQPFLMDLEVKQGNFKNLREFVFKNIDGYFKIYSKHTPINLVRDLPQGFSALEPLVDLPIGINITRFQTLLALHRSYLTPGDSSSGWTAGAAAYYVGYLQPRTFLLKYNENGTITDAVDCALDPLSETKCTLKSFTVEKGIYQTSNFRVQPTESIVRFPNITNLCPFGEVFNATRFASVYAWNRKRISNCVADYSVLYNSASFSTFKCYGVSPTKLNDLCFTNVYADSFVIRGDEVRQIAPGQTGKIADYNYKLPDDFTGCVIAWNSNNLDSKVGGNYNYLYRLFRKSNLKPFERDISTEIYQAGSTPCNGVEGFNCYFPLQSYGFQPTNGVGYQPYRVVVLSFELLHAPATVCGPKKSTNLVKNKCVNFNFNGLTGTGVLTESNKKFLPFQQFGRDIADTTDAVRDPQTLEILDITPCSFGGVSVITPGTNTSNQVAVLYQDVNCTEVPVAIHADQLTPTWRVYSTGSNVFQTRAGCLIGAEHVNNSYECDIPIGAGICASYQTQTNSPRRARSVASQSIIAYTMSLGAENSVAYSNNSIAIPTNFTISVTTEILPVSMTKTSVDCTMYICGDSTECSNLLLQYGSFCTQLNRALTGIAVEQDKNTQEVFAQVKQIYKTPPIKDFGGFNFSQILPDPSKPSKRSFIEDLLFNKVTLADAGFIKQYGDCLGDIAARDLICAQKFNGLTVLPPLLTDEMIAQYTSALLAGTITSGWWFGAGAALQIPFAMQMAYRFNGIGVTQNVLYENQKLIANQFNSAIGKIQDSLSSTASALGKLQDVVNQNAQALNTLVKQLSSNFGAISSVLNDILSRLDPPEAEVQIDRLITGRLQSLQTYVTQQLIRAAEIRWSANLAATKMSECVLGQSKRVDFCGKGYHLMSFPQSAPHGVVFLHVTYVPAQEKNFTTAPAICHDGKAHFPREGVFVSNGTHWFVTQRNFYEPQIITTDNTFVSGNCDVVIGIVNNTVYDPLQPELDSFKEELDKYFKNHTSPDVDLGDISGINASVVNIQKEIDRLNEVAKNLNESLIDLQELGKYEQYIK

SEQ ID NO: 1765 - protein, 1211 aa, Artificial Sequence
  SARS-CoV-2/Hong Kong/case85_VM20002868/2020__EPI_ISL_414519 spike protein (1-1211)(K986P_V987P_T887W_A1020W)
MFVFLVLVPLVSSQCVNLTTRTQLPPAYTNSFTRGVYYPDKVFRSSVLHSTQDLFLPFFSNVTWFHAIHVSGTNGTKRFDNPVLPFNDGVYFASTEKSNIIRGWIFGTTLDSKTQSLLIVNNATNVVIKVCEFQFCNDPFLGVYYHKNNKSWMESEFRVYSSANNCTFEYVSQPFLMDLEGKQGNFKNLREFVFKNIDGYFKIYSKHTPINLVRDLPQGFSALEPLVDLPIGINITRFQTLLALHRSYLTPGDSSSGWTAGAAAYYVGYLQPRTFLLKYNENGTITDAVDCALDPLSETKCTLKSFTVEKGIYQTSNFRVQPTESIVRFPNITNLCPFGEVFNATRFASVYAWNRKRISNCVADYSVLYNSASFSTFKCYGVSPTKLNDLCFTNVYADSFVIRGDEVRQIAPGQTGKIADYNYKLPDDFTGCVIAWNSNNLDSKVGGNYNYLYRLFRKSNLKPFERDISTEIYQAGSTPCNGVEGFNCYFPLQSYGFQPTNGVGYQPYRVVVLSFELLHAPATVCGPKKSTNLVKNKCVNFNFNGLTGTGVLTESNKKFLPFQQFGRDIADTTDAVRDPQTLEILDITPCSFGGVSVITPGTNTSNQVAVLYQDVNCTEVPVAIHADQLTPTWRVYSTGSNVFQTRAGCLIGAEHVNNSYECDIPIGAGICASYQTQTNSPRRARSVASQSIIAYTMSLGAENSVAYSNNSIAIPTNFTISVTTEILPVSMTKTSVDCTMYICGDSTECSNLLLQYGSFCTQLNRALTGIAVEQDKNTQEVFAQVKQIYKTPPIKDFGGFNFSQILPDPSKPSKRSFIEDLLFNKVTLADAGFIKQYGDCLGDIAARDLICAQKFNGLTVLPPLLTDEMIAQYTSALLAGTITSGWWFGAGAALQIPFAMQMAYRFNGIGVTQNVLYENQKLIANQFNSAIGKIQDSLSSTASALGKLQDVVNQNAQALNTLVKQLSSNFGAISSVLNDILSRLDPPEAEVQIDRLITGRLQSLQTYVTQQLIRAAEIRWSANLAATKMSECVLGQSKRVDFCGKGYHLMSFPQSAPHGVVFLHVTYVPAQEKNFTTAPAICHDGKAHFPREGVFVSNGTHWFVTQRNFYEPQIITTDNTFVSGNCDVVIGIVNNTVYDPLQPELDSFKEELDKYFKNHTSPDVDLGDISGINASVVNIQKEIDRLNEVAKNLNESLIDLQELGKYEQYIK

SEQ ID NO: 1766 - protein, 1211 aa, Artificial Sequence; identical to SEQ ID NO: 1756
  SARS-CoV-2/England/200990660/2020__EPI_ISL_414523 spike protein (1-1211)(K986P_V987P_T887W_A1020W)

SEQ ID NO: 1767 - protein, 1211 aa, Artificial Sequence
  SARS-CoV-2/Australia/NSW09/2020__EPI_ISL_413595 spike protein (1-1211)(K986P_V987P_T887W_A1020W)
MFVFLVLLPLVSSQCVNLTTRTQLPPAYTNSFTRGVYYPDKVFRSSVLHSTQDLFLPFFSNVTWFHAIHVSGTNGTKRFDNPVLPFNDGVYFASTEKSNIIRGWIFGTTLDSKTQSLLIVNNATNVVIKVCEFQFCNDPFLGVYYHKNNKSWMESEFRVYSSANNCTFEYVSQPFLMDLEGKQGNFKNLREFVFKNIDGYFKIYSKHTPINLVRDLPQGFSALEPLVDLPIGINITRFQTLLALHRSYLTPGDSSSGWTAGAAAYYVGYLQPRTFLLKYNENGTITDAVDCALDPLSETKCTLKSFTVEKGIYQTSNFRVQPTESIVRFPNITNLCPFGEVFNATRFASVYAWNRKRISNCVADYSVLYNSASFSTFKCYGVSPTKLNDLCFTNVYADSFVIRGDEVRQIAPGQTGKIADYNYKLPDDFTGCVIAWNSNNLDSKVGGNYNYLYRLFRKSNLKPFERDISTEIYQAGSTPCNGVEGFNCYFPLQSYGFQPTNGVGYQPYRVVVLSFELLHAPATVCGPKKSTNLVKNKCVNFNFNGLTGTGVLTESNKKFLPFQQFGRDIADTTDAVRDPQTLEILDITPCSFGGVSVITPGTNTSNQVAVLYQDVNCTEVPVAIHADQLTPTWRVYSTGSNVFQTRAGCLIGAEHVNNSYECDIPIGAGICASYQTQTNSPRRARSVASQSIIAYTMSLGAENSVAYSNNSIAIPTNFTISVTTEILPVSMTKTSVDCTMYICGDSTECSNLLLQYGSFCTQLNRALTGIAVEQDKNTQEVFAQVKQIYKTPPIKDFGGFNFSQILPDPSKPSKRSFIEDLLFNKVTLADAGFIKQYGDCLGDIAARDLICAQKFNGLTVLPPLLTDEMIAQYTSALLAGTITSGWWFGAGAALQIPFAMQMAYRFNGIGVTQNVLYENQKLIANQFNSAIGKIQDSLSFTASALGKLQDVVNQNAQALNTLVKQLSSNFGAISSVLNDILSRLDPPEAEVQIDRLITGRLQSLQTYVTQQLIRAAEIRWSANLAATKMSECVLGQSKRVDFCGKGYHLMSFPQSAPHGVVFLHVTYVPAQEKNFTTAPAICHDGKAHFPREGVFVSNGTHWFVTQRNFYEPQIITTDNTFVSGNCDVVIGIVNNTVYDPLQPELDSFKEELDKYFKNHTSPDVDLGDISGINASVVNIQKEIDRLNEVAKNLNESLIDLQELGKYEQYIK

SEQ ID NO: 1768 - protein, 1211 aa, Artificial Sequence; identical to SEQ ID NO: 1748
  SARS-CoV-2/Australia/NSW10/2020__EPI_ISL_413596 spike protein (1-1211)(K986P_V987P_T887W_A1020W)

SEQ ID NO: 1769 - protein, 1211 aa, Artificial Sequence
  SARS-CoV-2/Switzerland/1000477797/2020__EPI_ISL_413023 spike protein (1-1211)(K986P_V987P_T887W_A1020W)
MFVFLVLLPLVSSQCVNLTTRTQLPPAYTNSFTRGVYYPDKVFRSSVLHSTQDLFLPFFSNVTWFHAIHVSGTNGTKRFDNPVLPFNDGVYFASTEKSNIIRGWIFGTTLDSKTQSLLIVNNATNVVIKVCEFQFCNDPFLGVYYHKNNKSWMESEFRVYSSANNCTFEYVSQPFLMDLEGKQGNFKNLREFVFKNIDGYFNIYSKHTPINLVRDLPQGFSALEPLVDLPIGINITRFQTLLALHRSYLTPGDSSSGWTAGAAAYYVGYLQPRTFLLKYNENGTITDAVDCALDPLSETKCTLKSFTVEKGIYQTSNFRVQPTESIVRFPNITNLCPFGEVFNATRFASVYAWNRKRISNCVADYSVLYNSASFSTFKCYGVSPTKLNDLCFTNVYADSFVIRGDEVRQIAPGQTGKIADYNYKLPDDFTGCVIAWNSNNLDSKVGGNYNYLYRLFRKSNLKPFERDISTEIYQAGSTPCNGVEGFNCYFPLQSYGFQPTNGVGYQPYRVVVLSFELLHAPATVCGPKKSTNLVKNKCVNFNFNGLTGTGVLTESNKKFLPFQQFGRDIADTTDAVRDPQTLEILDITPCSFGGVSVITPGTNTSNQVAVLYQGVNCTEVPVAIHADQLTPTWRVYSTGSNVFQTRAGCLIGAEHVNNSYECDIPIGAGICASYQTQTNSPRRARSVASQSIIAYTMSLGAENSVAYSNNSIAIPTNFTISVTTEILPVSMTKTSVDCTMYICGDSTECSNLLLQYGSFCTQLNRALTGIAVEQDKNTQEVFAQVKQIYKTPPIKDFGGFNFSQILPDPSKPSKRSFIEDLLFNKVTLADAGFIKQYGDCLGDIAARDLICAQKFNGLTVLPPLLTDEMIAQYTSALLAGTITSGWWFGAGAALQIPFAMQMAYRFNGIGVTQNVLYENQKLIANQFNSAIGKIQDSLSSTASALGKLQDVVNQNAQALNTLVKQLSSNFGAISSVLNDILSRLDPPEAEVQIDRLITGRLQSLQTYVTQQLIRAAEIRWSANLAATKMSECVLGQSKRVDFCGKGYHLMSFPQSAPHGVVFLHVTYVPAQEKNFTTAPAICHDGKAHFPREGVFVSNGTHWFVTQRNFYEPQIITTDNTFVSGNCDVVIGIVNNTVYDPLQPELDSFKEELDKYFKNHTSPDVDLGDISGINASVVNIQKEIDRLNEVAKNLNESLIDLQELGKYEQYIK

SEQ ID NO: 1770 - protein, 1211 aa, Artificial Sequence
  SARS-CoV-2/Belgium/BA-02291/2020__EPI_ISL_415159 spike protein (1-1211)(K986P_V987P_T887W_A1020W)
MFVFLVLLPLVSSQCVNLTTRTQLPPAYTNSFTRGVYYPDKVFRSSVLHSTQDLFLPFFSNVTWFHAIHVSGTNGTKRFDNPVLPFNDGVYFASTEKSNIIRGWIFGTTLDSKTQSLLIVNNATNVVIKVCEFQFCNDPFLGVYYHKNNKSWMESEFRVYSSANNCTFEYVSQPFLMDLEGKQGNFKNLREFVFKNIDGYFKIYSKHTPINLVRDLPQGFSALEPLVDLPIGINITRFQTLLALHRSYLTPGDSSSGWTAGAAAYYVGYLQPRTFLLKYNENGTITDAVDCALDPLSETKCTLKSFTVEKGIYQTSNFRVQPTESIVRFPNITNLCPFGEVFNATRFASVYAWNRKRISNCVADYSVLYNSASFSTFKCYGVSPTKLNDLCFTNVYADSFVIRGDEVRQIAPGQTGKIADYNYKLPDDFTGCVIAWNSNNLDSKVGGNYNYLYRLFRRSNLKPFERDISTEIYQAGSTPCNGVEGFNCYFPLQSYGFQPTNGVGYQPYRVVVLSFELLPAPATVCGPKKSTNLVKNKCVNFNFNGLTGTGVLTESNKKFLPFQQFGRDIADTTDAVRDPQTLEILDITPCSFGGVSVITPGTNTSNQVAVLYQGVNCTEVPVAIHADQLTPTWRVYSTGSNVFQTRAGCLIGAEHVNNSYECDIPIGAGICASYQTQTNSPRRARSVASQSIIAYTMSLGAENSVAYSNNSIAIPTNFTISVTTEILPVSMTKTSVDCTMYICGDSTECSNLLLQYGSFCTQLNRALTGIAVEQDKNTQEVFAQVKQIYKTPPIKDFGGFNFSQILPDPSKPSKRSFIEDLLFNKVTLADAGFIKQYGDCLGDIAARDLICAQKFNGLTVLPPLLTDEMIAQYTSALLAGTITSGWWFGAGAALQIPFAMQMAYRFNGIGVTQNVLYENQKLIANQFNSAIGKIQDSLSSAAPALGKLQDVVNQNAQALNTLVKQLSSNFGAISSVLNDILSRLDPPEAEVQIDRLITGRLQSLQTYVTQQLIRAAEIRWSANLAATKMSECVLGQSKRVDFCGKGYHLMSFPQSAPHGVVFLHVTYVPAQEKNFTTAPAICHDGKAHFPREGVFVSNGTHWFVTQRNFYEPQIITTDNTFVSGNCDVVIGIVNNTVYDPLQPELDSFKEELDKYFKNHTSPDVDLGDISGINASVVNIQKEIDRLNEVAKNLNESLIDLQELGKYEQYIK

SEQ ID NO: 1771 - protein, 1211 aa, Artificial Sequence
  SARS-CoV-2/USA/WA8-UW5/2020__EPI_ISL_413486 spike protein (1-1211)(K986P_V987P_T887W_A1020W)
MFVFLVLLPLVSSQCVNLTTRTQLPPAYTNSFTRGVYYPDKVFRSSVLHSTQDLFLPFFSNVTWFHAIHVSGTNGTKRFDNPVLPFNDGVYFASTEKSNIIRGWIFGTTLDSKTQSLLIVNNATNVVIKVCEFQFCNDPFLGVYYHKNNKSWMESEFRVYSSANNCTFEYVSQPFLMDLEGKQGNFKNLREFVFKNIDGYFKIYSKHTPINLVRDLPQGFSALEPLVDLPIGINITRFQTLLALHRSYLTPGDSSSGWTAGAAAYYVGYLQPRTFLLKYNENGTITDAVDCALDPLSETKCTLKSFTVEKGIYQTSNFRVQPTESIVRFPNITNLCPFGEVFNATRFASVYAWNRKRISNCVADYSVLYNSASFSTFKCYGVSPTKLNDLCFTNVYADSFVIRGDEVRQIAPGQTGKIADYNYKLPDDFTGCVIAWNSNNLDSKVGGNYNYLYRLFRKSNLKPFERDISTEIYQAGSTPCNGVEGFNCYFPLQSYGFQPTNGVGYQPYRVVVLSFELLHAPATVCGPKKSTNLVKNKCVNFNFNGLTGTGVLTESNKKFLPFQQFGRDIADTTDAVRDPQTLEILDITPCSFGGVSVITPGTNTSNQVAVLYQDVNCTEVPVAIHADQLTPTWRVYSTGSNVFQTRAGCLIGAEYVNNSYECDIPIGAGICASYQTQTNSPRRARSVASQSIIAYTMSLGAENSVAYSNNSIAIPTNFTISVTTEILPVSMTKTSVDCTMYICGDSTECSNLLLQYGSFCTQLNRALTGIAVEQDKNTQEVFAQVKQIYKTPPIKDFGGFNFSQILPDPSKPSKRSFIEDLLFNKVTLADAGFIKQYGDCLGDIAARDLICAQKFNGLTVLPPLLTDEMIAQYTSALLAGTITSGWWFGAGAALQIPFAMQMAYRFNGIGVTQNVLYENQKLIANQFNSAIGKIQDSLSSTASALGKLQDVVNQNAQALNTLVKQLSSNFGAISSVLNDILSRLDPPEAEVQIDRLITGRLQSLQTYVTQQLIRAAEIRWSANLAATKMSECVLGQSKRVDFCGKGYHLMSFPQSAPHGVVFLHVTYVPAQEKNFTTAPAICHDGKAHFPREGVFVSNGTHWFVTQRNFYEPQIITTDNTFVSGNCDVVIGIVNNTVYDPLQPELDSFKEELDKYFKNHTSPDVDLGDISGINASVVNIQKEIDRLNEVAKNLNESLIDLQELGKYEQYIK

SEQ ID NO: 1772 - protein, 1211 aa, Artificial Sequence
  SARS-CoV-2/England/20102000506/2020__EPI_ISL_415147 spike protein (1-1211)(K986P_V987P_T887W_A1020W)
MFVFLVLLPLVSSQCVNLTTRTQLPPAYTNSFTRGVYYPDKVFRSSVLHSTQDLFLPFFSNVTWFHAIHVSGTNGTKRFDNPVLPFNDGVYFASTEKSNIIRGWIFGTTLDSKTQSLLIVNNATNVVIKVCEFQFCNDPFLGVYYHKNNKSWMESEFRVYSSANNCTFEYVSQPFLMDLEGKQGNFKNLREFVFKNIDGYFKIYSKHTPINLVRDLPQGFSALEPLVDLPIGINITRFQTLLALHRSYLTPGDSSSGWTAGAAAYYVGYLQPRTFLLKYNENGTITDAVDCALDPLSETKCTLKSFTVEKGIYQTSNFRVQPTESIVRFPNITNLCPFGEVFNATRFASVYAWNRKRISNCVADYSVLYNSASFSTFKCYGVSPTKLNDLCFTNVYADSFVIRGDEVRQIAPGQTGKIADYNYKLPDDFTGCVIAWNSNNLDSKVGGNYNYLYRLFRKSNLKPFERDISTEIYQAGSTPCNGVEGFNCYFPLQSYGFQPTNGVGYQPYRVVVLSFELLHAPATVCGPKKSTNLVKNKCVNFNFNGLTGTGVLTESNKKFLPFQQFGRDIADTTDAVRDPQTLEILDITPCSFGGVSVITPGTNTSNQVAVLYQGVNCTEVPVAIHADQLTPTWRVYSTGSNVFQTRAGCLIGAEHVNNSYECDIPIGAGICASYQTQTNSPRRARSVASQSIIAYTMSLGAENSVAYSNNSIAIPTNFTISVTTEILPVSMTKTSVDCTMYICGDSTECSNLLLQYGSFCTQLNRALTGIAVEQDKNTQEVFAQVKQIYKTPPIKDFGGFNFSQILPDPSKPSKRSFIEDLLFNKVTLADAGFIKQYGYCLGDIAARDLICAQKFNGLTVLPPLLTDEMIAQYTSALLAGTITSGWWFGAGAALQIPFAMQMAYRFNGIGVTQNVLYENQKLIANQFNSAIGKIQDSLSSTASALGKLQDVVNQNAQALNTLVKQLSSNFGAISSVLNDILSRLDPPEAEVQIDRLITGRLQSLQTYVTQQLIRAAEIRWSANLAATKMSECVLGQSKRVDFCGKGYHLMSFPQSAPHGVVFLHVTYVPAQEKNFTTAPAICHDGKAHFPREGVFVSNGTHWFVTQRNFYEPQIITTDNTFVSGNCDVVIGIVNNTVYDPLQPELDSFKEELDKYFKNHTSPDVDLGDISGINASVVNIQKEIDRLNEVAKNLNESLIDLQELGKYEQYIK

SEQ ID NO: 1773 - protein, 1211 aa, Artificial Sequence
  SARS-CoV-2/Belgium/VAG-03013/2020__EPI_ISL_415155 spike protein (1-1211)(K986P_V987P_T887W_A1020W)
MFVFLVLLPLVSSQCVNLTTRTQLPPAYTNSFTRGVYYPDKVFRSSVLHSTQDLFLPFFSNVTWFHAIHVSGTNGTKRFDNPVLPFNDGVYFASTEKSNIIRGWIFGTTLDSKTQSLLIVNNATNVVIKVCEFQFCNDPFLGVYYHKNNKSWMESEFRVYSSANNCTFEYVSQPFLMDLEGKQGNFKNLREFVFKNIDGYFKIYSKHTPINLVRDLPQGFSALEPLVDLPIGINITRFQTLLALHRSYLTPGDSSSGWTAGAAAYYVGYLQPRTFLLKYNENGTITDAVDCALDPLSETKCTLKSFTVEKGIYQTSNFRVQPTESIVRFPNITNLCPFGEVFNATRFASVYAWNRKRISNCVADYSVLYNSASFSTFKCYGVSPTKLNDLCFTNVYADSFVIRGDEVRQIAPGQTGKIADYNYKLPDDFTGCVIAWNSNNLDSKVGGNYNYLYRLFRKSNLKPFERDISTEIYQAGSTPCNGVEGFNCYFPLQSYGFQPTNGVGYQPYRVVVLSFELLHAPATVCGPKKSTNLVKNKCVNFNFNGLTGTGVLTESNKKFLPFQQFGRDIADTTDAVRDPQTLEILDITPCSFGGVSVITPGTNTSNQVAVLYQGVNCTEVPVAIHADQLTPTWRVYSTGSNVFQTRAGCLIGAEHVNNSYECDIPIGAGICASYQTQTNSPRRARSVASQSIIAYTMSLGAENSVAYSNNSIAIPTNFTISVTTEILPVSMTKTSVDCTMYICGDSTECSNLLLQYGSFCTQLNRALTGIAVEQDKNTQEVFAQVKQIYKTPPIKDFGGFNFSQILPDPSKPSKRSFIEDLLFNKVTLADAGFIKQYGDCLGDIAARDLICAQKFNGLTVLPPLLTDEMIAQYTSALLAGTITSGWWFGAGAALQIPFAMQMAYRFNGIGVTQNVLYENQKLIANQFNSAIGKIQDSLSSTATALGKLQDVVNQNAQALNTLVKQLSSNFGAISSVLNDILSRLDPPEAEVQIDRLITGRLQSLQTYVTQQLIRAAEIRWSANLAATKMSECVLGQSKRVDFCGKGYHLMSFPQSAPHGVVFLHVTYVPAQEKNFTTAPAICHDGKAHFPREGVFVSNGTHWFVTQRNFYEPQIITTDNTFVSGNCDVVIGIVNNTVYDPLQPELDSFKEELDKYFKNHTSPDVDLGDISGINASVVNIQKEIDRLNEVAKNLNESLIDLQELGKYEQYIK

SEQ ID NO: 1774 - protein, 1211 aa, Artificial Sequence
  SARS-CoV-2/Belgium/BC-03016/2020__EPI_ISL_415157 spike protein (1-1211)(K986P_V987P_T887W_A1020W)
MFVFLVLLPLVSSQCVNLTTRTQLPPAYTNSFTRGVYYPDKVFRSSVLHSTQDLFLPFFSNVTWFHAIHVSGTNGTKRFDNPVLPFNDGVYFASTEKSNIIRGWIFGTTLDSKTQSLLIVNNATNVVIKVCEFQFCNDPFLGVYYHKNNKSWMESEFRVYSSANNCTFEYVSQPFLMDLEGKQGNFKNLREFVFKNIDGYFKIYSKHTPINLVRDLPQGFSALEPLVDLPIGINITRFQTLLALHRSYLTPGDSSSGWTAGAAAYYVGYLQPRTFLLKYNENGTITDAVDCALDPLSETKCTLKSFTVEKGIYQTSNFRVQPTESIVRFPNITNLCPFGEVFNATRFASVYAWNRKRISNCVADYSVLYNSASFSTFKCYGVSPTKLNDLCFTNVYADSFVIRGDEVRQIAPGQTGKIADYNYKLPDDFTGCVIAWNSNNLDSKVGGNYNYLYRLFRKSNLKPFERDISTEIYQAGSTPCNGVEGFNCYFPLQSYGFQPTNGVGYQPYRVVVLSFELLHAPATVCGPKKSTNLVKNKCVNFNFNGLTGTGVLTESNKKFLPFQQFGRDIADTTDAVRDPQTLEILDITPCSFGGVSVITPGTNTSNQVAVLYQGVNCTEVPVAIHADQLTPTWRVYSTGSNVFQTRAGCLIGAEHVNNSYECDIPIGAGICASYQTQTNSPRRARSVASQSIIAYTMSLGAENSVAYSNNSIAIPTNFTISVTTEILPVSMTKTSVDCTMYICGDSTECSNLLLQYGSFCTQLNRALTGIAVEQDKNTQEVFAQVKQIYKTPPIKDFGGFNFSQILPDPSKPSKRSFIEDLLFNKVTLADAGFIKQYGDCLGDIAARDLICAQKFNGLTVLPPLLTDEMIAQYTSALLAGTITSGWWFGAGAALQIPFAMQMAYRFNGIGVTQNVLYENQKLIANQFNSAIGKIQDSLSSTAPALGKLQDVVNQNAQALNTLVKQLSSNFGAISSVLNDILSRLDPPEAEVQIDRLITGRLQSLQTYVTQQLIRAAEIRWSANLAATKMSECVLGQSKRVDFCGKGYHLMSFPQSAPHGVVFLHVTYVPAQEKNFTTAPAICHDGKAHFPREGVFVSNGTHWFVTQRNFYEPQIITTDNTFVSGNCDVVIGIVNNTVYDPLQPELDSFKEELDKYFKNHTSPDVDLGDISGINASVVNIQKEIDRLNEVAKNLNESLIDLQELGKYEQYIK

SEQ ID NO: 1775 - protein, 1211 aa, Artificial Sequence
  SARS-CoV-2/Germany/BavPat3/2020__EPI_ISL_414521 spike protein (1-1211)(K986P_V987P_T887W_A1020W)
MFVFLVLLPLVSSQCVNLTTRTQLPPAYTNSFTRGVYYPDKVFRSSVLHSTQDLFLPFFSNVTWFHAIHVSGTNGTKRFDNPVLPFNDGVYFASTEKSNIIRGWIFGTTLDSKTQSLLIVNNATNVVIKVCEFQFCNDPFLGVYYHKNNKSWMESEFRVYSSANNCTFEYVSQPFLMDLEGKQGNFKNLREFVFKNIDGYFKIYSKHTPINLVRDLPQGFSALEPLVDLPIGINITRFQTLLALHRSYLTPGDSSSGWTAGAAAYYVGYLQPRTFLLKYNENGTITDAVDCALDPLSETKCTLKSFTVEKGIYQTSNFRVQPTESIVRFPNITNLCPFGEVFNATRFASVYAWNRKRISNCVADYSVLYNSASFSTFKCYGVSPTKLNDLCFTNVYADSFVIRGDEVRQIAPGQTGKIADYNYKLPDDFTGCVIAWNSNNLDSKVGGNYNYLYRLFRKSNLKPFERDISTEIYQAGSTPCNGVEGFNCYFPLQSYGFQPTNGVGYQPYRVVVLSFELLHAPATVCGPKKSTNLVKNKCVNFNFNGLTGTGVLTESNKKFLPFQQFGRDIADTTDAVRDPQTLEILDITPCSFGGVSVITPGTNTSNQVAVLYQDVNCTEVPVAIHADQLTPTWRVYSTGSNVFQTRAGCLIGAEHVNNSYECDIPIGAGICASYQTQTNSPRRARSVASQSIIAYTMSLGAENSVAYSNNSIAIPTNFTISVTTEILPVSMTKTSVDCTMYICGDSTECSNLLLQYGSFCTQLNRALTGIAVEQDKNTQQVFAQVKQIYKTPPIKDFGGFNFSQILPDPSKPSKRSFIEDLLFNKVTLADAGFIKQYGDCLGDIAARDLICAQKFNGLTVLPPLLTDEMIAQYTSALLAGTITSGWWFGAGAALQIPFAMQMAYRFNGIGVTQNVLYENQKLIANQFNSAIGKIQDSLSSTASALGKLQDVVNQNAQALNTLVKQLSSNFGAISSVLNDILSRLDPPEAEVQIDRLITGRLQSLQTYVTQQLIRAAEIRWSANLAATKMSECVLGQSKRVDFCGKGYHLMSFPQSAPHGVVFLHVTYVPAQEKNFTTAPAICHDGKAHFPREGVFVSNGTHWFVTQRNFYEPQIITTDNTFVSGNCDVVIGIVNNTVYDPLQPELDSFKEELDKYFKNHTSPDVDLGDISGINASVVNIQKEIDRLNEVAKNLNESLIDLQELGKYEQYIK

SEQ ID NO: 1776 - protein, 1211 aa, Artificial Sequence
  SARS-CoV-2/France/HF1805/2020__EPI_ISL_414628 spike protein (1-1211)(K986P_V987P_T887W_A1020W)
MFVFLVLLPLVSSQCVNLTTRTQLPPAYTNSFTRGVYYPDKVFRSSVLHSTQDLFLPFFSNVTWFHAIHVSGTNGTKRFDNPVLPFNDGVYFASTEKSNIIRGWIFGTTLDSKTQSLLIVNNATNVVIKVCEFQFCNDPFLGVYYHKNNKSWMESEFRVYSSANNCTFEYVSQPFLMDLEGKQGNFKNLREFVFKNIDGYFKIYSKHTPINLVRDLPQGFSALEPLVDLPIGINITRFQTLLALHRSYLTPGDSSSGWTAGAAAYYVGYLQPRTFLLKYNENGTITDAVDCALDPLSETKCTLKSFTVEKGIYQTSNFRVQPTESIVRFPNITNLCPFGEVFNATRFASVYAWNRKRISNCVADYSVLYNSASFSTFKCYGVSPTKLNDLCFTNVYADSFVIRGDEVRQIAPGQTGKIADYNYKLPDDFTGCVIAWNSNNLDSKVGGNYNYLYRLFRKSNLKPFERDISTEIYQAGSTPCNGVEGFNCYFPLQSYGFQPTNGVGYQPYRVVVLSFELLHAPATVCGPKKSTNLVKNKCVNFNFNGLTGTGVLTESNKKFLPFQQFGRDIADTTDAVRDPQTLEILDITPCSFGGVSVITPGTNTSNQVAVLYQGVNCTEVPVAIHADQLTPTWRVYSTGSNVFQTRAGCLIGAEHVNNSYECDIPIGAGICASYQTQTNSPRRARSVASQSIIAYTMSLGAENSVAYSNNSIAIPTNFTISVTTEILPVSMTKTSVDCTMYICGDSTECSNLLLQYGSFCTQLNRALTGIAVEQDKNTQEVFAQVKQIYKTPPIKDFGGFNFSQILPDPSKPSKRSFIEDLLFNKVTLADAGFIKQYGDCLGDIAARDLICAQKFNGLTVLPPLLTDEMIAQYTSALLAGTITSGWWFGAGAALQIPFAMQMAYRFNGIGVTQNVLYENQKLIANQFNSAIGKIQDSLSSTASALGKLQDVVNQNAQALNTLVKQLSSNFGAISSVLNDILSRLDPPEAEVQIDRLITGRLQSLQTYVTQQLIRAAEIRWSANLAATKMSECVLGQSKRVDFCGKGYHLMSFPQSAPHGVVFLHVTYVPAQEKNFTTAPAICHDGKAHFPREGVFVSNGTHWFVTQRNFYEPQIITTDNTFVSGNCDVVIGVVNNTVYDPLQPELDSFKEELDKYFKNHTSPDVDLGDISGINASVVNIQKEIDRLNEVAKNLNESLIDLQELGKYEQYIK

SEQ ID NO: 1777 - protein, 1211 aa, Artificial Sequence
  SARS-CoV-2/Netherlands/ZuidHolland_9/2020__EPI_ISL_414445 spike protein (1-1211)(K986P_V987P_T887W_A1020W)
MFVFLVLLPLVSSQCVNLTTRTQLPPAYTNSFTRGVYYPDKVFRSSVLHSTQDLFLPFFSNVTWFHAIHVSGTNGTKRFDNPVLPFNDGVYFASTEKSNIIRGWIFGTTLDSKTQSLLIVNNATNVVIKVCEFQFCNDPFLGVYYHKNNKSWMESEFRVYSSANNCTFEYVSQPFLMDLEGKQGNFKNLREFVFKNIDGYFKIYSKHTPINLVRDLPQGFSALEPLVDLPIGINITRFQTLLALHRSYLTPGDSSSGWTAGAAAYYVGYLQPRTFLLKYNENGTITDAVDCALDPLSETKCTLKSFTVEKGIYQTSNFRVQPTESIVRFPNITNLCPFGEVFNATRFASVYAWNRKRISNCVADYSVLYNSASFSTFKCYGVSPTKLNDLCFTNVYADSFVIRGDEVRQIAPGQTGKIADYNYKLPDDFTGCVIAWNSNNLDSKVGGNYNYLYRLFRKSNLKPFERDISTEIYQAGSTPCNGVEGFNCYFPLQSYGFQPTNGVGYQPYRVVVLSFELLHAPATVCGPKKSTNLVKNKCVNFNFNGLTGTGVLTESNKKFLPFQQFGRDIADTTDAVRDPQTLEILDITPCSFGGVSVITPGTNTSNQVAVLYQGVNCTEVPVAIHADQLTPTWRVYSTGSNVFQTRAGCLIGAEHVNNSYECDIPIGAGICASYQTQTNSPRRARSVASQSIIAYTMSLGAENSVAYSNNSIAIPTNFTISVTTEILPVSMTKTSVDCTMYICGDSTECSNLLLQYGSFCTQLNRALTGIAVEQDKNTQEVFAQVKQIYKTPPIKDFGGFNFSQILPDPSKPSKRSFIEDLLFNKVTLADAGFIKQYGDCLGDIAARDLICVQKFNGLTVLPPLLTDEMIAQYTSALLAGTITSGWWFGAGAALQIPFAMQMAYRFNGIGVTQNVLYENQKLIANQFNSAIGKIQDSLSSTASALGKLQDVVNQNAQALNTLVKQLSSNFGAISSVLNDILSRLDPPEAEVQIDRLITGRLQSLQTYVTQQLIRAAEIRWSANLAATKMSECVLGQSKRVDFCGKGYHLMSFPQSAPHGVVFLHVTYVPAQEKNFTTAPAICHDGKAHFPREGVFVSNGTHWFVTQRNFYEPQIITTDNTFVSGNCDVVIGIVNNTVYDPLQPELDSFKEELDKYFKNHTSPDVDLGDISGINASVVNIQKEIDRLNEVAKNLNESLIDLQELGKYEQYIK

SEQ ID NO: 1778 - protein, 1211 aa, Artificial Sequence
  SARS-CoV-2/Finland/FIN03032020A/2020__EPI_ISL_413602 spike protein (1-1211)(K986P_V987P_T887W_A1020W)
MFVFLVLLPLVSSQCVNLTTRTQLPPAYTNSFTRGVYYPDKVFRSSVLHSTQDLFLPFFSNVTWFHAIHVSGTNGTKRFDNPVLPFNDGVYFASTEKSNIIRGWIFGTTLDSKTQSLLIVNNATNVVIKVCEFQFCNDPFLGVYYHKNNKSWMESEFRVYSSANNCTFEYVSQPFLMDLEGKQGNFKNLREFVFKNIDGYFKIYSKHTPINLVRDLPQGFSALEPLVDLPIGINITRFQTLLALHRSYLTPGDSSSGWTAGAAAYYVGYLQPRTFLLKYNENGTITDAVDCALDPLSETKCTLKSFTVEKGIYQTSNFRVQPTESIVRFPNITNLCPFGEVFNATRFASVYAWNRKRISNCVADYSVLYNSASFSTFKCYGVSPTKLNDLCFTNVYADSFVIRGDEVRQIAPGQTGKIADYNYKLPDDFTGCVISWNSNNLDSKVGGNYNYLYRLFRKSNLKPFERDISTEIYQAGSTPCNGVEGFNCYFPLQSYGFQPTNGVGYQPYRVVVLSFELLHAPATVCGPKKSTNLVKNKCVNFNFNGLTGTGVLTESNKKFLPFQQFGRDIADTTDAVRDPQTLEILDITPCSFGGVSVITPGTNTSNQVAVLYQGVNCTEVPVAIHADQLTPTWRVYSTGSNVFQTRAGCLIGAEHVNNSYECDIPIGAGICASYQTQTNSPRRARSVASQSIIAYTMSLGAENSVAYSNNSIAIPTNFTISVTTEILPVSMTKTSVDCTMYICGDSTECSNLLLQYGSFCTQLNRALTGIAVEQDKNTQEVFAQVKQIYKTPPIKDFGGFNFSQILPDPSKPSKRSFIEDLLFNKVTLADAGFIKQYGDCLGDIAARDLICAQKFNGLTVLPPLLTDEMIAQYTSALLAGTITSGWWFGAGAALQIPFAMQMAYRFNGIGVTQNVLYENQKLIANQFNSAIGKIQDSLSSTASALGKLQDVVNQNAQALNTLVKQLSSNFGAISSVLNDILSRLDPPEAEVQIDRLITGRLQSLQTYVTQQLIRAAEIRWSANLAATKMSECVLGQSKRVDFCGKGYHLMSFPQSAPHGVVFLHVTYVPAQEKNFTTAPAICHDGKAHFPREGVFVSNGTHWFVTQRNFYEPQIITTDNTFVSGNCDVVIGIVNNTVYDPLQPELDSFKEELDKYFKNHTSPDVDLGDISGINASVVNIQKEIDRLNEVAKNLNESLIDLQELGKYEQYIK

SEQ ID NO: 1779 - protein, 1211 aa, Artificial Sequence
  SARS-CoV-2/France/GE1977/2020__EPI_ISL_414632 spike protein (1-1211)(K986P_V987P_T887W_A1020W)
MFVFLVLLPLVSSQCVNLTTRTQLPPAYTNSFTRGVYYPDKVFRSSVLHSTQDLFLPFFSNVTWFHAIHVSGTNGTKRFDNPVLPFNDGVYFASTEKSNIIRGWIFGTTLDSKTQSLLIVNNATNVVIKVCEFQFCNDPFLGVYYHKNNKSWMESEFRVYSSANNCTFEYVSQPFLMDLEGKQGNFKNLREFVFKNIDGYFKIYSKHTPINLVRDLPQGFSALEPLVDLPIGINITRFQTLLALHRSYLTPGDSSSGWTAGAAAYYVGYLQPRTFLLKYNENGTITDAVDCALDPLSETKCTLKSFTVEKGIYQTSNFRVQPTESIVRFPNITNLCPFGEVFNATRFASVYAWNRKRISNCVADYSVLYNSASFSTFKCYGVSPTKLNDLCFTNVYADSFVIRGDEVRQIAPGQTGKIADYNYKLPDDFTGCVIAWNSNNLDSKVGGNYNYLYRLFRKSNLKPFERDISTEIYQAGSTPCNGVEGFNCYFPLQSYGFQPTNGVGYQPYRVVVLSFELLHAPATVCGPKKSTNLVKNKCVNFNFNGLTGTGVLTESNKKFLPFQQFGRDIADTTDAVRDPQTLEILDITPCSFGGVSVITPGTNTSNQVAVLYQGVNCTEVPVAIHADQLTPTWRVYSTGSNVFQTRAGCLIGAEHVNNSYECDIPIGAGICASYQTQTNSPRRARSVASQSIIAYTMSLGAENSVAYSNNSIAIPTNFTISVTTEILPVSMTKTSVDCTMYICGDSTECSNLLLQYGSFCTQLNRALTGIAVEQDKNTQEVFAQVKQIYKTPPIKDFGGFNFSQILPDPSKPSKRSFIEDLLFNKVTLADAGFIKQYGDCLGDIAARDLICAQKFNGLTVLPPLLTDEMIAQYTSALLAGTITSGWWFGAGAALQIPFAMQMAYRFNGIGVTQNVLYENQKLIANQFNSAIGKIQDSLFSTASALGKLQDVVNQNAQALNTLVKQLSSNFGAISSVLNDILSRLDPPEAEVQIDRLITGRLQSLQTYVTQQLIRAAEIRWSANLAATKMSECVLGQSKRVDFCGKGYHLMSFPQSAPHGVVFLHVTYVPAQEKNFTTAPAICHDGKAHFPREGVFVSNGTHWFVTQRNFYEPQIITTDNTFVSGNCDVVIGIVNNTVYDPLQPELDSFKEELDKYFKNHTSPDVDLGDISGINASVVNIQKEIDRLNEVAKNLNESLIDLQELGKYEQYIK

SEQ ID NO: 1780 - protein, 1211 aa, Artificial Sequence
  SARS-CoV-2/Finland/FIN-313/2020__EPI_ISL_414641 spike protein (1-1211)(K986P_V987P_T887W_A1020W)
MFVFLVLLPLVSSQCVNLTTRTQLPPAYTNSFTRGVYYPDKVFRSSVLHSTQDLFLPFFSNVTWFHAIHVSGTNGTKRFDNPVLPFNDGVYFASTEKSNIIRGWIFGTTLDSKTQSLLIVNNATNVVIKVCEFQFCNDPFLGVYYHKNNKSWMESEFRVYSSANNCTFEYVSQPFLMDLEGKQGNFKNLREFVFKNIDGYFKIYSKHTPINLVRDLPQGFSALEPLVDLPIGINITRFKTLLALHRSYLTPGDSSSGWTAGAAAYYVGYLQPRTFLLKYNENGTITDAVDCALDPLSETKCTLKSFTVEKGIYQTSNFRVQPTESIVRFPNITNLCPFGEVFNATRFASVYAWNRKRISNCVADYSVLYNSASFSTFKCYGVSPTKLNDLCFTNVYADSFVIRGDEVRQIAPGQTGKIADYNYKLPDDFTGCVIAWNSNNLDSKVGGNYNYLYRLFRKSNLKPFERDISTEIYQAGSTPCNGVEGFNCYFPLQSYGFQPTNGVGYQPYRVVVLSFELLHAPATVCGPKKSTNLVKNKCVNFNFNGLTGTGVLTESNKKFLPFQQFGRDIADTTDAVRDPQTLEILDITPCSFGGVSVITPGTNTSNQVAVLYQGVNCTEVPVAIHADQLTPTWRVYSTGSNVFQTRAGCLIGAEHVNNSYECDIPIGAGICASYQTQTNSPRRARSVASQSIIAYTMSLGAENSVAYSNNSIAIPTNFTISVTTEILPVSMTKTSVDCTMYICGDSTECSNLLLQYGSFCTQLNRALTGIAVEQDKNTQEVFAQVKQIYKTPPIKDFGGFNFSQILPDPSKPSKRSFIEDLLFNKVTLADAGFIKQYGDCLGDIAARDLICAQKFNGLTVLPPLLTDEMIAQYTSALLAGTITSGWWFGAGAALQIPFAMQMAYRFNGIGVTQNVLYENQKLIANQFNSAIGKIQDSLSSTASALGKLQDVVNQNAQALNTLVKQLSSNFGAISSVLNDILSRLDPPEAEVQIDRLITGRLQSLQTYVTQQLIRAAEIRWSANLAATKMSECVLGQSKRVDFCGKGYHLMSFPQSAPHGVVFLHVTYVPAQEKNFTTAPAICHDGKAHFPREGVFVSNGTHWFVTQRNFYEPQIITTDNTFVSGNCDVVIGIVNNTVYDPLQPELDSFKEELDKYFKNHTSPDVDLGDISGINASVVNIQKEIDRLNEVAKNLNESLIDLQELGKYEQYIK

SEQ ID NO: 1781 - protein, 1211 aa, Artificial Sequence
  SARS-CoV-2/Netherlands/ZuidHolland_2/2020__EPI_ISL_414556 spike protein (1-1211)(K986P_V987P_T887W_A1020W)
MFVFLVLLPLVSSQCVNLTTRTQLPPAYTNSFTRGVYYPDKVFRSSVLHSTQDLFLPFFSNVTWFHAIHVSGTNGTKRFDNPVLPFNDGVYFASTEKSNIIRGWIFGTTLDSKTQSLLIVNNATNVVIKVCEFQFCNDPFLGVYYHKNNKSWMESEFRVYSSANNCTFEYVSQPFLMDLEGKQGNFKNLREFVFKNIDGYFKIYSKHTPINLVRDLPQGFSALEPLVDLPIGINITRFQTLLALHRSYLTPGDSSSGWTAGAAAYYVGYLQPRTFLLKYNENGTITDAVDCALDPLSETKCTLKSFTVEKGIYQTSNFRVQPTESIVRFPNITNLCPFGEVFNATRFASVYAWNRKRISNCVADYSVLYNSASFSTFKCYGVSPTKLNDLCFTNVYADSFVIRGDEVRQIAPGQTGKIADYNYKLPDDFTGCVIAWNSNNLDSKVGGNYNYLYRLFRKSNLKPFERDISTEIYQAGSTPCNGVEGFNCYFPLQSYGFQPTNGVGYQPYRVVVLSFELLHAPATVCGPKKSTNLVKNKCVNFNFNGLTGTGVLTESNKKFLPFQQFGRDIADTTDAVRDPQTLEILDITPCSFGGVSVITPGTNTSNQVAVLYQGVNCTEVPVAIHADQLTPTWRVYSTGSNVFQTRAGCLIGAEHVNNSYECDIPIGAGICASYQTQTNSPRRARSVASQSIIAYTMSLGAENSVAYSNNSIAIPTNFTISVTTEILPVSMTKTSVDCTMYICGDSTECSNLLLQYGSFCTQLNRALTGIALEQDKNTQEVFAQVKQIYKTPPIKDFGGFNFSQILPDPSKPSKRSFIEDLLFNKVTLADAGFIKQYGDCLGDIAARDLICAQKFNGLTVLPPLLTDEMIAQYTSALLAGTITSGWWFGAGAALQIPFAMQMAYRFNGIGVTQNVLYENQKLIANQFNSAIGKIQDSLSSTASALGKLQDVVNQNAQALNTLVKQLSSNFGAISSVLNDILSRLDPPEAEVQIDRLITGRLQSLQTYVTQQLIRAAEIRWSANLAATKMSECVLGQSKRVDFCGKGYHLMSFPQSAPHGVVFLHVTYVPAQEKNFTTAPAICHDGKAHFPREGVFVSNGTHWFVTQRNFYEPQIITTDNTFVSGNCDVVIGIVNNTVYDPLQPELDSFKEELDKYFKNHTSPDVDLGDISGINASVVNIQKEIDRLNEVAKNLNESLIDLQELGKYEQYIK

SEQ ID NO: 1782 - protein, 1211 aa, Artificial Sequence
  SARS-CoV-2/USA/WA-UW31/2020__EPI_ISL_414618 spike protein (1-1211)(K986P_V987P_T887W_A1020W)
MFVFLVLLPLVSSQCVNLTTRTQLPPAYTNSFTRGVYYPDKVFRSSVLHSTQDLFLPFFSNVTWFHAIHVSGTNGTKRFDNPVLPFNDGVYFASTEKSNIIRGWIFGTTLDSKTQSLLIVNNATNVVIKVCEFQFCNDPFLGVYYHKNNKSWMESEFRVYSSANNCTFEYVSQPFLMDLEGKQGNFKNLREFVFKNIDGYFKIYSKHTPINLVRDLPQGFSALEPLVDLPIGINITRFQTLLALHRSYLTPGDSSSGWTAGAAAYYVGYLQPRTFLLKYNENGTITDAVDCALDPLSETKCTLKSFTVEKGIYQTSNFRVQPTESIVRFPNITNLCPFGEVFNATRFASVYAWNRKRISNCVADYSVLYNSASFSTFKCYGVSPTKLNDLCFTNVYADSFVIRGDEVRQIAPGQTGKIADYNYKLPDDFTGCVIAWNSNNLDSKVGGNYNYLYRLFRKSNLKPFERDISTEIYQAGSTPCNGAEGFNCYFPLQSYGFQPTNGVGYQPYRVVVLSFELLHAPATVCGPKKSTNLVKNKCVNFNFNGLTGTGVLTESNKKFLPFQQFGRDIADTTDAVRDPQTLEILDITPCSFGGVSVITPGTNTSNQVAVLYQDVNCTEVPVAIHADQLTPTWRVYSTGSNVFQTRAGCLIGAEHVNNSYECDIPIGAGICASYQTQTNSPRRARSVASQSIIAYTMSLGAENSVAYSNNSIAIPTNFTISVTTEILPVSMTKTSVDCTMYICGDSTECSNLLLQYGSFCTQLNRALTGIAVEQDKNTQEVFAQVKQIYKTPPIKDFGGFNFSQILPDPSKPSKRSFIEDLLFNKVTLADAGFIKQYGDCLGDIAARDLICAQKFNGLTVLPPLLTDEMIAQYTSALLAGTITSGWWFGAGAALQIPFAMQMAYRFNGIGVTQNVLYENQKLIANQFNSAIGKIQDSLSSTASALGKLQDVVNQNAQALNTLVKQLSSNFGAISSVLNDILSRLDPPEAEVQIDRLITGRLQSLQTYVTQQLIRAAEIRWSANLAATKMSECVLGQSKRVDFCGKGYHLMSFPQSAPHGVVFLHVTYVPAQEKNFTTAPAICHDGKAHFPREGVFVSNGTHWFVTQRNFYEPQIITTDNTFVSGNCDVVIGIVNNTVYDPLQPELDSFKEELDKYFKNHTSPDVDLGDISGINASVVNIQKEIDRLNEVAKNLNESLIDLQELGKYEQYIK

SEQ ID NO: 1783 - protein, 1211 aa, Artificial Sequence
  SARS-CoV-2/South Korea/SNU01/2020__EPI_ISL_411929 spike protein (1-1211)(K986P_V987P_T887W_A1020W)
MFVFLVLLPLVSSQCVNLTTRTQLPPAYTNSFTRGVYYPDKVFRSSVLHSTQDLFLPFFSNVTWFHAIHVSGTNGTKRFDNPVLPFNDGVYFASTEKSNIIRGWIFGTTLDSKTQSLLIVNNATNVVIKVCEFQFCNDPFLGVYYHKNNKSWMESEFRVYSSANNCTFEYVSQPFLMDLEGKQGNFKNLREFVFKNIDGYFKIYSKHTPINLVRDLPQGFWALEPLVDLPIGINITRFQTLLALHRSYLTPGDSSSGWTAGAAAYYVGYLQPRTFLLKYNENGTITDAVDCALDPLSETKCTLKSFTVEKGIYQTSNFRVQPTESIVRFPNITNLCPFGEVFNATRFASVYAWNRKRISNCVADYSVLYNSASFSTFKCYGVSPTKLNDLCFTNVYADSFVIRGDEVRQIAPGQTGKIADYNYKLPDDFTGCVIAWNSNNLDSKVGGNYNYLYRLFRKSNLKPFERDISTEIYQAGSTPCNGVEGFNCYFPLQSYGFQPTNGVGYQPYRVVVLSFELLHAPATVCGPKKSTNLVKNKCVNFNFNGLTGTGVLTESNKKFLPFQQFGRDIADTTDAVRDPQTLEILDITPCSFGGVSVITPGTNTSNQVAVLYQDVNCTEVPVAIHADQLTPTWRVYSTGSNVFQTRAGCLIGAEHVNNSYECDIPIGAGICASYQTQTNSPRRARSVASQSIIAYTMSLGAENSVAYSNNSIAIPTNFTISVTTEILPVSMTKTSVDCTMYICGDSTECSNLLLQYGSFCTQLNRALTGIAVEQDKNTQEVFAQVKQIYKTPPIKDFGGFNFSQILPDPSKPSKRSFIEDLLFNKVTLADAGFIKQYGDCLGDIAARDLICAQKFNGLTVLPPLLTDEMIAQYTSALLAGTITSGWWFGAGAALQIPFAMQMAYRFNGIGVTQNVLYENQKLIANQFNSAIGKIQDSLSSTASALGKLQDVVNQNAQALNTLVKQLSSNFGAISSVLNDILSRLDPPEAEVQIDRLITGRLQSLQTYVTQQLIRAAEIRWSANLAATKMSECVLGQSKRVDFCGKGYHLMSFPQSAPHGVVFLHVTYVPAQEKNFTTAPAICHDGKAHFPREGVFVSNGTHWFVTQRNFYEPQIITTDNTFVSGNCDVVIGIVNNTVYDPLQPELDSFKEELDKYFKNHTSPDVDLGDISGINASVVNIQKEIDRLNEVAKNLNESLIDLQELGKYEQYIK

SEQ ID NO: 1784 - protein, 1211 aa, Artificial Sequence
  SARS-CoV-2/China/WF0004/2020__EPI_ISL_413694 spike protein (1-1211)(K986P_V987P_T887W_A1020W)
MFVFLVLLPLVSSQCVNLTTRTQLPPAYTNSFTRGVYYPDKVFRSSVLHSTQDLFLPFFSNVTWFHAIHVSGTNGTKRFDNPVLPFNDGVYFASTEKSNIIRGWIFGTTLDSKTQSLLIVNNATNVVIKVCEFQFCNDPFLGVYYHKNNKSWTESEFRVYSSANNCTFEYVSQPFLMDLEGKQGNFKNLREFVFKNIDGYFKIYSKHTPINLVRDLPQGFSALEPLVDLPIGINITRFQTLLALHRSYLTPGDSSSGWTAGAAAYYVGYLQPRTFLLKYNENGTITDAVDCALDPLSETKCTLKSFTVEKGIYQTSNFRVQPTESIVRFPNITNLCPFGEVFNATRFASVYAWNRKRISNCVADYSVLYNSASFSTFKCYGVSPTKLNDLCFTNVYADSFVIRGDEVRQIAPGQTGKIADYNYKLPDDFTGCVIAWNSNNLDSKVGGNYNYLYRLFRKSNLKPFERDISTEIYQAGSTPCNGVEGFNCYFPLQSYGFQPTNGVGYQPYRVVVLSFELLHAPATVCGPKKSTNLVKNKCVNFNFNGLTGTGVLTESNKKFLPFQQFGRDIADTTDAVRDPQTLEILDITPCSFGGVSVITPGTNTSNQVAVLYQDVNCTEVPVAIHADQLTPTWRVYSTGSNVFQTRAGCLIGAEHVNNSYECDIPIGAGICASYQTQTNSPRRARSVASQSIIAYTMSLGAENSVAYSNNSIAIPTNFTISVTTEILPVSMTKTSVDCTMYICGDSTECSNLLLQYGSFCTQLNRALTGIAVEQDKNTQEVFAQVKQIYKTPPIKDFGGFNFSQILPDPSKPSKRSFIEDLLFNKVTLADAGFIKQYGDCLGDIAARDLICAQKFNGLTVLPPLLTDEMIAQYTSALLAGTITSGWWFGAGAALQIPFAMQMAYRFNGIGVTQNVLYENQKLIANQFNSAIGKIQDSLSSTASALGKLQDVVNQNAQALNTLVKQLSSNFGAISSVLNDILSRLDPPEAEVQIDRLITGRLQSLQTYVTQQLIRAAEIRWSANLAATKMSECVLGQSKRFDFCGKGYHLMSFPQSAPHGVVFLHVTYVPAQEKNFTTAPAICHDGKAHFPREGVFVSNGTHWFVTQRNFYEPQIITTDNTFVSGNCDVVIGIVNNTVYDPLQPELDSFKEELDKYFKNHTSPDVDLGDISGINASVVNIQKEIDRLNEVAKNLNESLIDLQELGKYEQYIK

SEQ ID NO: 1785 - protein, 1211 aa, Artificial Sequence
  SARS-CoV-2/China/WF0028/2020__EPI_ISL_413791 spike protein (1-1211)(K986P_V987P_T887W_A1020W)
MFVFLVLLPLVSSQCVNLTTRTQLPPAYTNSFTRGVYYPDKVFRSSVLHSTQDLFLPFFSNVTWFHAIHVSGTNGTKRFDNPVLPFNDGVYFASTEKSNIIRGWIFGTTLDSKTQSLLIVNNATNVVIKVCEFQFCNDPFLGVYYHKNNKSWMESEFRVYSSANNCTFEYVSQPFLMDLEGKQGNFKNLREFVFKNIDGYFKIYSKHTPINLVRDLPQGFSALEPLVDLPIGINITRFQTLLALHRSYLTPGDSSSGWTAGAAAYYVGYLQPRTFLLKYNENGTITDAVDCALDPLSETKCTLKSFTVEKGIYQTSNFRVQPTESIVRFPNITNLCPFGEVFNATRFASVYAWNRKRISNCVADYSVLYNSASFSTFKCYGVSPTKLNDLCFTNVYADSFVIRGDEVRQIAPGQTGKIADYNYKLPDDFTGCVIAWNSNNLDSKVGGNYNYLYRLFRKSNLKPFERDISTEIYQAGSTPCNGVEGFNCYFPLQSYGFQPTNGVGYQPYRVVVLSFELLHAPATVCGPKKSTNLVKNKCVNFNFNGLTGTGVLTESNKKFLPFQQFGRDIADTTDAVRDPQTLEILDITPCSFGGVSVITPGTNTSNQVAVLYQDVNCTEVPVAIHADQLTPTWRVYSTGSNVFQTRAGCLIGAEHVNNSYECDIPIGAGICASYQTQTNSPRRARSVASQSIIAYTMSLGAENSVAYSNNSIAIPTNFTISVTTEILPVSMTKTSVDCTMYICGDSTECSNLLLQYGSFCTQLNRALTGIAVEQDKNTQEVFAQVKQIYKTPPIKDFGGFNFSQILPDPSKPSKRSFIEDLLFNKVTLADAGFIKQYGDCLGDIAARDLICAQKFNGLTVLPPLLTDEMIAQYTSALLAGTITSGWWFGAGAALQIPFAMQMAYRFNGIGVTQNVLYENQKLIANQFNSAIGKIQDSLSSTASALGKLQDVVNQNAQALNTLVKQLSSNFGAISSVLNDILSRLDPPEAEVQIDRLITGRLQSLQTYVTQQLIRAAEIRWSANLAATKMSECVLGQSKRVDFCGKGYHLMSFPQSAPHGVVFLHVTYVPAQEKNFTTAPAICHDGKAHFPREGVFVSNGTHWFVTQRNFYEPQIITTDNTFVSGNCDVVIGIVNNTVYDPLQPELESFKEELDKYFKNHTSPDVDLGDISGINASVVNIQKEIDRLNEVAKNLNESLIDLQELGKYEQYIK

SEQ ID NO: 1786 - protein, 1211 aa, Artificial Sequence
  SARS-CoV-2/2019-nCoV/USA-CruiseA-18/2020__MT159716.1 spike protein (1-1211)(K986P_V987P_T887W_A1020W)
MFVFLVLLPLVSSQCVNLTTRTQLPPAYTNSFTRGVYYPDKVFRSSVLHSTQDLFLPFFSNVTWFHAIHVSGTNGTKRFDNPVLPFNDGVYFASTEKSNIIRGWIFGTTLDSKTQSLLIVNNATNVVIKVCEFQFCNDPFLGVYYHKNNKSWMESELRVYSSANNCTFEYVSQPFLMDLEGKQGNFKNLREFVFKNIDGYFKIYSKHTPINLVRDLPQGFSALEPLVDLPIGINITRFQTLLALHRSYLTPGDSSSGWTAGAAAYYVGYLQPRTFLLKYNENGTITDAVDCALDPLSETKCTLKSFTVEKGIYQTSNFRVQPTESIVRFPNITNLCPFGEVFNATRFASVYAWNRKRISNCVADYSVLYNSASFSTFKCYGVSPTKLNDLCFTNVYADSFVIRGDEVRQIAPGQTGKIADYNYKLPDDFTGCVIAWNSNNLDSKVGGNYNYLYRLFRKSNLKPFERDISTEIYQAGSTPCNGVEGFNCYFPLQSYGFQPTNGVGYQPYRVVVLSFELLHAPATVCGPKKSTNLVKNKCVNFNFNGLTGTGVLTESNKKFLPFQQFGRDIADTTDAVRDPQTLEILDITPCSFGGVSVITPGTNTSNQVAVLYQDVNCTEVPVAIHADQLTPTWRVYSTGSNVFQTRAGCLIGAEHVNNSYECDIPIGAGICASYQTQTNSPRRARSVASQSIIAYTMSLGAENSVAYSNNSIAIPTNFTISVTTEILPVSMTKTSVDCTMYICGDSTECSNLLLQYGSFCTQLNRALTGIAVEQDKNTQEVFAQVKQIYKTPPIKDFGGFNFSQILPDPSKPSKRSFIEDLLFNKVTLADAGFIKQYGDCLGDIAARDLICAQKFNGLTVLPPLLTDEMIAQYTSALLAGTITSGWWFGAGAALQIPFAMQMAYRFNGIGVTQNVLYENQKLIANQFNSAIGKIQDSLSSTASALGKLQDVVNQNAQALNTLVKQLSSNFGAISSVLNDILSRLDPPEAEVQIDRLITGRLQSLQTYVTQQLIRAAEIRWSANLAATKMSECVLGQSKRVDFCGKGYHLMSFPQSAPHGVVFLHVTYVPAQEKNFTTAPAICHDGKAHFPREGVFVSNGTHWFVTQRNFYEPQIITTDNTFVSGNCDVVIGIVNNTVYDPLQPELDSFKEELDKYFKNHTSPDVDLGDISGINASVVNIQKEIDRLNEVAKNLNESLIDLQELGKYEQYIK

SEQ ID NO: 1787 - protein, 1211 aa, Artificial Sequence
  SARS-CoV-2/SARS-CoV-2/Yunnan-01/human/2020/CHN__MT049951.1 spike protein (1-1211)(K986P_V987P_T887W_A1020W)
MFVFLVLLPLVSSQCVNLTTRTQLPPANTNSFTRGVYYPDKVFRSSVLHSTQDLFLPFFSNVTWFHAIHVSGTNGTKRFDNPVLPFNDGVYFASTEKSNIIRGWIFGTTLDSKTQSLLIVNNATNVVIKVCEFQFCNDPFLGVYYHKNNKSWMESEFRVYSSANNCTFEYVSQPFLMDLEGKQGNFKNLREFVFKNIDGYFKIYSKHTPINLVRDLPQGFSALEPLVDLPIGINITRFQTLLALHRSYLTPGDSSSGWTAGAAAYYVGYLQPRTFLLKYNENGTITDAVDCALDPLSETKCTLKSFTVEKGIYQTSNFRVQPTESIVRFPNITNLCPFGEVFNATRFASVYAWNRKRISNCVADYSVLYNSASFSTFKCYGVSPTKLNDLCFTNVYADSFVIRGDEVRQIAPGQTGKIADYNYKLPDDFTGCVIAWNSNNLDSKVGGNYNYLYRLFRKSNLKPFERDISTEIYQAGSTPCNGVEGFNCYFPLQSYGFQPTNGVGYQPYRVVVLSFELLHAPATVCGPKKSTNLVKNKCVNFNFNGLTGTGVLTESNKKFLPFQQFGRDIADTTDAVRDPQTLEILDITPCSFGGVSVITPGTNTSNQVAVLYQDVNCTEVPVAIHADQLTPTWRVYSTGSNVFQTRAGCLIGAEHVNNSYECDIPIGAGICASYQTQTNSPRRARSVASQSIIAYTMSLGAENSVAYSNNSIAIPTNFTISVTTEILPVSMTKTSVDCTMYICGDSTECSNLLLQYGSFCTQLNRALTGIAVEQDKNTQEVFAQVKQIYKTPPIKDFGGFNFSQILPDPSKPSKRSFIEDLLFNKVTLADAGFIKQYGDCLGDIAARDLICAQKFNGLTVLPPLLTDEMIAQYTSALLAGTITSGWWFGAGAALQIPFAMQMAYRFNGIGVTQNVLYENQKLIANQFNSAIGKIQDSLSSTASALGKLQDVVNQNAQALNTLVKQLSSNFGAISSVLNDILSRLDPPEAEVQIDRLITGRLQSLQTYVTQQLIRAAEIRWSANLAATKMSECVLGQSKRVDFCGKGYHLMSFPQSAPHGVVFLHVTYVPAQEKNFTTAPAICHDGKAHFPREGVFVSNGTHWFVTQRNFYEPQIITTDNTFVSGNCDVVIGIVNNTVYDPLQPELDSFKEELDKYFKNHTSPDVDLGDISGINASVVNIQKEIDRLNEVAKNLNESLIDLQELGKYEQYIK

SEQ ID NO: 1788 - protein, 1211 aa, Artificial Sequence
  SARS-CoV-2/USA/WA-UW292/2020__EPI_ISL_418077 spike protein (1-1211)(K986P_V987P_T887W_A1020W)
MFVFLVLLPLVSSQCVNLTTRTQLPPAYTNSFTRGVYYPDKVFRSSVLHSTQDLFLPFFSNVTWFHAIHVSGTNGTKRFDNPVLPFNDGVYFASTEKSNIIRGWIFGTTLDSKTQSLLIVNNATNVVIKVCEFQFCNDPFLGVYYHKNNKSWMESEFRVYSSANNCTFEYVSQPFLMDLEGKQGNFKNLREFVFKNIDGYFKIYSKHTPINLVRDLPQGFSALEPLVDLPIGINITRFQTLLALHRSYLTPGDSSSGWTAGAAAYYVGYLQPRTFLLKYNENGTITDAVDCALDPLSETKCTLKSFTVEKGIYQTSNFRVQPTESIVRFPNITNLCPFGEVFNATRFASVYAWNRKRISNCVADYSVLYNSASFSTFKCYGVSPTKLNDLCFTNVYADSFVIRGDEVRQIAPGQTGKIADYNYKLPDDFTGCVIAWNSNNLDSKVGGNYNYLYRLFRKSNLKPFERDISTEIYQASSTPCNGVEGFNCYFPLQSYGFQPTNGVGYQPYRVVVLSFELLHAPATVCGPKKSTNLVKNKCVNFNFNGLTGTGVLTESNKKFLPFQQFGRDIADTTDAVRDPQTLEILDITPCSFGGVSVITPGTNTSNQVAVLYQDVNCTEVPVAIHADQLTPTWRVYSTGSNVFQTRAGCLIGAEHVNNSYECDIPIGAGICASYQTQTNSPRRARSVASQSIIAYTMSLGAENSVAYSNNSIAIPTNFTISVTTEILPVSMTKTSVDCTMYICGDSTECSNLLLQYGSFCTQLNRALTGIAVEQDKNTQEVFAQVKQIYKTPPIKDFGGFNFSQILPDPSKPSKRSFIEDLLFNKVTLADAGFIKQYGDCLGDIAARDLICAQKFNGLTVLPPLLTDEMIAQYTSALLAGTITSGWWFGAGAALQIPFAMQMAYRFNGIGVTQNVLYENQKLIANQFNSAIGKIQDSLSSTASALGKLQDVVNQNAQALNTLVKQLSSNFGAISSVLNDILSRLDPPEAEVQIDRLITGRLQSLQTYVTQQLIRAAEIRWSANLAATKMSECVLGQSKRVDFCGKGYHLMSFPQSAPHGVVFLHVTYVPAQEKNFTTAPAICHDGKAHFPREGVFVSNGTHWFVTQRNFYEPQIITTDNTFVSGNCDVVIGIVNNTVYDPLQPELDSFKEELDKYFKNHTSPDVDLGDISGINASVVNIQKEIDRLNEVAKNLNESLIDLQELGKYEQYIK

SEQ ID NO: 1789 - protein, 1211 aa, Artificial Sequence
  SARS-CoV-2/Iceland/192/2020__EPI_ISL_417819 spike protein (1-1211)(K986P_V987P_T887W_A1020W)
MFVFFVLLPLVSSQCVNLTTRTQLPPAYTNSFTRGVYYPDKVFRSSVLHSTQDLFLPFFSNVTWFHAIHVSGTNGTKRFDNPVLPFNDGVYFASTEKSNIIRGWIFGTTLDSKTQSLLIVNNATNVVIKVCEFQFCNDPFLGVYYHKNNKSWMESEFRVYSSANNCTFEYVSQPFLMDLEGKQGNFKNLREFVFKNIDGYFKIYSKHTPINLVRDLPQGFSALEPLVDLPIGINITRFQTLLALHRSYLTPGDSSSGWTAGAAAYYVGYLQPRTFLLKYNENGTITDAVDCALDPLSETKCTLKSFTVEKGIYQTSNFRVQPTESIVRFPNITNLCPFGEVFNATRFASVYAWNRKRISNCVADYSVLYNSASFSTFKCYGVSPTKLNDLCFTNVYADSFVIRGDEVRQIAPGQTGKIADYNYKLPDDFTGCVIAWNSNNLDSKVGGNYNYLYRLFRKSNLKPFERDISTEIYQAGSTPCNGVEGFNCYFPLQSYGFQPTNGVGYQPYRVVVLSFELLHAPATVCGPKKSTNLVKNKCVNFNFNGLTGTGVLTESNKKFLPFQQFGRDIADTTDAVRDPQTLEILDITPCSFGGVSVITPGTNTSNQVAVLYQGVNCTEVPVAIHADQLTPTWRVYSTGSNVFQTRAGCLIGAEHVNNSYECDIPIGAGICASYQTQTNSPRRARSVASQSIIAYTMSLGAENSVAYSNNSIAIPTNFTISVTTEILPVSMTKTSVDCTMYICGDSTECSNLLLQYGSFCTQLNRALTGIAVEQDKNTQEVFAQVKQIYKTPPIKDFGGFNFSQILPDPSKPSKRSFIEDLLFNKVTLADAGFIKQYGDCLGDIAARDLICAQKFNGLTVLPPLLTDEMIAQYTSALLAGTITSGWWFGAGAALQIPFAMQMAYRFNGIGVTQNVLYENQKLIANQFNSAIGKIQDSLSSTASALGKLQDVVNQNAQALNTLVKQLSSNFGAISSVLNDILSRLDPPEAEVQIDRLITGRLQSLQTYVTQQLIRAAEIRWSANLAATKMSECVLGQSKRVDFCGKGYHLMSFPQSAPHGVVFLHVTYVPAQEKNFTTAPAICHDGKAHFPREGVFVSNGTHWFVTQRNFYEPQIITTDNTFVSGNCDVVIGIVNNTVYDPLQPELDSFKEELDKYFKNHTSPDVDLGDISGINASVVNIQKEIDRLNEVAKNLNESLIDLQELGKYEQYIK

SEQ ID NO: 1790 - protein, 1211 aa, Artificial Sequence
  SARS-CoV-2/Belgium/ULG-6939/2020__EPI_ISL_417020 spike protein (1-1211)(K986P_V987P_T887W_A1020W)
MFVFLVLLPLVSSQCVNLTTRTQLPPAYTNSFTRGVYYPDKVFRSSVLHSTQDLFLPFFSNVTWFHAIHVSGTNGTKRFDNPVLPFNDGVYFASTEKSNIIRGWIFGTTLDSKTQSLLIVNNATNVVIKVCEFQFCNDPFLGVYYHKNNKSWMESEFRVYSSANNCTFEYVSQPFLMDLEGKQGNFKNLREFVFKNIDGYFKIYSKHTPINLVRDLPQGFSALEPLVDLPIGINITRFQTLLALHRSYLTPGDSSSGWTAGAAAYYVGYLQPRTFLLKYNENGTITDAVDCALDPLSETKCTLKSFTVEKGIYQTSNFRVQPTESIVRFPNITNLCPFGEVFNATRFASVYAWNRKRISNCVADYSVLYNSASFSTFKCYGVSPTKLNDLCFTNVYADSFVIRGDEVRQIAPGQTGKIADYNYKLPDDFTGCVIAWNSNNLDSKVGGNYNYLYRLFRKSNLKPFERDISTEIYQAGSTPCNGVEGFNCYFPLQSYGFQPTNGVGYQPYRVVVLSFELLHAPATVCGPKKSTNLVKNKCVNFNFNGLTGTGVLTESNKKFLPFQQFGRDIADTTDAVRDPQTLEILDITPCSFGGVSVITPGTNTSNQVAVLYQGVNCTEVPVAIHADQLTPTWRVYSTGSNVFQTRAGCLIGAEHVNNSYECDIPIGAGICASYQTQTNSPRRARSVASQSIIAYTMSLGAENSVVYSNNSIAIPTNFTISVTTEILPVSMTKTSVDCTMYICGDSTECSNLLLQYGSFCTQLNRALTGIAVEQDKNTQEVFAQVKQIYKTPPIKDFGGFNFSQILPDPSKPSKRSFIEDLLFNKVTLADAGFIKQYGDCLGDIAARDLICAQKFNGLTVLPPLLTDEMIAQYTSALLAGTITSGWWFGAGAALQIPFAMQMAYRFNGIGVTQNVLYENQKLIANQFNSAIGKIQDSLSSTASALGKLQDVVNQNAQALNTLVKQLSSNFGAISSVLNDILSRLDPPEAEVQIDRLITGRLQSLQTYVTQQLIRAAEIRWSANLAATKMSECVLGQSKRVDFCGKGYHLMSFPQSAPHGVVFLHVTYVPAQEKNFTTAPAICHDGKAHFPREGVFVSNGTHWFVTQRNFYEPQIITTDNTFVSGNCDVVIGIVNNTVYDPLQPELDSFKEELDKYFKNHTSPDVDLGDISGINASVVNIQKEIDRLNEVAKNLNESLIDLQELGKYEQYIK

SEQ ID NO: 1791 - protein, 1211 aa, Artificial Sequence
  SARS-CoV-2/France/HF2496/2020__EPI_ISL_418231 spike protein (1-1211)(K986P_V987P_T887W_A1020W)
MFVFLVLLPLVSSQCVNLTTRTQLPPAYTNSFTRGVYYPDKVFRSSVLHSTQDLFLPFFSNVTWFHAIHVSGTNGTKRFDNPVLPFNDGVYFASTEKSNIIRGWIFGTTLDSKTQSLLIVNNATNVVIKVCEFQFCNDPFLGVYYHKNNKSWMESEFRVYSSANNCTFEYVSQPFLMDLEGKQGNFKNLREFVFKNIDGYFKIYSKHTPINLVRDLPQGFSALEPLVDLPIGINITRFQTLLALHRSYLTPGDSSSGWTAGAAAYYVGYLQPRTFLLKYNENGTITDAVDCALDPLSETKCTLKSFTVEKGIYQTSNFRVQPTESIVRFPNITNLCPFGEVFNATRFASVYAWNRKRISNCVADYSVLYNSASFSTFKCYGVSPTKLNDLCFTNVYADSFVIRGDEVRQIAPGQTGKIADYNYKLPDDFTGCVIAWNSNNLDSKVGGNYNYLYRLFRKSNLKPFERDISTEIYQAGSTPCNGVEGFNCYFPLQSYGFQPTNGVGYQPYRVVVLSFELLHAPATVCGPKKSTNLVKNKCVNFNFNGLTGTGVLTESNKKFLPFQQFGRDIADTTDAVRDPQTLEILDITPCSFGGVSVITPGTNTSNQVAVLYQGVNCTEVPVAIHADQLTPTWRVYSTGSNVFQTRAGCLIGAEHVNNSYECDIPIGAGICASYQTQTNSPRRARSVASQSIIAYTMSLGAENSVAYSNNSIAIPTNFTISVTTEILPVSMTKTSVDCTMYICGDSTECSNLLLQYGSFCTQLNRALTGIAVEQDKNTQEVFAQVKQIYKTPPIKDFGGFNFSQILPDPSKPSKRSFIEDLLFNKVTLADAGFIKQYGDCLGDIVARDLICAQKFNGLTVLPPLLTDEMIAQYTSALLAGTITSGWWFGAGAALQIPFAMQMAYRFNGIGVTQNVLYENQKLIANQFNSAIGKIQDSLSSTASALGKLQDVVNQNAQALNTLVKQLSSNFGAISSVLNDILSRLDPPEAEVQIDRLITGRLQSLQTYVTQQLIRAAEIRWSANLAATKMSECVLGQSKRVDFCGKGYHLMSFPQSAPHGVVFLHVTYVPAQEKNFTTAPAICHDGKAHFPREGVFVSNGTHWFVTQRNFYEPQIITTDNTFVSGNCDVVIGIVNNTVYDPLQPELDSFKEELDKYFKNHTSPDVDLGDISGINASVVNIQKEIDRLNEVAKNLNESLIDLQELGKYEQYIK

SEQ ID NO: 1792 - protein, 1211 aa, Artificial Sequence
  SARS-CoV-2/USA/WA-UW291/2020__EPI_ISL_418076 spike protein (1-1211)(K986P_V987P_T887W_A1020W)
MFVFLVLLPLVSSQCVNLTTRTQLPPAYTNSFTRGVYYPDKVFRSSVLHSTQDLFLPFFSNVTWFHAIHVSGTNGTKRFDNPVLPFNDGVYFASTEKSNIIRGWIFGTTLDSKTQSLLIVNNATNVVIKVCEFQFCNDPFLGVYYHKNNKSWMESEFRVYSSANNCTFEYVSQPFLMDLEGKQGNFKNLREFVFKNIDGYFKIYSKHTPINLVRDLPQGFSALEPLVDLPIGINITRFQTLLALHRSYLTPGDSSSGWTAGAAAYYVGYLQPRTFLLKYNENGTITDAVDCALDPLSETKCTLKSFTVEKGIYQTSNFRVQPTESIVRFPNITNLCPFGEVFNATRFASVYAWNRKRISNCVADYSVLYNSASFSTFKCYGVSPTKLNDLCFTNVYADSFVIRGDEVRQIAPGQTGKIADYNYKLPDDFTGCVIAWNSNNLDSKVGGNYNYLYRLFRKSNLKPFERDISTEIYQAGSTPCNGVEGFNCYFPLQSYGFQPTNGVGYQPYRVVVLSFELLHAPATVCGPKKSTNLVKNKCVNFNFNGLTGTGVLTESNKKFLPFQQFGRDIADTTDAVRDPQTLEILDITPCSFGGVSVITPGTNTSNQVAVLYQGVNCTEVPVAIHADQLTPTWRVYSTGSNVFQTRAGCLIGAEHVNNSYECDIPIGAGICASYQTQTNSPRRARSVASQSIIAYTMSLGAENSVAYSNNSIAIPTNFTISVTTEILPVSMTKTSVDCTMYICGDSTECSNLLLQYGSFCTQLNRALTGIAVEQDKNTQEVFAQVKQIYKTPPIKDFGGFNFSQILPDPSKPSKRSFIEDLLFNKVTLADAGFIKQYGDCLGDIAARDLICAQKFNGLTVLPPLLTDEMIAQYTSALLAGTITSGWWFGAGAALQIPFAMQMAYRFNGIGVTQNVLYENQKLIANQFNSAIGKIQYSLSSTASALGKLQDVVNQNAQALNTLVKQLSSNFGAISSVLNDILSRLDPPEAEVQIDRLITGRLQSLQTYVTQQLIRAAEIRWSANLAATKMSECVLGQSKRVDFCGKGYHLMSFPQSAPHGVVFLHVTYVPAQEKNFTTAPAICHDGKAHFPREGVFVSNGTHWFVTQRNFYEPQIITTDNTFVSGNCDVVIGIVNNTVYDPLQPELDSFKEELDKYFKNHTSPDVDLGDISGINASVVNIQKEIDRLNEVAKNLNESLIDLQELGKYEQYIK

SEQ ID NO: 1793 - protein, 1211 aa, Artificial Sequence; identical to SEQ ID NO: 1756
  SARS-CoV-2/Portugal/PT0034/2020__EPI_ISL_418019 spike protein (1-1211)(K986P_V987P_T887W_A1020W)

SEQ ID NO: 1794 - protein, 1211 aa, Artificial Sequence
  SARS-CoV-2/Iceland/202/2020__EPI_ISL_417750 spike protein (1-1211)(K986P_V987P_T887W_A1020W)
MFVFLVLLPLVSSQCVNLTTRTQLPPAYTNSFTRGVYYPDKVFRSSVLHSTQDLFLPFFSNVTWFHAIHVSGTNGTKRFDNPVLPFNDGVYFASTEKSNIIRGWIFGTTLDSKTQSLLIVNNATNVVIKVCEFQFCNDPFLGVYYHKNNKSWMESEFRVYSSANNCTFEYVSQPFLMDLEGKQGNFKNLREFVFKNIDGYFKIYSKHTPINLVRDLPQGFSALEPLVDLPIGINITRFQTLLALHRSYLTPGDSSSGWTAGAAAYYVGYLQPRTFLLKYNENGTITDAVDCALDPLSETKCTLKSFTVEKGIYQTSNFRVQPTESIVRFPNITNLCPFGEVFNATRFASVYAWNRKRISNCVADYSVLYNSASFSTFKCYGVSPTKLNDLCFTNVYADSFVIRGDEVRQIAPGQTGKIADYNYKLPDDFTGCVIAWNSNNLDSKVGGNYNYLYRLFRKSNLKPFERDISTEIYQAGSTPCNGVEGFNCYFPLQSYGFQPTNGVGYQPYRVVVLSFELLHAPATVCGPKKSTNLVKNKCVNFNFNGLTGTGVLTESNKKFLPFQQFGRDIADTTDAVRDPQTLEILDITPCSFGGVSVITPGTNTSNQVAVLYQDVNCTEVPVAIHADQLTPTWRVYSTGSNVFQTRAGCLIGAEHVNNSYECDIPIGAGICASYQTQTNSPRRARSVASQSIIAYTMSLGAENSVAYSNNSIAIPTNFTISVTTEILPVSMTKTSVDCTMYICGDSTECSNLLLQYGSFCTQLNRALTGIAVEQDKNTQEVFAQVKQIYKTPPIKDFGGFNFSQILPDPSKPSKRSFIEDLLFNKVTLADAGFIKQYGDCLGDIAARDLICAQKFNGLTVLPPLLTDEMIAQYTSALLAGTITSGWWFGAGAALQIPFAMQMAYRFNGIGVTQNVLYENQKLIANQFNSAIGKIQDSLSSTASALGKLQDVVNQNAQALNTLVKQLSSNFGAISSVLNDILSRLDPPEAEVQIDRLITGRLQSLQTYVTQQLIRAAEIRWSANLAATKMSECVLGQSKRVDFCGKGYHLMSFPQSAPHGVVFLHVTYVPAQEKNFTTAPAICHDGKAHFPREGVFVSNGTHWFVTQRNFYEPQIITTDNTFVSGNCDVVIGIVNNTVYDPLQPELDSFKEELDKYFKNHTSPDVDLGDIPGINASVVNIQKEIDRLNEVAKNLNESLIDLQELGKYEQYIK

SEQ ID NO: 1795 - protein, 1211 aa, Artificial Sequence
  SARS-CoV-2/USA/WA-UW261/2020__EPI_ISL_418046 spike protein (1-1211)(K986P_V987P_T887W_A1020W)
MFVFLVLLPLVSSQCVNLTTRTQLPPAYTNSFTRGVYYPDKVFRSSVLHSTQDLFLPFFSNVTWFHAIHVSGTNGTKRFDNPVLPFNDGVYFASTEKSNIIRGWIFGTTLDSKTQSLLIVNNATNVVIKVCEFQFCNDPFLGVYYHKNNKSWMESEFRVYSSANNCTFEYVSQPFLMDLEGKQGNFKNLREFVFKNIDGYFKIYSKHTPINLVRDLPQGFSALEPLVDLPIGINITRFQTLLALHRSYLTPGDSSSGWTAGAAAYYVGYLQPRTFLLKYNENGTITDAVDCALDPLSETKCTLKSFTVEKGIYQTSNFRVQPTESIVRFPNITNLCPFGEVFNATRFTSVYAWNRKRISNCVADYSVLYNSASFSTFKCYGVSPTKLNDLCFTNVYADSFVIRGDEVRQIAPGQTGKIADYNYKLPDDFTGCVIAWNSNNLDSKVGGNYNYLYRLFRKSNLKPFERDISTEIYQAGSTPCNGVEGFNCYFPLQSYGFQPTNGVGYQPYRVVVLSFELLHAPATVCGPKKSTNLVKNKCVNFNFNGLTGTGVLTESNKKFLPFQQFGRDIADTTDAVRDPQTLEILDITPCSFGGVSVITPGTNTSNQVAVLYQDVNCTEVPVAIHADQLTPTWRVYSTGSNVFQTRAGCLIGAEHVNNSYECDIPIGAGICASYQTQTNSPRRARSVASQSIIAYTMSLGAENSVAYSNNSIAIPTNFTISVTTEILPVSMTKTSVDCTMYICGDSTECSNLLLQYGSFCTQLNRALTGIAVEQDKNTQEVFAQVKQIYKTPPIKDFGGFNFSQILPDPSKPSKRSFIEDLLFNKVTLADAGFIKQYGDCLGDIAARDLICAQKFNGLTVLPPLLTDEMIAQYTSALLAGTITSGWWFGAGAALQIPFAMQMAYRFNGIGVTQNVLYENQKLIANQFNSAIGKIQDSLSSTASALGKLQDVVNQNAQALNTLVKQLSSNFGAISSVLNDILSRLDPPEAEVQIDRLITGRLQSLQTYVTQQLIRAAEIRWSANLAATKMSECVLGQSKRVDFCGKGYHLMSFPQSAPHGVVFLHVTYVPAQEKNFTTAPAICHDGKAHFPREGVFVSNGTHWFVTQRNFYEPQIITTDNTFVSGNCDVVIGIVNNTVYDPLQPELDSFKEELDKYFKNHTSPDVDLGDISGINASVVNIQKEIDRLNEVAKNLNESLIDLQELGKYEQYIK

SEQ ID NO: 1796 - protein, 1211 aa, Artificial Sequence
  SARS-CoV-2/Portugal/PT0035/2020__EPI_ISL_418020 spike protein (1-1211)(K986P_V987P_T887W_A1020W)
MFVFLVLLPLVSSQCVNLTTRTQLPPAYTNSFTRGVYYPDKVFRSSVLHSTQDLFLPFFSNVTWFHAIHVSGTNGTKRFDNPVLPFNDGVYFASTEKSNIIRGWIFGTTLDSKTQSLLIVNNATNVVIKVCEFQFCNDPFLGVYYHKNNKSWMESEFRVYSSANNCTFEYVSQPFLMDLEGKQGNFKNLREFVFKNIDGYFKIYSKHTPINLVRDLPQGFSALEPLVDLPIGINITRFQTLLALHRSYLTPGDSSSGWTAGAAAYYVGYLQPRTFLLKYNENGTITDAVDCALDPLSETKCTLKSFTVEKGIYQTSNFRVQPTESIVRFPNITNLCPFGEVFNATRFASVYAWNRKRISNCVADYSVLYNSASFSTFKCYGVSPTKLNDLCFTNVYADSFVIRGDEVRQIAPGQTGKIADYNYKLPDDFTGCVIAWNSNNLDSKVGGNYNYLYRLFRKSNLKPFERDISTEIYQAGSTPCNGVEGFNCYFPLQSYGFQPTNGVGYQPYRVVVLSFELLHAPATVCGPKKSTNLVKNKCVNFNFNGLTGTGVLTESNKKFLPFQQFGRDIADTTDAVRDPQTLEILDITPCSFGGVSVITPGTNTSNQVAVLYQDVNCTEVPVAIHADQLTPTWRVYSTGSNVFQTRAGCLIGAEHVNNSYECDIPIGAGICASYQTQTNSPRRARSVASQSIIAYTMSLGAENSVAYSNNSIAIPTNFTISVTTEILPVSMTKTSVDCTMYICGDSTECSNLLLQYGSFCTQLNRALTGIAVEQDKNTQEVFAQVKQIYKTPPIKDFGGFNFSQILPDPSKPSKRSFIEDLLFNKVTLADAGFIKQYGDCLGDISARDLICAQKFNGLTVLPPLLTDEMIAQYTSALLAGTITSGWWFGAGAALQIPFAMQMAYRFNGIGVTQNVLYENQKLIANQFNSAIGKIQDSLSSTASALGKLQDVVNQNAQALNTLVKQLSSNFGAISSVLNDILSRLDPPEAEVQIDRLITGRLQSLQTYVTQQLIRAAEIRWSANLAATKMSECVLGQSKRVDFCGKGYHLMSFPQSAPHGVVFLHVTYVPAQEKNFTTAPAICHDGKAHFPREGVFVSNGTHWFVTQRNFYEPQIITTDNTFVSGNCDVVIGIVNNTVYDPLQPELDSFKEELDKYFKNHTSPDVDLGDISGINASVVNIQKEIDRLNEVAKNLNESLIDLQELGKYEQYIK

SEQ ID NO: 1797 - protein, 1211 aa, Artificial Sequence
  SARS-CoV-2/USA/NY-NYUMC7/2020__EPI_ISL_418192 spike protein (1-1211)(K986P_V987P_T887W_A1020W)
MFVFLVLLPLVSSQCVNLTTRTQLPPAYTNSFTRGVYYPDKVFRSSVLHSTQDLFLPFFSNVTWFHAIHVSGTNGTKRFDNPVLPFNDGVYFASTEKSNIIRGWIFGTTLDSKTQSLLIVNNATNVVIKVCEFQFCNDPFLGVYHHKNNKSWMESEFRVYSSANNCTFEYVSQPFLMDLEGKQGNFKNLREFVFKNIDGYFKIYSKHTPINLVRDLPQGFSALEPLVDLPIGINITRFQTLLALHRSYLTPGDSSSGWTAGAAAYYVGYLQPRTFLLKYNENGTITDAVDCALDPLSETKCTLKSFTVEKGIYQTSNFRVQPTESIVRFPNITNLCPFGEVFNATRFASVYAWNRKRISNCVADYSVLYNSASFSTFKCYGVSPTKLNDLCFTNVYADSFVIRGDEVRQIAPGQTGKIADYNYKLPDDFTGCVIAWNSNNLDSKVGGNYNYLYRLFRKSNLKPFERDISTEIYQAGSTPCNGVEGFNCYFPLQSYGFQPTNGVGYQPYRVVVLSFELLHAPATVCGPKKSTNLVKNKCVNFNFNGLTGTGVLTESNKKFLPFQQFGRDIADTTDAVRDPQTLEILDITPCSFGGVSVITPGTNTSNQVAVLYQGVNCTEVPVAIHADQLTPTWRVYSTGSNVFQTRAGCLIGAEHVNNSYECDIPIGAGICASYQTQTNSPRRARSVASQSIIAYTMSLGAENSVAYSNNSIAIPTNFTISVTTEILPVSMTKTSVDCTMYICGDSTECSNLLLQYGSFCTQLNRALTGIAVEQDKNTQEVFAQVKQIYKTPPIKDFGGFNFSQILPDPSKPSKRSFIEDLLFNKVTLADAGFIKQYGDCLGDIAARDLICAQKFNGLTVLPPLLTDEMIAQYTSALLAGTITSGWWFGAGAALQIPFAMQMAYRFNGIGVTQNVLYENQKLIANQFNSAIGKIQDSLSSTASALGKLQDVVNQNAQALNTLVKQLSSNFGAISSVLNDILSRLDPPEAEVQIDRLITGRLQSLQTYVTQQLIRAAEIRWSANLAATKMSECVLGQSKRVDFCGKGYHLMSFPQSAPHGVVFLHVTYVPAQEKNFTTAPAICHDGKAHFPREGVFVSNGTHWFVTQRNFYEPQIITTDNTFVSGNCDVVIGIVNNTVYDPLQPELDSFKEELDKYFKNHTSPDVDLGDISGINASVVNIQKEIDRLNEVAKNLNESLIDLQELGKYEQYIK

SEQ ID NO: 1798 - protein, 1211 aa, Artificial Sequence
  SARS-CoV-2/Iceland/189/2020__EPI_ISL_417709 spike protein (1-1211)(K986P_V987P_T887W_A1020W)
MFVFLVLLPLVSSQCVNLTTRTQLPPAYTNSFTRGVYYPDKVFRSSVLHSTQDLFLPFFSNVTWFHAIHVSGTNGTKRFDNPVLPFNDGVYFASTEKSNIIRGWIFGTTLDSKTQSLLIVNNATNVVIKVCEFQFCNDPFLGVYYHKNNKSWMESEFRVYSSANNCTFEYVSQPFLMDLEGKQGNFKNLREFVFKNIDGYFKIYSKHTPINLVRDLPQGFSALEPLVDLPIGINITRFQTLLALHRSYLTPGDSSSGWTAGAAAYYVGYLQPRTFLLKYNENGTITDAVDCALDPLSETKCTLKSFTVEKGIYQTSNFRVQPTESIVRFPNITNLCPFGEVFNATRFASVYAWNRKRISNCVADYSVLYNSASFSTFKCYGVSPTKLNDLCFTNVYADSFVIRGDEVRQIAPGQTGKIADYNYKLPDDFTGCVIAWNSNNLDSKVGGNYNYLYRLFRKSNLKPFERDISTEIYQAGSTPCNGVEGFNCYFPLQSYGFQPTNGVGYQPYRVVVLSFELLHAPATVCGPKKSTNLVKNKCVNFNFNGLTGTGVLTESNKKFLPFQQFGRDIADTTDAVRDPQTLEILDITPCSFGGVSVITPGTNTSNQVAVLYQGVNCTEVPVAIHADQLTPTWRVYSTGSNVFQTRAGCLIGAEHVNNSYECDIPIGAGICASYQTQTNSPRRARSVASQSIIAYTMSLGAENSVAYSNNSIAIPTNFTISVTTEILPVSMTKTSVDCTMYICGDSTECSNLLLQYGSFCTQLNRALTGIAVEQDKNTQEVFAQVKQIYKTPPIKDFGGFNFSQILPDPSKPSKRSFIEDLLFNKVTLADAGFTKQYGDCLGDIAARDLICAQKFNGLTVLPPLLTDEMIAQYTSALLAGTITSGWWFGAGAALQIPFAMQMAYRFNGIGVTQNVLYENQKLIANQFNSAIGKIQDSLSSTASALGKLQDVVNQNAQALNTLVKQLSSNFGAISSVLNDILSRLDPPEAEVQIDRLITGRLQSLQTYVTQQLIRAAEIRWSANLAATKMSECVLGQSKRVDFCGKGYHLMSFPQSAPHGVVFLHVTYVPAQEKNFTTAPAICHDGKAHFPREGVFVSNGTHWFVTQRNFYEPQIITTDNTFVSGNCDVVIGIVNNTVYDPLQPELDSFKEELDKYFKNHTSPDVDLGDISGINASVVNIQKEIDRLNEVAKNLNESLIDLQELGKYEQYIK

SEQ ID NO: 1799 - protein, 1211 aa, Artificial Sequence
  SARS-CoV-2/Australia/NSW56/2020__EPI_ISL_417408 spike protein (1-1211)(K986P_V987P_T887W_A1020W)
MFVFLVLLPLVSSQCVNLTTRTQLPPAYTNSFTRGVYYPDKVFRSSVLHSTQDLFLPFFSNVTWFHAIHVSGTNGTKRFDNPVLPFNDGVYFASTEKSNIIRGWIFGTTLDSKTQSLLIVNNATNVVIKVCEFQFCNDPFLGVYYHKNNKSWMESEFRVYSSANNCTFEYVSQPFLMDLEGKQGNFKNLREFVFKNIDGYFKIYSKHTPINLVRDLPQGFSALEPLVDLPIGINITRFQTLLALHRSYLTPGDSSSGWTAGAAAYYVGYLQPRTFLLKYNENGTITDAVDCALDPLSETKCTLKSFTVEKGIYQTSNFRVQPTESIVRFPNITNLCPFGEVFNATRFASVYAWNRKRISNCVADYSVLYNSASFSTFKCYGVSPTKLNDLCFTNVYADSFVIRGDEVRQIAPGQTGKIADYNYKLPDDFTGCVIAWNSNNLDSKVGGNYNYLYRLFRKSNLKPFERDISTEIYQAGSTPCNGVEGFNCYFPLQSYGFQPTNGVGYQPYRVVVLSFELLHAPATVCGPKKSTNLVKNKCVNFNFNGLTGTGVLTESNKKFLPFQQFGRDIADTTDAVRDPQTLEILDITPCSFGGVSVITPGTNTSNQVAVLYQDVNCTEVPVAIHADQLTPTWRVYSTGSNVFQTRAGCLIGAEHVNNSYECDIPIGAGICASYQTQTNSPRRARSVASQSIIAYTMSLGAENSVAYSNNSIAIPTNFTISVTTEILPVSMTKTSVDCTMYICGDSTECSNLLLQYGSFCTQLNRALTGIAVEQDKNTQEVFAQVKQIYKTPPIKDFGGFNFSQILPDSSKPSKRSFIEDLLFNKVTLADAGFIKQYGDCLGDIAARDLICAQKFNGLTVLPPLLTDEMIAQYTSALLAGTITSGWWFGAGAALQIPFAMQMAYRFNGIGVTQNVLYENQKLIANQFNSAIGKIQDSLSSTASALGKLQDVVNQNAQALNTLVKQLSSNFGAISSVLNDILSRLDPPEAEVQIDRLITGRLQSLQTYVTQQLIRAAEIRWSANLAATKMSECVLGQSKRVDFCGKGYHLMSFPQSAPHGVVFLHVTYVPAQEKNFTTAPAICHDGKAHFPREGVFVSNGTHWFVTQRNFYEPQIITTDNTFVSGNCDVVIGIVNNTVYDPLQPELDSFKEELDKYFKNHTSPDVDLGDISGINASVVNIQKEIDRLNEVAKNLNESLIDLQELGKYEQYIK

SEQ ID NO: 1800 - protein, 1211 aa, Artificial Sequence
  SARS-CoV-2/Iceland/280/2020__EPI_ISL_417608 spike protein (1-1211)(K986P_V987P_T887W_A1020W)
MFVFLVLLPLVSSQCVNLTTRTQLPPAYTNSFTRGVYYPDKVFRSSVLHSTQDLFLPFFSNVTWFHAIHVSGTNGTKRFDNPVLPFNDGVYFASTEKSNIIRGWIFGTTLDSKTQSLLIVNNATNVVIKVCEFQFCNDPFLGVYYHKNNKSWMESEFRVYSSANNCTFEYVSQPFLMDLEGKQGNFKNLREFVFKNIDGYFKIYSKHTPINLVRDLPQGFSALEPLVDLPIGINITRFQTLLALHRSYLTPGDSSSGWTAGAAAYYVGYLQPRTFLLKYNENGTITDAVDCALDPLSETKCTLKSFTVEKGIYQTSNFRVQPTESIVRFPNITNLCPFGEVFNATRFASVYAWNRKRISNCVADYSVLYNSASFSTFKCYGVSPTKLNDLCFTNVYADSFVIRGDEVRQIAPGQTGKIADYNYKLPDDFTGCVIAWNSNNLDSKVGGNYNYLYRLFRKSNLKPFERDISTEIYQAGSTPCNGVEGFNCYFPLQSYGFQPTNGVGYQPYRVVVLSFELLHAPATVCGPKKSTNLVKNKCVNFNFNGLTGTGVLTESNKKFLPFQQFGRDIADTTDAVRDPQTLEILDITPCSFGGVSVITPGTNTSNQVAVLYQGVNCTEVPVAIHADQLTPTWRVYSTGSNVFQTRAGCLIGAEHVNNSYECDIPIGAGICASYHTQTNSPRRARSVASQSIIAYTMSLGAENSVAYSNNSIAIPTNFTISVTTEILPVSMTKTSVDCTMYICGDSTECSNLLLQYGSFCTQLNRALTGIAVEQDKNTQEVFAQVKQIYKTPPIKDFGGFNFSQILPDPSKPSKRSFIEDLLFNKVTLADAGFIKQYGDCLGDIAARDLICAQKFNGLTVLPPLLTDEMIAQYTSALLAGTITSGWWFGAGAALQIPFAMQMAYRFNGIGVTQNVLYENQKLIANQFNSAIGKIQDSLSSTASALGKLQDVVNQNAQALNTLVKQLSSNFGAISSVLNDILSRLDPPEAEVQIDRLITGRLQSLQTYVTQQLIRAAEIRWSANLAATKMSECVLGQSKRVDFCGKGYHLMSFPQSAPHGVVFLHVTYVPAQEKNFTTAPAICHDGKAHFPREGVFVSNGTHWFVTQRNFYEPQIITTDNTFVSGNCDVVIGIVNNTVYDPLQPELDSFKEELDKYFKNHTSPDVDLGDISGINASVVNIQKEIDRLNEVAKNLNESLIDLQELGKYEQYIK

SEQ ID NO: 1801 - protein, 1211 aa, Artificial Sequence; identical to SEQ ID NO: 1756
  SARS-CoV-2/Iceland/247/2020__EPI_ISL_417575 spike protein (1-1211)(K986P_V987P_T887W_A1020W)

SEQ ID NO: 1802 - protein, 1211 aa, Artificial Sequence
  SARS-CoV-2/Iceland/238/2020__EPI_ISL_417566 spike protein (1-1211)(K986P_V987P_T887W_A1020W)
MFVFLVLLPLVSSQCVNLTTRTQLPPAYTNSFTRGVYYPDKVFRSSVLHSTQDLFLPFFSNVTWFHAIHVSGTNGTKRFDNPVLPFNDGVYFASTEKSNIIRGWIFGTTLDSKTQSLLIVNNATNVVIKVCEFQFCNDPFLGVYYHKNNKSWMESEFRVYSSANNCTFEYVSQPFLMDLEGKQGNFKNLREFVFKNIDGYFKIYSKHTPINLVRDLPQGFSALEPLVDLPIGINITRFQTLLALHRSYLTPGDSSSGWTAGAAAYYVGYLQPRTFLLKYNENGTITDAVDCALDPLSETKCTLKSFTVEKGIYQTSNFRVQPTESIVRFPNITNLCPFGEVFNATRFASVYAWNRKRISNCVADYSVLYNSASFSTFKCYGVSPTKLNDLCFTNVYADSFVIRGDEVRQIAPGQTGKIADYNYKLPDDFTGCVIAWNSNNLDSKVGGNYNYLYRLFRKSNLKPFERDISTEIYQAGSTPCNGVEGFNCYFPLQSYGFQPTNGVGYQPYRVVVLSFELLHAPATVCGPKKSTNLVKNKCVNFNFNGLTGTGVLTESNKKFLPFQQFGRDIADTTDAVRDPQTLEILDITPCSFGGVSVITPGTNTSNQVAVLYQGVNCTEVPVAIHADQLTPTWRVYSTGSNVFQTRAGCLIGAEHVNNSYECDIPIGAGICASYQTQTNSPRRARSVASQSIIAYTMSLGAENSVAYSNNSIAIPTNFTISVTTEILPVSMTKTSVDCTMYICGDSTECSNLLLQYGSFCTQLNRALTGIAVEQDKNTQEVFAQVKQIYKTPPIKDFGGFNFSQILPDPSKPSKRSFIEDLLFNKVTLADVGFIKQYGDCLGDIAARDLICAQKFNGLTVLPPLLTDEMIAQYTSALLAGTITSGWWFGAGAALQIPFAMQMAYRFNGIGVTQNVLYENQKLIANQFNSAIGKIQDSLSSTASALGKLQDVVNQNAQALNTLVKQLSSNFGAISSVLNDILSRLDPPEAEVQIDRLITGRLQSLQTYVTQQLIRAAEIRWSANLAATKMSECVLGQSKRVDFCGKGYHLMSFPQSAPHGVVFLHVTYVPAQEKNFTTAPAICHDGKAHFPREGVFVSNGTHWFVTQRNFYEPQIITTDNTFVSGNCDVVIGIVNNTVYDPLQPELDSFKEELDKYFKNHTSPDVDLGDISGINASVVNIQKEIDRLNEVAKNLNESLIDLQELGKYEQYIK

SEQ ID NO: 1803 - protein, 1211 aa, Artificial Sequence
  SARS-CoV-2/Greece/16/2020__EPI_ISL_418265 spike protein (1-1211)(K986P_V987P_T887W_A1020W)
MFVFLVLLPLVSSQCVNLTTRTQLPPAYTNSFTRGVYYPDKVFRSSVLHSTQDLFLPFFSNVTWFHAIHVSGTNGTKRFDNPVLPFNDGVYFASTEKSNIIRGWIFGTTLDSKTQSLLIVNNATNVVIKVCEFQFCNDPFLGVYYHKNNKSWMESEFRVYSSANNCTFEYVSQPFLMDLEGKQGNFKNLREFVFKNVDGYFKIYSKHTPINLVRDLPQGFSALEPLVDLPIGINITRFQTLLALHRSYLTPGDSSSGWTAGAAAYYVGYLQPRTFLLKYNENGTITDAVDCALDPLSETKCTLKSFTVEKGIYQTSNFRVQPTESIVRFPNITNLCPFGEVFNATRFASVYAWNRKRISNCVADYSVLYNSASFSTFKCYGVSPTKLNDLCFTNVYADSFVIRGDEVRQIAPGQTGKIADYNYKLPDDFTGCVIAWNSNNLDSKVGGNYNYLYRLFRKSNLKPFERDISTEIYQAGSTPCNGVEGFNCYFPLQSYGFQPTNGVGYQPYRVVVLSFELLHAPATVCGPKKSTNLVKNKCVNFNFNGLTGTGVLTESNKKFLPFQQFGRDIADTTDAVRDPQTLEILDITPCSFGGVSVITPGTNTSNQVAVLYQDVNCTEVPVAIHADQLTPTWRVYSTGSNVFQTRAGCLIGAEHVNNSYECDIPIGAGICASYQTQTNSPRRARSVASQSIIAYTMSLGAENSVAYSNNSIAIPTNFTISVTTEILPVSMTKTSVDCTMYICGDSTECSNLLLQYGSFCTQLNRALTGIAVEQDKNTQEVFAQVKQIYKTPPIKDFGGFNFSQILPDPSKPSKRSFIEDLLFNKVTLADAGFIKQYGDCLGDIAARDLICAQKFNGLTVLPPLLTDEMIAQYTSALLAGTITSGWWFGAGAALQIPFAMQMAYRFNGIGVTQNVLYENQKLIANQFNSAIGKIQDSLSSTASALGKLQDVVNQNAQALNTLVKQLSSNFGAISSVLNDILSRLDPPEAEVQIDRLITGRLQSLQTYVTQQLIRAAEIRWSANLAATKMSECVLGQSKRVDFCGKGYHLMSFPQSAPHGVVFLHVTYVPAQEKNFTTAPAICHDGKAHFPREGVFVSNGTHWFVTQRNFYEPQIITTDNTFVSGNCDVVIGIVNNTVYDPLQPELDSFKEELDKYFKNHTSPDVDLGDISGINASVVNIQKEIDRLNEVAKNLNESLIDLQELGKYEQYIK

SEQ ID NO: 1804 - protein, 1211 aa, Artificial Sequence
  SARS-CoV-2/Iceland/319/2020__EPI_ISL_417648 spike protein (1-1211)(K986P_V987P_T887W_A1020W)
MFVFLVLLPLVSSQCVNLTTRTQLPPAYTNSFTRGVYYPDKVFRSSVLHSTQDLFLPFFSNVTWFHAIHVSGTNGTKRFDNPVLPFNDGVYFASTEKSNIIRGWIFGTTLDSKTQSLLIVNNATNVVIKVCEFQFCNDPFLGVYYHKNNKSWMESEFRVYSSANNCTFEYVSQPFLIDLEGKQGNFKNLREFVFKNIDGYFKIYSKHTPINLVRDLPQGFSALEPLVDLPIGINITRFQTLLALHRSYLTPGDSSSGWTAGAAAYYVGYLQPRTFLLKYNENGTITDAVDCALDPLSETKCTLKSFTVEKGIYQTSNFRVQPTESIVRFPNITNLCPFGEVFNATRFASVYAWNRKRISNCVADYSVLYNSASFSTFKCYGVSPTKLNDLCFTNVYADSFVIRGDEVRQIAPGQTGKIADYNYKLPDDFTGCVIAWNSNNLDSKVGGNYNYLYRLFRKSNLKPFERDISTEIYQAGSTPCNGVEGFNCYFPLQSYGFQPTNGVGYQPYRVVVLSFELLHAPATVCGPKKSTNLVKNKCVNFNFNGLTGTGVLTESNKKFLPFQQFGRDIADTTDAVRDPQTLEILDITPCSFGGVSVITPGTNTSNQVAVLYQGVNCTEVPVAIHADQLTPTWRVYSTGSNVFQTRAGCLIGAEHVNNSYECDIPIGAGICASYQTQTNSPRRARSVASQSIIAYTMSLGAENSVAYSNNSIAIPTNFTISVTTEILPVSMTKTSVDCTMYICGDSTECSNLLLQYGSFCTQLNRALTGIAVEQDKNTQEVFAQVKQIYKTPPIKDFGGFNFSQILPDPSKPSKRSFIEDLLFNKVTLADAGFIKQYGDCLGDIAARDLICAQKFNGLTVLPPLLTDEMIAQYTSALLAGTITSGWWFGAGAALQIPFAMQMAYRFNGIGVTQNVLYENQKLIANQFNSAIGKIQDSLSSTASALGKLQDVVNQNAQALNTLVKQLSSNFGAISSVLNDILSRLDPPEAEVQIDRLITGRLQSLQTYVTQQLIRAAEIRWSANLAATKMSECVLGQSKRVDFCGKGYHLMSFPQSAPHGVVFLHVTYVPAQEKNFTTAPAICHDGKAHFPREGVFVSNGTHWFVTQRNFYEPQIITTDNTFVSGNCDVVIGIVNNTVYDPLQPELDSFKEELDKYFKNHTSPDVDLGDISGINASVVNIQKEIDRLNEVAKNLNESLIDLQELGKYEQYIK

SEQ ID NO: 1805 - protein, 1211 aa, Artificial Sequence
  SARS-CoV-2/Congo/94/2020__EPI_ISL_417947 spike protein (1-1211)(K986P_V987P_T887W_A1020W)
MFVFLVLLPLVSSQCVNLTTRTQLPPAYTNSFTRGVYYPDKVFRSSVLHSTQDLFLPFFSNVTWFHAIHVSGTNGTKRFDNPVLPFNDGVYFASTEKSNIIRGWIFGTTLDSKTQSLLIVNNATNVVIKVCEFQFCNDPFLGVYYHKNNKSWMESEFRVYSSANNCTFEYVSQPFLMDLEGKQGNFKNLREFVFKNIDGYFKIYSKHTPINLVRDLPQGFSALEPLVDLPIGINITRFQTLLALHRSYLTPGDSSSGWTAGAAAYYVGYLQPRTFLLKYNENGTITDAVDCALDPLSETKCTLKSFTVEKGIYQTSNFRVQPTESIVRFPNITNLCPFGEVFNATRFASVYAWNRKRISNCVADYSVLYNSASFSTFKCYGVSPTKLNDLCFTNVYADSFVIRGDEVRQIAPGQTGKIADYNYKLPDDFTGCVIAWNSNNLDSKVGGNYNYLYRLFRKSNLKPFERDISTEIYQAGSTPCNGVEGFNCYFPLQSYGFQPTNGVGYQPYRVVVLSFELLHAPATVCGPKKSTNLVKNKCVNFNFNGLTGTGVLTESNKKFLPFQQFGRDIADTTDAVRDPQTLEILDITPCSFGGVSVITPGTNTSNQVAVLYQGVNCTEVPVAIHADQLTPTWRVYSTGSNVFQTRAGCLIGAEHVNNSYECDIPIGAGICASYQTQTNSPRRARSVASQSIIAYTMSLGAENSVAYSNNSIAIPTNFTISVTTEILPVSMTKTSVDCTMYICGDSTECSNLLLQYGSFCTQLNRALTGIAVEQDKNTQEVFAQVKQIYKTPPIKDFGGFNFSQILPDPSKPSKRSFIEDILFNKVTLADAGFIKQYGDCLGDIAARDLICAQKFNGLTVLPPLLTDEMIAQYTSALLAGTITSGWWFGAGAALQIPFAMQMAYRFNGIGVTQNVLYENQKLIANQFNSAIGKIQDSLSSTASALGKLQDVVNQNAQALNTLVKQLSSNFGAISSVLNDILSRLDPPEAEVQIDRLITGRLQSLQTYVTQQLIRAAEIRWSANLAATKMSECVLGQSKRVDFCGKGYHLMSFPQSAPHGVVFLHVTYVPAQEKNFTTAPAICHDGKAHFPREGVFVSNGTHWFVTQRNFYEPQIITTDNTFVSGNCDVVIGIVNNTVYDPLQPELDSFKEELDKYFKNHTSPDVDLGDISGINASVVNIQKEIDRLNEVAKNLNESLIDLQELGKYEQYIK

SEQ ID NO: 1806 - protein, 1211 aa, Artificial Sequence
  SARS-CoV-2/Congo/158/2020__EPI_ISL_417950 spike protein (1-1211)(K986P_V987P_T887W_A1020W)
MFVFLVLLPLVSSQCVNLTTRTQLPPAYTNSFTRGVYYPDKVFRSSVLHSTQDLFLPFFSNVTWFHAIHVSGTNGTKRFDNPVLPFNDGVYFASTEKSNIIRGWIFGTTLDSKTQSLLIVNNATNVVIKVCEFQFCNDPFLGVYYHKNNKSWMESEFRVYSSANNCTFEYVSQPFLMDLEGKQGNFKNLREFVFKNIDGYFKIYSKHTPINLVRDLPQGFSALEPLVDLPIGINITRFQTLLALHRSYLTPGDSSSGWTAGAAAYYVGYLQPRTFLLKYNENGTITDAVDCALDPLSETKCTLKSFTVEKGIYQTSNFRVQPTESIVRFPNITNLCPFGEVFNATRFASVYAWNRKRISNCVADYSVLYNSASFSTFKCYGVSPTKLNDLCFTNVYADSFVIRGDEVRQIAPGQTGKIADYNYKLPDDFTGCVIAWNSNNLDSKVGGNYNYLYRLFRKSNLKPFERDISTEIYQAGSTPCNGVEGFNCYFPLQSYGFQPTNGVGYQPYRVVVLSFELLHAPATVCGPKKSTNLVKNKCVNFNFNGLTGTGVLTESNKKFLPFQQFGRDIADTTDAVRDPQTLEILDITPCSFGGVSVITPGTNTSNQVAVLYQDVNCTEVPVAIHADQLTPTWRVYSTGSNVFQTRAGCLIGAEHVNNSYECDIPIGAGICASYQTQTNSPRRARSVASQSIIAYTMSLGAENSVAYSNNSIAIPTNFTISVTTEILPVSMTKTSVDCTMYICGDSTECSNLLLQYGSFCTQLNRALTGIAVEQDKNTQEVFAQVKQIYKTPPIKDFGGFNFSQILPDPSKPSKRSFIEDLLFNKVTLADAGFIKQYGDCLGDIAARDLICAQKFNGLTVLPPLLTDEMIAQYTSALLAGTITSGWWFGAGAALQIPFAMQMAYRFNGIGVTQNVLYENQKLIANQFNSAIGKIQDSLSSTASALGKLQDVVNQNAQALNTLVKQLSSNFGAISSVLNDILSRLDPPEAEVQIDRLITGRLQSLQTYVTQQLIRAAEIRWSANLAATKMSECVLGQSKRVDFCGKGYHLMSFPQSAPHGVVFLHVTYVPAQEKNFTTAPAICHDGKAHFPREGVFVSNGTHWFVTQRNFYEPQIITTDNTFLSGNCDVVIGIVNNTVYDPLQPELDSFKEELDKYFKNHTSPDVDLGDISGINASVVNIQKEIDRLNEVAKNLNESLIDLQELGKYEQYIK

SEQ ID NO: 1807 - protein, 1211 aa, Artificial Sequence
  SARS-CoV-2/USA/UT-00034/2020__EPI_ISL_417977 spike protein (1-1211)(K986P_V987P_T887W_A1020W)
MFVFLVLLPLVSSQCVNLTTRTQLPPAYTNSFTRGVYYPDKVFRSSVLHSTQDLFLPFFSNVTWFHAIHVSGTNGTKRFDNPVLPFNDGVYFASTEKSNIIRGWIFGTTLDSKTQSLLIVNNATNVVIKVCEFQFCNDPFLGVYYYKNNKSWMESEFRVYSSANNCTFEYVSQPFLMDLEGKQGNFKNLREFVFKNIDGYFKIYSKHTPINLVRDLPQGFSALEPLVDLPIGINITRFQTLLALHRSYLTPGDSSSGWTAGAAAYYVGYLQPRTFLLKYNENGTITDAVDCALDPLSETKCTLKSFTVEKGIYQTSNFRVQPTESIVRFPNITNLCPFGEVFNATRFASVYAWNRKRISNCVADYSVLYNSASFSTFKCYGVSPTKLNDLCFTNVYADSFVIRGDEVRQIAPGQTGKIADYNYKLPDDFTGCVIAWNSNNLDSKVGGNYNYLYRLFRKSNLKPFERDISTEIYQAGSTPCNGVEGFNCYFPLQSYGFQPTNGVGYQPYRVVVLSFELLHAPATVCGPKKSTNLVKNKCVNFNFNGLTGTGVLTESNKKFLPFQQFGRDIADTTDAVRDPQTLEILDITPCSFGGVSVITPGTNTSNQVAVLYQGVNCTEVPVAIHADQLTPTWRVYSTGSNVFQTRAGCLIGAEHVNNSYECDIPIGAGICASYQTQTNSPRRARSVASQSIIAYTMSLGAENSVAYSNNSIAIPTNFTISVTTEILPVSMTKTSVDCTMYICGDSTECSNLLLQYGSFCTQLNRALTGIAVEQDKNTQEVFAQVKQIYKTPPIKDFGGFNFSQILPDPSKPSKRSFIEDLLFNKVTLADAGFIKQYGDCLGDIAARDLICAQKFNGLTVLPPLLTDEMIAQYTSALLAGTITSGWWFGAGAALQIPFAMQMAYRFNGIGVTQNVLYENQKLIANQFNSAIGKIQDSLSSTASALGKLQDVVNQNAQALNTLVKQLSSNFGAISSVLNDILSRLDPPEAEVQIDRLITGRLQSLQTYVTQQLIRAAEIRWSANLAATKMSECVLGQSKRVDFCGKGYHLMSFPQSAPHGVVFLHVTYVPAQEKNFTTAPAICHDGKAHFPREGVFVSNGTHWFVTQRNFYEPQIITTDNTFVSGNCDVVIGIVNNTVYDPLQPELDSFKEELDKYFKNHTSPDVDLGDISGINASVVNIQKEIDRLNEVAKNLNESLIDLQELGKYEQYIK

SEQ ID NO: 1808 - protein, 1211 aa, Artificial Sequence
  SARS-CoV-2/USA/UT-00033/2020__EPI_ISL_417976 spike protein (1-1211)(K986P_V987P_T887W_A1020W)
MFVFLVLLPLVSSQCVNLTTRTQLPPAYTNSFTRGVYYPDKVFRSSVLHSTQDLFLPFFSNVTWFHAIHVSGTNGTKRFDNPVLPFNDGVYFASTEKSNIIRGWIFGTTLDSKTQSLLIVNNATNVVIKVCEFQFCNDPFLGVYYHKNNKSWMESEFRVYSSANNCTFEYVSQPFLMDLEGKQGNFKNLREFVFKNIDGYFKIYSKHTPINLVRDLPQGFSALEPLVDLPIGINITRFQTLLALHRSYLTPGDSSSGLTAGAAAYYVGYLQPRTFLLKYNENGTITDAVDCALDPLSETKCTLKSFTVEKGIYQTSNFRVQPTESIVRFPNITNLCPFGEVFNATRFASVYAWNRKRISNCVADYSVLYNSASFSTFKCYGVSPTKLNDLCFTNVYADSFVIRGDEVRQIAPGQTGKIADYNYKLPDDFTGCVIAWNSNNLDSKVGGNYNYLYRLFRKSNLKPFERDISTEIYQAGSTPCNGVEGFNCYFPLQSYGFQPTNGVGYQPYRVVVLSFELLHAPATVCGPKKSTNLVKNKCVNFNFNGLTGTGVLTESNKKFLPFQQFGRDIADTTDAVRDPQTLEILDITPCSFGGVSVITPGTNTSNQVAVLYQGVNCTEVPVAIHADQLTPTWRVYSTGSNVFQTRAGCLIGAEHVNNSYECDIPIGAGICASYQTQTNSPRRARSVASQSIIAYTMSLGAENSVAYSNNSIAIPTNFTISVTTEILPVSMTKTSVDCTMYICGDSTECSNLLLQYGSFCTQLNRALTGIAVEQDKNTQEVFAQVKQIYKTPPIKDFGGFNFSQILPDPSKPSKRSFIEDLLFNKVTLADAGFIKQYGDCLGDIAARDLICAQKFNGLTVLPPLLTDEMIAQYTSALLAGTITSGWWFGAGAALQIPFAMQMAYRFNGIGVTQNVLYENQKLIANQFNSAIGKIQDSLSSTASALGKLQDVVNQNAQALNTLVKQLSSNFGAISSVLNDILSRLDPPEAEVQIDRLITGRLQSLQTYVTQQLIRAAEIRWSANLAATKMSECVLGQSKRVDFCGKGYHLMSFPQSAPHGVVFLHVTYVPAQEKNFTTAPAICHDGKAHFPREGVFVSNGTHWFVTQRNFYEPQIITTDNTFVSGNCDVVIGIVNNTVYDPLQPELDSFKEELDKYFKNHTSPDVDLGDISGINASVVNIQKEIDRLNEVAKNLNESLIDLQELGKYEQYIK

SEQ ID NO: 1809 - protein, 1211 aa, Artificial Sequence
  SARS-CoV-2/USA/WI-13/2020__EPI_ISL_417516 spike protein (1-1211)(K986P_V987P_T887W_A1020W)
MFVFLVLLPLVSSQCVNLTTRTQLPPAYTNSFTRGVYYPDKVFRSSVLHSTQDLFLPFFSNVTWFHAIHVSGTNGTKRFDNPVLPFNDGVYFASTEKSNIIRGWIFGTTLDSKTQSLLIVNNATNVVIKVCEFQFCNDPFLGVYYHKNNKSWMESEFRVYSSANNCTFEYVSQPFLMDLEGKQGNFKNLREFVFKNIDGYFKIYSKHTPINLVRDLPQGFSALEPLVDLPIGINITRFQTLLALHRSYLTPGDSSSGWTAGAAAYYVGYLQPRTFLLKYNENGTITDAVDCALDPLSETKCTLKSFTVEKGIYQTSNFRVLPTESIVRFPNITNLCPFGEVFNATRFASVYAWNRKRISNCVADYSVLYNSASFSTFKCYGVSPTKLNDLCFTNVYADSFVIRGDEVRQIAPGQTGKIADYNYKLPDDFTGCVIAWNSNNLDSKVGGNYNYLYRLFRKSNLKPFERDISTEIYQAGSTPCNGVEGFNCYFPLQSYGFQPTNGVGYQPYRVVVLSFELLHAPATVCGPKKSTNLVKNKCVNFNFNGLTGTGVLTESNKKFLPFQQFGRDIADTTDAVRDPQTLEILDITPCSFGGVSVITPGTNTSNQVAVLYQGVNCTEVPVAIHADQLTPTWRVYSTGSNVFQTRAGCLIGAEHVNNSYECDIPIGAGICASYQTQTNSPRRARSVASQSIIAYTMSLGAENSVAYSNNSIAIPTNFTISVTTEILPVSMTKTSVDCTMYICGDSTECSNLLLQYGSFCTQLNRALTGIAVEQDKNTQEVFAQVKQIYKTPPIKDFGGFNFSQILPDPSKPSKRSFIEDLLFNKVTLADAGFIKQYGDCLGDIAARDLICAQKFNGLTVLPPLLTDEMIAQYTSALLAGTITSGWWFGAGAALQIPFAMQMAYRFNGIGVTQNVLYENQKLIANQFNSAIGKIQDSLSSTASALGKLQDVVNQNAQALNTLVKQLSSNFGAISSVLNDILSRLDPPEAEVQIDRLITGRLQSLQTYVTQQLIRAAEIRWSANLAATKMSECVLGQSKRVDFCGKGYHLMSFPQSAPHGVVFLHVTYVPAQEKNFTTAPAICHDGKAHFPREGVFVSNGTHWFVTQRNFYEPQIITTDNTFVSGNCDVVIGIVNNTVYDPLQPELDSFKEELDKYFKNHTSPDVDLGDISGINASVVNIQKEIDRLNEVAKNLNESLIDLQELGKYEQYIK

SEQ ID NO: 1810 - protein, 1210 aa, Artificial Sequence
  SARS-CoV-2/India/1-27/2020__EPI_ISL_413522 spike protein (1-1210)(K985P_V986P_T886W_A1019W)
MFVFLVLLPLVSSQCVNLTTRTQLPPAYTNSFTRGVYYPDKVFRSSVLHSTQDLFLPFFSNVTWFHAIHVSGTNGTKRFDNPVLPFNDGVYFASTEKSNIIRGWIFGTTLDSKTQSLLIVNNATNVVIKVCEFQFCNDPFLGVYHKNNKSWMESEFRVYSSANNCTFEYVSQPFLMDLEGKQGNFKNLREFVFKNIDGYFKIYSKHTPINLVRDLPQGFSALEPLVDLPIGINITRFQTLLALHRSYLTPGDSSSGWTAGAAAYYVGYLQPRTFLLKYNENGTITDAVDCALDPLSETKCTLKSFTVEKGIYQTSNFRVQPTESIVRFPNITNLCPFGEVFNATRFASVYAWNRKRISNCVADYSVLYNSASFSTFKCYGVSPTKLNDLCFTNVYADSFVIRGDEVIQIAPGQTGKIADYNYKLPDDFTGCVIAWNSNNLDSKVGGNYNYLYRLFRKSNLKPFERDISTEIYQAGSTPCNGVEGFNCYFPLQSYGFQPTNGVGYQPYRVVVLSFELLHAPATVCGPKKSTNLVKNKCVNFNFNGLTGTGVLTESNKKFLPFQQFGRDIADTTDAVRDPQTLEILDITPCSFGGVSVITPGTNTSNQVAVLYQDVNCTEVPVAIHADQLTPTWRVYSTGSNVFQTRAGCLIGAEHVNNSYECDIPIGAGICASYQTQTNSPRRARSVASQSIIAYTMSLGAENSVAYSNNSIAIPTNFTISVTTEILPVSMTKTSVDCTMYICGDSTECSNLLLQYGSFCTQLNRALTGIAVEQDKNTQEVFAQVKQIYKTPPIKDFGGFNFSQILPDPSKPSKRSFIEDLLFNKVTLADAGFIKQYGDCLGDIAARDLICAQKFNGLTVLPPLLTDEMIAQYTSALLAGTITSGWWFGAGAALQIPFAMQMAYRFNGIGVTQNVLYENQKLIANQFNSAIGKIQDSLSSTASALGKLQDVVNQNAQALNTLVKQLSSNFGAISSVLNDILSRLDPPEAEVQIDRLITGRLQSLQTYVTQQLIRAAEIRWSANLAATKMSECVLGQSKRVDFCGKGYHLMSFPQSAPHGVVFLHVTYVPAQEKNFTTAPAICHDGKAHFPREGVFVSNGTHWFVTQRNFYEPQIITTDNTFVSGNCDVVIGIVNNTVYDPLQPELDSFKEELDKYFKNHTSPDVDLGDISGINASVVNIQKEIDRLNEVAKNLNESLIDLQELGKYEQYIK

SEQ ID NO: 1811 - protein, 1205 aa, Artificial Sequence
  SARS-CoV-2/pangolin/Guangxi/P4L/2017__EPI_ISL_410538 spike protein (1-1205)(K980P_V981P_T881W_A1014W)
MFVFLFVLPLVSSQCVNLTTRTGIPPGYTNSSTRGVYYPDKVFRSSILHLTQDLFLPFFSNVTWFNTINYQGGFKKFDNPVLPFNDGVYFASTEKSNIIRGWIFGTTLDARTQSLLIVNNATNVVIKVCEFQFCTDPFLGVYYHNNNKTWVENEFRVYSSANNCTFEYISQPFLMDLEGKQGNFKNLREFVFKNVDGYFKIYSKHTPIDLVRDLPRGFAALEPLVDLPIGINITRFQTLLALHRSYLTPGNLESGWTTGAAAYYVGYLQQRTFLLSYNQNGTITDAVDCSLDPLSETKCTLKSLTVEKGIYQTSNFRVQPTISIVRFPNITNLCPFGEVFNASKFASVYAWNRKRISNCVADYSVLYNSTSFSTFKCYGVSPTKLNDLCFTNVYADSFVVKGDEVRQIAPGQTGVIADYNYKLPDDFTGCVIAWNSVKQDALTGGNYGYLYRLFRKSKLKPFERDISTEIYQAGSTPCNGQVGLNCYYPLERYGFHPTTGVNYQPFRVVVLSFELLNGPATVCGPKLSTTLVKDKCVNFNFNGLTGTGVLTTSKKQFLPFQQFGRDISDTTDAVRDPQTLEILDITPCSFGGVSVITPGTNTSNQVAVLYQDVNCTEVPMAIHAEQLTPAWRVYSAGANVFQTRAGCLVGAEHVNNSYECDIPVGAGICASYHSMSSLRSVNQRSIIAYTMSLGAENSVAYSNNSIAIPTNFTISVTTEILPVSMTKTSVDCTMYICGDSIECSNLLLQYGSFCTQLNRALTGIAVEQDKNTQEVFAQVKQIYKTPPIKDFGGFNFSQILPDPSKPSKRSFIEDLLFNKVTLADAGFIKQYGDCLGDIAARDLICAQKFNGLTVLPPLLTDEMIAQYTSALLAGTITSGWWFGAGAALQIPFAMQMAYRFNGIGVTQNVLYENQKLIANQFNSAIGKIQDSLSSTASALGKLQDVVNQNAQALNTLVKQLSSNFGAISSVLNDILSRLDPPEAEVQIDRLITGRLQSLQTYVTQQLIRAAEIRWSANLAATKMSECVLGQSKRVDFCGKGYHLMSFPQSAPHGVVFLHVTYVPAQEKNFTTAPAICHEGKAHFPREGVFVSNGTHWFITQRNFYEPQIITTDNTFVSGSCDVVIGIVNNTVYDPLQPELDSFKEELDKYFKNHTSPDVDLGDISGINASVVNIQKEIDRLNEVAKNLNESPIDLQELGKYEQYIK

SEQ ID NO: 1812 - protein, 1205 aa, Artificial Sequence
  SARS-CoV-2/pangolin/Guangxi/P5L/2017__EPI_ISL_410540 spike protein (1-1205)(K980P_V981P_T881W_A1014W)
MFVFLFVLPLVSSQCVNLTTRTGIPPGYTNSSTRGVYYPDKVFRSSILHLTQDLFLPFFSNVTWFNTINYQGGFKKFDNPVLPFNDGVYFASTEKSNIIRGWIFGTTLDARTQSLLIVNNATNVVIKVCEFQFCTDPFLGVYYHNNNKTWVENEFRVYSSANNCTFEYISQPFLMDLEGKQGNFKNLREFVFKNVDGYFKIYSKHTPIDLVRDLPRGFAALEPLVDLPIGINITRFQTLLALHRSYLTPGKLESGWTTGAAAYYVGYLQQRTFLLSYNQNGTITDAVDCSLDPLSETKCTLKSLTVEKGIYQTSNFRVQPTISIVRFPNITNLCPFGEVFNASKFASVYAWNRKRISNCVADYSVLYNSTSFSTFKCYGVSPTKLNDLCFTNVYADSFVVKGDEVRQIAPGQTGVIADYNYKLPDDFTGCVIAWNSVKQDALTGGNYGYLYRLFRKSKLKPFERDISTEIYQAGSTPCNGQVGLNCYYPLERYGFHPTTGVNYQPFRVVVLSFELLNGPATVCGPKLSTTLVKDKCVNFNFNGLTGTGVLTTSKKQFLPFQQFGRDISDTTDAVRDPQTLEILDITPCSFGGVSVITPGTNTSNQVAVLYQDVNCTEVPMAIHAEQLTPAWRVYSAGANVFQTRAGCLVGAEHVNNSYECDIPVGAGICASYHSMSSFRSVNQRSIIAYTMSLGAENSVAYSNNSIAIPTNFTISVTTEILPVSMTKTSVDCTMYICGDSIECSNLLLQYGSFCTQLNRALTGIAVEQDKNTQEVFAQVKQIYKTPPIKDFGGFNFSQILPDPSKPSKRSFIEDLLFNKVTLADAGFIKQYGDCLGDIAARDLICAQKFNGLTVLPPLLTDEMIAQYTSALLAGTITSGWWFGAGAALQIPFAMQMAYRFNGIGVTQNVLYENQKLIANQFNSAIGKIQDSLSSTASALGKLQDVVNQNAQALNTLVKQLSSNFGAISSVLNDILSRLDPPEAEVQIDRLITGRLQSLQTYVTQQLIRAAEIRWSANLAATKMSECVLGQSKRVDFCGKGYHLMSFPQSAPHGVVFLHVTYVPAQEKNFTTAPAICHEGKAHFPREGVFVSNGTHWFITQRNFYEPQIITTDNTFVSGSCDVVIGIVNNTVYDPLQPELDSFKEELDKYFKNHTSPDVDLGDISGINASVVNIQKEIDRLNEVAKNLNESLIDLQELGKYEQYIK

SEQ ID NO: 1813 - protein, 1205 aa, Artificial Sequence
  SARS-CoV-2/pangolin/Guangxi/P5E/2017__EPI_ISL_410541 spike protein (1-1205)(K980P_V981P_T881W_A1014W)
MFVFLFVLPLVSSQCVNLTTRTGIPPGYTNSSTRGVYYPDKVFRSSILHLTQDLFLPFFSNVTWFNTITYQGGSKKFDNPVLPFNDGVYFASTEKSNIIRGWIFGTTLDARTQSLLIVNNATNVVIKVCEFQFCTDPFLGVYYHNNNKTWVENEFRVYSSANNCTFEYISQPFLMDLEGKQGNFKNLREFVFKNVDGYFKIYSKHTPIDLVRDLPRGFAALEPLVDLPIGINITRFQTLLALHRSYLTPGKLESGWTTGAAAYYVGYLQQRTFLLSYNQNGTITDAVDCSLDPLSETKCTLKSLTVEKGIYQTSNFRVQPTISIVRFPNITNLCPFGEVFNASKFASVYAWNRKRISNCVADYSVLYNSTSFSTFKCYGVSPTKLNDLCFTNVYADSFVVKGDEVRQIAPGQTGVIADYNYKLPDDFTGCVIAWNSVKQDALTGDNYGYLYRLFRKSKLKPFERDISTEIYQAGSTPCNGQVGLNCYYPLERYGFHPTTGVNYQPFRVVVLSFELLNGPATVCGPKLSTTLVKDKCVNFNFNGLTGTGVLTTSKKQFLPFQQFGRDISDTTDAVRDPQTLEILDITPCSFGGVSVITPGTNTSNQVAVLYQDVNCTEVPMAIHAEQLTPAWRVYSAGANVFQTRAGCLVGAEHVNNSYECDIPVGAGICASYHSMSSFRSVNQRSIIAYTMSLGAENSVAYSNNSIAIPTNFTISVTTEILPVSMTKTSVDCTMYICGDSIECSNLLLQYGSFCTQLNRALTGIAVEQDKNTQEVFAQVKQIYKTPPIKDFGGFNFSQILPDPSKPSKRSFIEDLLFNKVTLADAGFIKQYGDCLGDIAARDLICAQKFNGLTVLPPLLTDEMIAQYTSALLAGTITSGWWFGAGAALQIPFAMQMAYRFNGIGVTQNVLYENQKLIANQFNSAIGKIQDSLSSTASALGKLQDVVNQNAQALNTLVKQLSSNFGAISSVLNDILSRLDPPEAEVQIDRLITGRLQSLQTYVTQQLIRAAEIRWSANLAATKMSECVLGQSKRVDFCGKGYHLMSFPQSAPHGVVFLHVTYVPAQEKNFTTAPAICHEGKAHFPREGVFVSNGTHWFITQRNFYEPQIITTDNTFVSGSCDVVIGIVNNTVYDPLQPELDSFKEELDKYFKNHTSPDVDLGDISGINASVVNIQKEIDRLNEVAKNLNESLIDLQELGKYEQYIK

SEQ ID NO: 1814 - protein, 1203 aa, Artificial Sequence
  SARS-CoV-2/pangolin/Guangxi/P1E/2017__EPI_ISL_410539 spike protein (1-1203)(K978P_V979P_T879W_A1012W)
MFVFLFVLPLVSSQCVNLTTRTGIQPGYTNSSTRGVYYPDKVFRSSILHLTQDLFLPFFSNVTWFNTINYQGGFKKFDNPVLPFNDGVYFASTEKSNIIRGWIFGTTLDARTQSLLIVNNATNVVIKVCEFQFCTDPFLGVYYHNNNKTWVENEFRVYSSANNCTFEYISQPFLMDLEGKQGNFKNLREFVFKNVDGYFKIYSKHTPIDLVRDLPRGFAALEPLVDLPIGINITRFQTLLALHRSYLTPGKLESGWTTGAAAYYVGYLQQRTFLLSYNQNGTITDAVDCSLDPLSETKCTLKSLTVEKGIYQTSNFRVQPTISIVRFPNITNLCPFGEVFNASKFASVYAWNRKRISNCVADYSVLYNSTSFSTFKCYGVSPTKLNDLCFTNVYADSFVVKGDEVRQIAPGQTGVIADYNYKLPDDFTGCVIAWNSVKQDALTGGNYLYRLFRKSKLKPFERDISTEIYQAGSTPCNGQVGLNCYYPLERYGFHPTTGVNYQPFRVVVLSFELLNGPATVCGPKLSTTLVKDKCVNFNFNGLTGTGVLTTSKKQFLPFQQFGRDISDTTDAVRDPQTLEILDITPCSFGGVSVITPGTNTSNQVAVLYQDVNCTEVPMAIHAEQLTPAWRVYSAGANVFQTRAGCLVGAEHVNNSYECDIPVGAGICASYHSMSSLRSVNQRSIIAYTMSLGAENSVAYSNNSIAIPTNFTISVTTEILPVSMTKTSVDCTMYICGDSIECSNLLLQYGSFCTQLNRALTGIAVEQDKNTQEVFAQVKQIYKTPPIKDFGGFNFSQILPDPSKPSKRSFIEDLLFNKVTLADAGFIKQYGDCLGDIAARDLICAQKFNGLTVLPPLLTDEMIAQYTSALLAGTITSGWWFGAGAALQIPFAMQMAYRFNGIGVTQNVLYENQKLIANQFNSAIGKIQDSLSSTASALGKLQDVVNQNAQALNTLVKQLSSNFGAISSVLNDILSRLDPPEAEVQIDRLITGRLQSLQTYVTQQLIRAAEIRWSANLAATKMSECVLGQSKRVDFCGKGYHLMSFPQSAPHGVVFLHVTYVPAQEKNFTTAPAICHEGKAHFPREGVFVSNGTHWFITQRNFYEPQIITTDNTFVSGSCDVVIGIVNNTVYDPLQPELDSFKEELDKYFKNHTSPDVDLGDISGINASVVNIQKEIDRLNEVAKNLNESLIDLQELGKYEQYIK

SEQ ID NO: 1815 - protein, 1211 aa, Artificial Sequence
  SARS-CoV-2/Wuhan/WIV05/2019__EPI_ISL_402128 spike protein (1-1211)(K986P_V987P_P1069F)
MFVFLVLLPLVSSQCVNLTTRTQLPPAYTNSFTRGVYYPDKVFRSSVLHSTQDLFLPFFSNVTWFHAIHVSGTNGTKRFDNPVLPFNDGVYFASTEKSNIIRGWIFGTTLDSKTQSLLIVNNATNVVIKVCEFQFCNDPFLGVYYHKNNKSWMESEFRVYSSANNCTFEYVSQPFLMDLEGKQGNFKNLREFVFKNIDGYFKIYSKHTPINLVRDLPQGFSALEPLVDLPIGINITRFQTLLALHRSYLTPGDSSSGWTAGAAAYYVGYLQPRTFLLKYNENGTITDAVDCALDPLSETKCTLKSFTVEKGIYQTSNFRVQPTESIVRFPNITNLCPFGEVFNATRFASVYAWNRKRISNCVADYSVLYNSASFSTFKCYGVSPTKLNDLCFTNVYADSFVIRGDEVRQIAPGQTGKIADYNYKLPDDFTGCVIAWNSNNLDSKVGGNYNYLYRLFRKSNLKPFERDISTEIYQAGSTPCNGVEGFNCYFPLQSYGFQPTNGVGYQPYRVVVLSFELLHAPATVCGPKKSTNLVKNKCVNFNFNGLTGTGVLTESNKKFLPFQQFGRDIADTTDAVRDPQTLEILDITPCSFGGVSVITPGTNTSNQVAVLYQDVNCTEVPVAIHADQLTPTWRVYSTGSNVFQTRAGCLIGAEHVNNSYECDIPIGAGICASYQTQTNSPRRARSVASQSIIAYTMSLGAENSVAYSNNSIAIPTNFTISVTTEILPVSMTKTSVDCTMYICGDSTECSNLLLQYGSFCTQLNRALTGIAVEQDKNTQEVFAQVKQIYKTPPIKDFGGFNFSQILPDPSKPSKRSFIEDLLFNKVTLADAGFIKQYGDCLGDIAARDLICAQKFNGLTVLPPLLTDEMIAQYTSALLAGTITSGWTFGAGAALQIPFAMQMAYRFNGIGVTQNVLYENQKLIANQFNSAIGKIQDSLSSTASALGKLQDVVNQNAQALNTLVKQLSSNFGAISSVLNDILSRLDPPEAEVQIDRLITGRLQSLQTYVTQQLIRAAEIRASANLAATKMSECVLGQSKRVDFCGKGYHLMSFPQSAPHGVVFLHVTYVFAQEKNFTTAPAICHDGKAHFPREGVFVSNGTHWFVTQRNFYEPQIITTDNTFVSGNCDVVIGIVNNTVYDPLQPELDSFKEELDKYFKNHTSPDVDLGDISGINASVVNIQKEIDRLNEVAKNLNESLIDLQELGKYEQYIK

SEQ ID NO: 1816 - protein, 1207 aa, Artificial Sequence
  SARS-CoV-2/bat/Yunnan/RaTG13/2013__EPI_ISL_402131 spike protein (1-1207)(K982P_V983P_P1065F)
MFVFLVLLPLVSSQCVNLTTRTQLPPAYTNSSTRGVYYPDKVFRSSVLHLTQDLFLPFFSNVTWFHAIHVSGTNGIKRFDNPVLPFNDGVYFASTEKSNIIRGWIFGTTLDSKTQSLLIVNNATNVVIKVCEFQFCNDPFLGVYYHKNNKSWMESEFRVYSSANNCTFEYVSQPFLMDLEGKQGNFKNLREFVFKNIDGYFKIYSKHTPINLVRDLPPGFSALEPLVDLPIGINITRFQTLLALHRSYLTPGDSSSGWTAGAAAYYVGYLQPRTFLLKYNENGTITDAVDCALDPLSETKCTLKSFTVEKGIYQTSNFRVQPTDSIVRFPNITNLCPFGEVFNATTFASVYAWNRKRISNCVADYSVLYNSTSFSTFKCYGVSPTKLNDLCFTNVYADSFVITGDEVRQIAPGQTGKIADYNYKLPDDFTGCVIAWNSKHIDAKEGGNFNYLYRLFRKANLKPFERDISTEIYQAGSKPCNGQTGLNCYYPLYRYGFYPTDGVGHQPYRVVVLSFELLNAPATVCGPKKSTNLVKNKCVNFNFNGLTGTGVLTESNKKFLPFQQFGRDIADTTDAVRDPQTLEILDITPCSFGGVSVITPGTNASNQVAVLYQDVNCTEVPVAIHADQLTPTWRVYSTGSNVFQTRAGCLIGAEHVNNSYECDIPIGAGICASYQTQTNSRSVASQSIIAYTMSLGAENSVAYSNNSIAIPTNFTISVTTEILPVSMTKTSVDCTMYICGDSTECSNLLLQYGSFCTQLNRALTGIAVEQDKNTQEVFAQVKQIYKTPPIKDFGGFNFSQILPDPSKPSKRSFIEDLLFNKVTLADAGFIKQYGDCLGDIAARDLICAQKFNGLTVLPPLLTDEMIAQYTSALLAGTITSGWTFGAGAALQIPFAMQMAYRFNGIGVTQNVLYENQKLIANQFNSAIGKIQDSLSSTASALGKLQDVVNQNAQALNTLVKQLSSNFGAISSVLNDILSRLDPPEAEVQIDRLITGRLQSLQTYVTQQLIRAAEIRASANLAATKMSECVLGQSKRVDFCGKGYHLMSFPQSAPHGVVFLHVTYVFAQEKNFTTAPAICHDGKAHFPREGVFVSNGTHWFVTQRNFYEPQIITTDNTFVSGSCDVVIGIVNNTVYDPLQPELDSFKEELDKYFKNHTSPDVDLGDISGINASVVNIQKEIDRLNEVAKNLNESLIDLQELGKYEQYIK

SEQ ID NO: 1817 - protein, 1211 aa, Artificial Sequence
  SARS-CoV-2/Wuhan/HBCDC-HB-01/2019__EPI_ISL_402132 spike protein (1-1211)(K986P_V987P_P1069F)
MFVFLVLLPLVSSQCVNLTTRTQLPPAYTNSITRGVYYPDKVFRSSVLHSTQDLFLPFFSNVTWFHAIHVSGTNGTKRFDNPVLPFNDGVYFASTEKSNIIRGWIFGTTLDSKTQSLLIVNNATNVVIKVCEFQFCNDPFLGVYYHKNNKSWMESEFRVYSSANNCTFEYVSQPFLMDLEGKQGNFKNLREFVFKNIDGYFKIYSKHTPINLVRDLPQGFSALEPLVDLPIGINITRFQTLLALHRSYLTPGDSSSGWTAGAAAYYVGYLQPRTFLLKYNENGTITDAVDCALDPLSETKCTLKSFTVEKGIYQTSNFRVQPTESIVRFPNITNLCPFGEVFNATRFASVYAWNRKRISNCVADYSVLYNSASFSTFKCYGVSPTKLNDLCFTNVYADSFVIRGDEVRQIAPGQTGKIADYNYKLPDDFTGCVIAWNSNNLDSKVGGNYNYLYRLFRKSNLKPFERDISTEIYQAGSTPCNGVEGFNCYFPLQSYGFQPTNGVGYQPYRVVVLSFELLHAPATVCGPKKSTNLVKNKCVNFNFNGLTGTGVLTESNKKFLPFQQFGRDIADTTDAVRDPQTLEILDITPCSFGGVSVITPGTNTSNQVAVLYQDVNCTEVPVAIHADQLTPTWRVYSTGSNVFQTRAGCLIGAEHVNNSYECDIPIGAGICASYQTQTNSPRRARSVASQSIIAYTMSLGAENSVAYSNNSIAIPTNFTISVTTEILPVSMTKTSVDCTMYICGDSTECSNLLLQYGSFCTQLNRALTGIAVEQDKNTQEVFAQVKQIYKTPPIKDFGGFNFSQILPDPSKPSKRSFIEDLLFNKVTLADAGFIKQYGDCLGDIAARDLICAQKFNGLTVLPPLLTDEMIAQYTSALLAGTITSGWTFGAGAALQIPFAMQMAYRFNGIGVTQNVLYENQKLIANQFNSAIGKIQDSLSSTASALGKLQDVVNQNAQALNTLVKQLSSNFGAISSVLNDILSRLDPPEAEVQIDRLITGRLQSLQTYVTQQLIRAAEIRASANLAATKMSECVLGQSKRVDFCGKGYHLMSFPQSAPHGVVFLHVTYVFAQEKNFTTAPAICHDGKAHFPREGVFVSNGTHWFVTQRNFYEPQIITTDNTFVSGNCDVVIGIVNNTVYDPLQPELDSFKEELDKYFKNHTSPDVDLGDISGINASVVNIQKEIDRLNEVAKNLNESLIDLQELGKYEQYIK

SEQ ID NO: 1818 - protein, 1211 aa, Artificial Sequence
  SARS-CoV-2/Guangdong/20SF028/2020__EPI_ISL_403936 spike protein (1-1211)(K986P_V987P_P1069F)
MFVFLVLLPLVSSQCVNLTTRTQLPPAYTNSFTRGVYYPDKVFRSSVLYSTQDLFLPFFSNVTWFHAIHVSGTNGTKRFDNPVLPFNDGVYFASTEKSNIIRGWIFGTTLDSKTQSLLIVNNATNVVIKVCEFQFCNDPFLGVYYHKNNKSWMESEFRVYSSANNCTFEYVSQPFLMDLEGKQGNFKNLREFVFKNIDGYFKIYSKHTPINLVRDLPQGFSALEPLVDLPIGINITRFQTLLALHRSYLTPGDSSSGWTAGAAAYYVGYLQPRTFLLKYNENGTITDAVDCALDPLSETKCTLKSFTVEKGIYQTSNFRVQPTESIVRFPNITNLCPFGEVFNATRFASVYAWNRKRISNCVADYSVLYNSASFSTFKCYGVSPTKLNDLCFTNVYADSFVIRGDEVRQIAPGQTGKIADYNYKLPDDFTGCVIAWNSNNLDSKVGGNYNYLYRLFRKSNLKPFERDISTEIYQAGSTPCNGVEGFNCYFPLQSYGFQPTNGVGYQPYRVVVLSFELLHAPATVCGPKKSTNLVKNKCVNFNFNGLTGTGVLTESNKKFLPFQQFGRDIADTTDAVRDPQTLEILDITPCSFGGVSVITPGTNTSNQVAVLYQDVNCTEVPVAIHADQLTPTWRVYSTGSNVFQTRAGCLIGAEHVNNSYECDIPIGAGICASYQTQTNSPRRARSVASQSIIAYTMSLGAENSVAYSNNSIAIPTNFTISVTTEILPVSMTKTSVDCTMYICGDSTECSNLLLQYGSFCTQLNRALTGIAVEQDKNTQEVFAQVKQIYKTPPIKDFGGFNFSQILPDPSKPSKRSFIEDLLFNKVTLADAGFIKQYGDCLGDIAARDLICAQKFNGLTVLPPLLTDEMIAQYTSALLAGTITSGWTFGAGAALQIPFAMQMAYRFNGIGVTQNVLYENQKLIANQFNSAIGKIQDSLSSTASALGKLQDVVNQNAQALNTLVKQLSSNFGAISSVLNDILSRLDPPEAEVQIDRLITGRLQSLQTYVTQQLIRAAEIRASANLAATKMSECVLGQSKRVDFCGKGYHLMSFPQSAPHGVVFLHVTYVFAQEKNFTTAPAICHDGKAHFPREGVFVSNGTHWFVTQRNFYEPQIITTDNTFVSGNCDVVIGIVNNTVYDPLQPELDSFKEELDKYFKNHTSPDVDLGDISGINASVVNIQKEIDRLNEVAKNLNESLIDLQELGKYEQYIK

SEQ ID NO: 1819 - protein, 1211 aa, Artificial Sequence
  SARS-CoV-2/Shenzhen/SZTH-001/2020__EPI_ISL_406592 spike protein (1-1211)(K986P_V987P_P1069F)
MFVFLVLLPLVSSQCVNLTTRTQLPPAYTNSFTRGVYYPDKVFRSSVLHSTQDLFLPFFSNVTWFHAIHVSGTNGTKRFDNPVLPFNDGVYFASTEKSNIIRGWIFGTTLDSKTQSLLIVNNATNVVIKVCEFQFCNDPFLGVYYHKNNKSWMESEFRVYSSANNCTFEYVSQPFLMDLEGKQGNFKNLREFVFKNIDGYFKIYSKHTPINLVRDLPQGFSALEPLVDLPIGINITRFQTLLALHRSYLTPGDSSSGWTAGAAAYYVGYLQPRTFLLKYNENGTITDAVDCALDPLSETKCTLKSFTVEKGIYQTSNFRVQPTESIVRFPNITNLCPFGEVFNATRFASVYAWNRKRISNCVADYSVLYNSASFSTFKCYGVSPTKLNDLCFTNVYADSFVIRGDEVRQIAPGQTGKIADYNYKLPDDFTGCVIAWNSNNLDSKVGGNYNYLYRLFRKSNLKPFERDISTEIYQAGSTPCNGVEGFNCYFPLQSYGFQPTNGVGYQPYRVVVLSFELLHAPATVCGPKKSTNLVKNKCVNFNFNGLTGTGVLTESNKKFLPFQQFGRDIADTTDAVRDPQTLEILDITPCSFGGVSVITPGTNTSNQVAVLYQDVNCTEVPVAIHADQLTPTWRVYSTGSNVFQTRAGCLIGAEHVNNSYECDIPIGAGICASYQTQTNSPRRARSVASQSIIAYTMSLGAENSVAYSNNSIAIPTNFTISVTTEILPVSMTKTSVDCTMYICGDSTECSNLLLQYGSFCTQLNRALTGIAVEQDKNTQEVFAQVKQIYKTPPIKDFGGFNFSQILPDPSKPSKRSFIEDLLFNKVTLADAGFIKQYGDCLGDIAARDLICAQKFNGLTVLPPLLTDEMIAQYTSALLAGTITSGWTFGAGAALQIPFAMQMAYRFNGIGVTQNVLYENQKLIANQFNSAIGKIQDSLSSTASALGKLQDVVNQNAQALNTLVKQLSSNFGAISSVLNDILSRLDPPEAEVQIDRLITGRLQSLQTYVTQQLIRAAEIRASANLAATKMSECVLGQSKRVDFCGKGYHLMSFPQSAPHGVVFLHVTYVFAQEKNFTTAPAICHDGKAHFPREGVFVSNGTHWFVTQRNFYEPQIITTDNTFVSGNCDVLIGIVNNTVYDPLQPELDSFKEELDKYFKNHTSPDVDLGDISGINASVVNIQKEIDRLNEVAKNLNESLIDLQELGKYEQYIK

SEQ ID NO: 1820 - protein, 1211 aa, Artificial Sequence
  SARS-CoV-2/Shenzhen/SZTH-004/2020__EPI_ISL_406595 spike protein (1-1211)(K986P_V987P_P1069F)
MFVFLVLLPLVSSQCVNLTTRTQLPPAYTNSFTRGVYYPDKVFRSSVLHSTQDLFLPFFSNVTWFHAIHVSGTNGTKRFDNPVLPFNDGVYFASTEKSNIIRGWIFGTTLDSKTQSLLIVNNATNVVIKVCEFQFCNDPFLGVYYHKNNKSWMESEFRVYSSANNCTFEYVSQPFLMDLEGKQGNFKNLREFVFKNIDGYFKIYSKHTPINLVRDLPQGFSALEPLVDLPIGINITRFQTLLALHRSYLTPGDSSSGWTAGAAAYYVGYLQPRTFLLKYNENGTITDAVDCALDPLSETKCTLKSFTVEKGIYQTSNFRVQPTESIVRFPNITNLCPFGEVFNATRFASVYAWDRKRISNCVAYYSVLYNSASFSTFKCYGVSPTKLNDLCFTNVYADSFVIRGDEVRQIAPGQTGKIADYNYKLPDDFTGCVIAWNSNNLDSKVGGNYNYLYRLFRKSNLKPFERDISTEIYQAGSTPCNGVEGFNCYFPLQSYGFQPTNGVGYQPYRVVVLSFELLHAPATVCGPKKSTNLVKNKCVNFNFNGLTGTGVLTESNKKFLPFQQFGRDIADTTDAVRDPQTLEILDITPCSFGGVSVITPGTNTSNQVAVLYQDVNCTEVPVAIHADQLTPTWRVYSTGSNVFQTRAGCLIGAEHVNNSYECDIPIGAGICASYQTQTNSPRRARSVASQSIIAYTMSLGAENSVAYSNNSIAIPTNFTISVTTEILPVSMTKTSVDCTMYICGDSTECSNLLLQYGSFCTQLNRALTGIAVEQDKNTQEVFAQVKQIYKTPPIKDFGGFNFSQILPDPSKPSKRSFIEDLLFNKVTLADAGFIKQYGDCLGDIAARDLICAQKFNGLTVLPPLLTDEMIAQYTSALLAGTITSGWTFGAGAALQIPFAMQMAYRFNGIGVTQNVLYENQKLIANQFNSAIGKIQDSLSSTASALGKLQDVVNQNAQALNTLVKQLSSNFGAISSVLNDILSRLDPPEAEVQIDRLITGRLQSLQTYVTQQLIRAAEIRASANLAATKMSECVLGQSKRVDFCGKGYHLMSFPQSAPHGVVFLHVTYVFAQEKNFTTAPAICHDGKAHFPREGVFVSNGTHWFVTQRNFYEPQIITTDNTFVSGNCDVVIGIVNNTVYDPLQPELDSFKEELDKYFKNHTSPDVDLGDISGINASVVNIQKEIDRLNEVAKNLNESLIDLQELGKYEQYIK

SEQ ID NO: 1821 - protein, 1211 aa, Artificial Sequence
  SARS-CoV-2/France/IDF0372/2020__EPI_ISL_406596 spike protein (1-1211)(K986P_V987P_P1069F)
MFVFLVLLPLVSSQCVNLTTRTQLPPAYTNSFTRGVYYPDKVFRSSVLHSTQDLFLPFFSNVTWFHAIHVSGTNGTKRFDNPVLPFNDGVYFASTEKSNIIRGWIFGTTLDSKTQSLLIVNNATNVVIKVCEFQFCNDPFLGVYYHKNNKSWMESEFRVYSSANNCTFEYVSQPFLMDLEGKQGNFKNLREFVFKNIDGYFKIYSKHTPINLVRDLPQGFSALEPLVDLPIGINITRFQTLLALHRSYLTPGDSSSGWTAGAAAYYVGYLQPRTFLLKYNENGTITDAVDCALDPLSETKCTLKSFTVEKGIYQTSNFRVQPTESIVRFPNITNLCPFGEVFNATRFASVYAWNRKRISNCVADYSFLYNSASFSTFKCYGVSPTKLNDLCFTNVYADSFVIRGDEVRQIAPGQTGKIADYNYKLPDDFTGCVIAWNSNNLDSKVGGNYNYLYRLFRKSNLKPFERDISTEIYQAGSTPCNGVEGFNCYFPLQSYGFQPTNGVGYQPYRVVVLSFELLHAPATVCGPKKSTNLVKNKCVNFNFNGLTGTGVLTESNKKFLPFQQFGRDIADTTDAVRDPQTLEILDITPCSFGGVSVITPGTNTSNQVAVLYQDVNCTEVPVAIHADQLTPTWRVYSTGSNVFQTRAGCLIGAEHVNNSYECDIPIGAGICASYQTQTNSPRRARSVASQSIIAYTMSLGAENSVAYSNNSIAIPTNFTISVTTEILPVSMTKTSVDCTMYICGDSTECSNLLLQYGSFCTQLNRALTGIAVEQDKNTQEVFAQVKQIYKTPPIKDFGGFNFSQILPDPSKPSKRSFIEDLLFNKVTLADAGFIKQYGDCLGDIAARDLICAQKFNGLTVLPPLLTDEMIAQYTSALLAGTITSGWTFGAGAALQIPFAMQMAYRFNGIGVTQNVLYENQKLIANQFNSAIGKIQDSLSSTASALGKLQDVVNQNAQALNTLVKQLSSNFGAISSVLNDILSRLDPPEAEVQIDRLITGRLQSLQTYVTQQLIRAAEIRASANLAATKMSECVLGQSKRVDFCGKGYHLMSFPQSAPHGVVFLHVTYVFAQEKNFTTAPAICHDGKAHFPREGVFVSNGTHWFVTQRNFYEPQIITTDNTFVSGNCDVVIGIVNNTVYDPLQPELDSFKEELDKYFKNHTSPDVDLGDISGINASVVNIQKEIDRLNEVAKNLNESLIDLQELGKYEQYIK

SEQ ID NO: 1822 - protein, 1211 aa, Artificial Sequence
  SARS-CoV-2/Australia/VIC01/2020__EPI_ISL_406844 spike protein (1-1211)(K986P_V987P_P1069F)
MFVFLVLLPLVSSQCVNLTTRTQLPPAYTNSFTRGVYYPDKVFRSSVLHSTQDLFLPFFSNVTWFHAIHVSGTNGTKRFDNPVLPFNDGVYFASTEKSNIIRGWIFGTTLDSKTQSLLIVNNATNVVIKVCEFQFCNDPFLGVYYHKNNKSWMESEFRVYSSANNCTFEYVSQPFLMDLEGKQGNFKNLREFVFKNIDGYFKIYSKHTPINLVRDLPQGFSALEPLVDLPIGINITRFQTLLALHRRYLTPGDSSSGWTAGAAAYYVGYLQPRTFLLKYNENGTITDAVDCALDPLSETKCTLKSFTVEKGIYQTSNFRVQPTESIVRFPNITNLCPFGEVFNATRFASVYAWNRKRISNCVADYSVLYNSASFSTFKCYGVSPTKLNDLCFTNVYADSFVIRGDEVRQIAPGQTGKIADYNYKLPDDFTGCVIAWNSNNLDSKVGGNYNYLYRLFRKSNLKPFERDISTEIYQAGSTPCNGVEGFNCYFPLQSYGFQPTNGVGYQPYRVVVLSFELLHAPATVCGPKKSTNLVKNKCVNFNFNGLTGTGVLTESNKKFLPFQQFGRDIADTTDAVRDPQTLEILDITPCSFGGVSVITPGTNTSNQVAVLYQDVNCTEVPVAIHADQLTPTWRVYSTGSNVFQTRAGCLIGAEHVNNSYECDIPIGAGICASYQTQTNSPRRARSVASQSIIAYTMSLGAENSVAYSNNSIAIPTNFTISVTTEILPVSMTKTSVDCTMYICGDSTECSNLLLQYGSFCTQLNRALTGIAVEQDKNTQEVFAQVKQIYKTPPIKDFGGFNFSQILPDPSKPSKRSFIEDLLFNKVTLADAGFIKQYGDCLGDIAARDLICAQKFNGLTVLPPLLTDEMIAQYTSALLAGTITSGWTFGAGAALQIPFAMQMAYRFNGIGVTQNVLYENQKLIANQFNSAIGKIQDSLSSTASALGKLQDVVNQNAQALNTLVKQLSSNFGAISSVLNDILSRLDPPEAEVQIDRLITGRLQSLQTYVTQQLIRAAEIRASANLAATKMSECVLGQSKRVDFCGKGYHLMSFPQSAPHGVVFLHVTYVFAQEKNFTTAPAICHDGKAHFPREGVFVSNGTHWFVTQRNFYEPQIITTDNTFVSGNCDVVIGIVNNTVYDPLQPELDSFKEELDKYFKNHTSPDVDLGDISGINASVVNIQKEIDRLNEVAKNLNESLIDLQELGKYEQYIK

SEQ ID NO: 1823 - protein, 1211 aa, Artificial Sequence
  SARS-CoV-2/Germany/BavPat1/2020__EPI_ISL_406862 spike protein (1-1211)(K986P_V987P_P1069F)
MFVFLVLLPLVSSQCVNLTTRTQLPPAYTNSFTRGVYYPDKVFRSSVLHSTQDLFLPFFSNVTWFHAIHVSGTNGTKRFDNPVLPFNDGVYFASTEKSNIIRGWIFGTTLDSKTQSLLIVNNATNVVIKVCEFQFCNDPFLGVYYHKNNKSWMESEFRVYSSANNCTFEYVSQPFLMDLEGKQGNFKNLREFVFKNIDGYFKIYSKHTPINLVRDLPQGFSALEPLVDLPIGINITRFQTLLALHRSYLTPGDSSSGWTAGAAAYYVGYLQPRTFLLKYNENGTITDAVDCALDPLSETKCTLKSFTVEKGIYQTSNFRVQPTESIVRFPNITNLCPFGEVFNATRFASVYAWNRKRISNCVADYSVLYNSASFSTFKCYGVSPTKLNDLCFTNVYADSFVIRGDEVRQIAPGQTGKIADYNYKLPDDFTGCVIAWNSNNLDSKVGGNYNYLYRLFRKSNLKPFERDISTEIYQAGSTPCNGVEGFNCYFPLQSYGFQPTNGVGYQPYRVVVLSFELLHAPATVCGPKKSTNLVKNKCVNFNFNGLTGTGVLTESNKKFLPFQQFGRDIADTTDAVRDPQTLEILDITPCSFGGVSVITPGTNTSNQVAVLYQGVNCTEVPVAIHADQLTPTWRVYSTGSNVFQTRAGCLIGAEHVNNSYECDIPIGAGICASYQTQTNSPRRARSVASQSIIAYTMSLGAENSVAYSNNSIAIPTNFTISVTTEILPVSMTKTSVDCTMYICGDSTECSNLLLQYGSFCTQLNRALTGIAVEQDKNTQEVFAQVKQIYKTPPIKDFGGFNFSQILPDPSKPSKRSFIEDLLFNKVTLADAGFIKQYGDCLGDIAARDLICAQKFNGLTVLPPLLTDEMIAQYTSALLAGTITSGWTFGAGAALQIPFAMQMAYRFNGIGVTQNVLYENQKLIANQFNSAIGKIQDSLSSTASALGKLQDVVNQNAQALNTLVKQLSSNFGAISSVLNDILSRLDPPEAEVQIDRLITGRLQSLQTYVTQQLIRAAEIRASANLAATKMSECVLGQSKRVDFCGKGYHLMSFPQSAPHGVVFLHVTYVFAQEKNFTTAPAICHDGKAHFPREGVFVSNGTHWFVTQRNFYEPQIITTDNTFVSGNCDVVIGIVNNTVYDPLQPELDSFKEELDKYFKNHTSPDVDLGDISGINASVVNIQKEIDRLNEVAKNLNESLIDLQELGKYEQYIK

SEQ ID NO: 1824 - protein, 1211 aa, Artificial Sequence
  SARS-CoV-2/Wuhan/HBCDC-HB-02/2020__EPI_ISL_412978 spike protein (1-1211)(K986P_V987P_P1069F)
MFVFLVLLPLVSSQCVNLTTRTQLPPAYTNSFTRGVYYPDKVFRSSVLHSTQDLFLPFFSNVTWFHAIHVSGTNGTKRFDNPVLPFNDGVYFASTEKSNIIRGWIFGTTLDSKTQSLLIVNNATNVVIKVCEFQFCNDPFLGVYYHKNNKSWMESEFRVYSSANNCTFEYVSQPFLMDLEGKQGNFKNLREFVFKNIDGYFKIYSKHTPINLVRDLPQGFSALEPLVDLPIGINITRFQTLLALHRSYLTPGDSSSGWTAGAAAYYVGYLQPRTFLLKYNENGTITDAVDCALDPLSETKCTLKSFTVEKGIYQTSNFRVQPTESIVRFPNITNLCPFGEVFNATRFASVYAWNRKRISNCVADYSVLYNSASFSTFKCYGVSPTKLNDLCFTNVYADSFVIRGDEVRQIAPGQTGKIADYNYKLPDDFTGCVIAWNSNNLDSKVGGNYNYLYRLFRKSNLKPFERDISTEIYQAGSTPCNGVEGFNCYFPLQSYGFQPTNGVGYQPYRVVVLSFELLHAPATVCGPKKSTNLVKNKCVNFNFNGLTGTGVLTESNKKFLPFQQFGRDIADTTDAVRDPQTLEILDITPCSFGGVSVITPGTNTSNQVAVLYQDVNCTEVPVAIHADQLTPTWRVYSTGSNVFQTRAGCLIGAEHVNNSYECDIPIGAGICASYQTQTNSPRRARSVASQSIIAYTMSLGAENSVAYSNNSIAIPTNFTISVTTEILPVSMTKTSVDCTMYICGDSTECSNFLLQYGSFCTQLNRALTGIAVEQDKNTQEVFAQVKQIYKTPPIKDFGGFNFSQILPDPSKPSKRSFIEDLLFNKVTLADAGFIKQYGDCLGDIAARDLICAQKFNGLTVLPPLLTDEMIAQYTSALLAGTITSGWTFGAGAALQIPFAMQMAYRFNGIGVTQNVLYENQKLIANQFNSAIGKIQDSLSSTASALGKLQDVVNQNAQALNTLVKQLSSNFGAISSVLNDILSRLDPPEAEVQIDRLITGRLQSLQTYVTQQLIRAAEIRASANLAATKMSECVLGQSKRVDFCGKGYHLMSFPQSAPHGVVFLHVTYVFAQEKNFTTAPAICHDGKAHFPREGVFVSNGTHWFVTQRNFYEPQIITTDNTFVSGNCDVVIGIVNNTVYDPLQPELDSFKEELDKYFKNHTSPDVDLGDISGINASVVNIQKEIDRLNEVAKNLNESLIDLQELGKYEQYIK

SEQ ID NO: 1825 - protein, 1211 aa, Artificial Sequence
  SARS-CoV-2/Australia/QLD02/2020__EPI_ISL_407896 spike protein (1-1211)(K986P_V987P_P1069F)
MFVFLVLLPLVSSQCVNLTTRTQLPPAYTNSFTRGVYYPDKVFRSSVLHSTQDLFLPFFSNVTWFHAIHVSGTNGTKRFDNPVLPFNDGVYFASTEKSNIIRGWIFGTTLDSKTQSLLIVNNATNVVIKVCEFQFCNDPFLGVYYHKNNKSWMESEFRVYSSANNCTFEYVSQPFLMDLEGKQGNFKNLREFVFKNIDGYFKIYSKHTPINLVRDLPQGFSALEPLVDLPIGINITRFQTLLALHRSYLTPGDSSSGWTAGAAAYYVGYLQPRTFLLKYNENGTITDAVDCALDPLSETKCTLKSFTVEKGIYQTSNFRVQPTESIVRFPNITNLCPFGEVFNATRFASVYAWNRKRISNCVADYSVLYNSASFSTFKCYGVSPTKLNDLCFTNVYADSFVIRGDEVRQIAPGQTGKIADYNYKLPDDFTGCVIAWNSNNLDSKVGGNYNYLYRLFRKSNLKPFERDISTEIYQAGSTPCNGVEGFNCYFPLQSYGFQPTNGVGYQPYRVVVLSFELLHAPATVCGPKKSTNLVKNKCVNFNFNGLTGTGVLTESNKKFLPFQQFGRDIADTTDAVRDPQTLEILDITPCSFGGVSVITPGTNTSNQVAVLYQDVNCTEVPVAIHADQLTPTWRVYSTGSNVFQTRAGCLIGAEHVNNSYECDIPIGAGICASYQTQTNSPRRARSVASQSIIAYTMSLGAENSVAYSNNSIAIPTNFTISVTTEILPVSMTKTSVDCTMYICGDSTECSNLLLQYGSFCTQLNRALTGIAVEQDKNTQEVFAQVKQIYKTPPIKDFGGFNFSQILPDPSKPSKRSFIEDLLFNKVTLADAGFIKQYGDCLGDIAARDLICAQKFNGLTVLPPLLTDEMIAQYTSALLAGTITSGWTFGAGAALQIPFAMQMAYRFNGIGVTQNVLYENQKLIANQFNSAIGKIQDSLSSTASALGKLQDVVNQNAQALNTLVKQLSSNFGAISSVLNDILSRLDPPEAEVQIDRLITGRLQSLQTYVTQQLIRAAEIRASANLAATKMSECVLGQSKRVDFCGKGYHLMSFPQSAPHGVVFLHVTYVFAQEKNFTTAPAICHDGKAHFPREGVFVSNGTHWFVTQRNFYEPQIITTDNTFVSGNCDVVIGIVNNTVYDPLQLELDSFKEELDKYFKNHTSPDVDLGDISGINASVVNIQKEIDRLNEVAKNLNESLIDLQELGKYEQYIK

SEQ ID NO: 1826 - protein, 1211 aa, Artificial Sequence
  SARS-CoV-2/India/1-31/2020__EPI_ISL_413523 spike protein (1-1211)(K986P_V987P_P1069F)
MFVFLVLLPLVSSQCVNLTTRTQLPPAYTNSFTRGVYYPDKVFRSSVLHSTQDLFLPFFSNVTWFHAIHVSGTNGTKRFDNPVLPFNDGVYFASTEKSNIIRGWIFGTTLDSKTQSLLIVNNATNVVIKVCEFQFCNDPFLGVYYHKNNKSWMESEFRVYSSANNCTFEYVSQPFLMDLEGKQGNFKNLREFVFKNIDGYFKIYSKHTPINLVRDLPQGFSALEPLVDLPIGINITRFQTLLALHRSYLTPGDSSSGWTAGAAAYYVGYLQPRTFLLKYNENGTITDAVDCALDPLSETKCTLKSFTVEKGIYQTSNFRVQPTESIVRFPNITNLCPFGEVFNATRFASVYAWNRKRISNCVADYSVLYNSASFSTFKCYGVSPTKLNDLCFTNVYADSFVIRGDEVRQIAPGQTGKIADYNYKLPDDFTGCVIAWNSNNLDSKVGGNYNYLYRLFRKSNLKPFERDISTEIYQAGSTPCNGVEGFNCYFPLQSYGFQPTNGVGYQPYRVVVLSFELLHAPATVCGPKKSTNLVKNKCVNFNFNGLTGTGVLTESNKKFLPFQQFGRDIADTTDAVRDPQTLEILDITPCSFGGVSVITPGTNTSNQVAVLYQDVNCTEVPVAIHADQLTPTWRVYSTGSNVFQTRAGCLIGAEHVNNSYECDIPIGAGICASYQTQTNSPRRARSVASQSIIAYTMSLGAENSVAYSNNSIAIPTNFTISVTTEILPVSMTKTSVDCTMYICGDSTECSNLLLQYGSFCTQLNRALTGIAVEQDKNTQEVFAQVKQIYKTPPIKDFGGFNFSQILPDPSKPSKRSFIEDLLFNKVTLADAGFIKQYGDCLGDIAARDLICAQKFNGLTVLPPLLTDEMIAQYTSALLAGTITSGWTFGAGAALQIPFAMQMAYRFNGIGVTQNVLYENQKLIANQFNSVIGKIQDSLSSTASALGKLQDVVNQNAQALNTLVKQLSSNFGAISSVLNDILSRLDPPEAEVQIDRLITGRLQSLQTYVTQQLIRAAEIRASANLAATKMSECVLGQSKRVDFCGKGYHLMSFPQSAPHGVVFLHVTYVFAQEKNFTTAPAICHDGKAHFPREGVFVSNGTHWFVTQRNFYEPQIITTDNTFVSGNCDVVIGIVNNTVYDPLQPELDSFKEELDKYFKNHTSPDVDLGDISGINASVVNIQKEIDRLNEVAKNLNESLIDLQELGKYEQYIK

SEQ ID NO: 1827 - protein, 1211 aa, Artificial Sequence
  SARS-CoV-2/Guangdong/GD2020087-P0008/2020__EPI_ISL_413863 spike protein (1-1211)(K986P_V987P_P1069F)
MFVFLVLLPLVSSQCVNLTTRTQLPPAYTNSFTRGVYYPDKVFRSSVLHSTQDLFLPFFSNVTWFHAIHVSGTNGTKRFDNPVLPFNDGVYFASTEKSNIIRGWIFGTTLDSKTQSLLIVNNATNVVIKVCEFQFCNDPFLGVYYHKNNKSWMESEFRVYSSANNCTFEYVSQPFLMDLEGKQGNFKNLREFVFKNIDGYFKIYSKHTPINLVRDLPQGFSALEPLVDLPIGINITRFQTLLALHRSYLTPGDSSSGWTAGAAAYYVGYLQPRTFLLKYNENGTITDAVDCALDPLSETKCTLKSFTVEKGIYQTSNFRVQPTESIVRFPNITNLCPFGEVFNATRFASVYAWNRKRISNCVADYSVLYNSASFSTFKCYGVSPTKLNDLCFTNVYADSFVIRGDEVREIAPGQTGKIADYNYKLPDDFTGCVIAWNSNNLDSKVGGNYNYLYRLFRKSNLKPFERDISTEIYQAGSTPCNGVEGFNCYFPLQSYGFQPTNGVGYQPYRVVVLSFELLHAPATVCGPKKSTNLVKNKCVNFNFNGLTGTGVLTESNKKFLPFQQFGRDIADTTDAVRDPQTLEILDITPCSFGGVSVITPGTNTSNQVAVLYQDVNCTEVPVAIHADQLTPTWRVYSTGSNVFQTRAGCLIGAEHVNNSYECDIPIGAGICASYQTQTNSPRRARSVASQSIIAYTMSLGAENSVAYSNNSIAIPTNFTISVTTEILPVSMTKTSVDCTMYICGDSTECSNLLLQYGSFCTQLNRALTGIAVEQDKNTQEVFAQVKQIYKTPPIKDFGGFNFSQILPDPSKPSKRSFIEDLLFNKVTLADAGFIKQYGDCLGDIAARDLICAQKFNGLTVLPPLLTDEMIAQYTSALLAGTITSGWTFGAGAALQIPFAMQMAYRFNGIGVTQNVLYENQKLIANQFNSAIGKIQDSLSSTASALGKLQDVVNQNAQALNTLVKQLSSNFGAISSVLNDILSRLDPPEAEVQIDRLITGRLQSLQTYVTQQLIRAAEIRASANLAATKMSECVLGQSKRVDFCGKGYHLMSFPQSAPHGVVFLHVTYVFAQEKNFTTAPAICHDGKAHFPREGVFVSNGTHWFVTQRNFYEPQIITTDNTFVSGNCDVVIGIVNNTVYDPLQPELDSFKEELDKYFKNHTSPDVDLGDISGINASVVNIQKEIDRLNEVAKNLNESLIDLQELGKYEQYIK

SEQ ID NO: 1828 - protein, 1211 aa, Artificial Sequence
  SARS-CoV-2/Sweden/01/2020__EPI_ISL_411951 spike protein (1-1211)(K986P_V987P_P1069F)
MFVFLVLLPLVSSQCVNLTTRTQLPPAYTNSFTRGVYYPDKVFRSSVLHSTQDLFLPFFSNVTWFHAIHVSGTNGTKRFDNPVLPFNDGVYFASTEKSNIIRGWIFGTTLDSKTQSLLIVNNATNVVIKVCEFQFCNDPFLGVYYHKNNKSWMESEFRVYSSANNCTFEYVSQPFLMDLEGKQGNFKNLREFVFKNIDGYFKIYSKHTPINLVRDLPQGFSALEPLVDLPIGINITRFQTLLALHRSYLTPGDSSSGWTAGAAAYYVGYLQPRTFLLKYNENGTITDAVDCALDPLSETKCTLKSFTVEKGIYQTSNFRVQPTESIVRFPNITNLCPFGEVFNATRFASVYAWNRKRISNCVADYSVLYNSASFSTFKCYGVSPTKLNDLCFTNVYADSFVIRGDEVRQIAPGQTGKIADYNYKLPDDFTGCVIAWNSNNLDSKVGGNYNYLYRLFRKSNLKPFERDISTEIYQAGSTPCNGVEGFNCYFPLQSYGFQPTNGVGYQPYRVVVLSFELLHAPATVCGPKKSTNLVKNKCVNFNFNGLTGTGVLTESNKKFLPFQQFGRDIADTTDAVRDPQTLEILDITPCSFGGVSVITPGTNTSNQVAVLYQDVNCTEVPVAIHADQLTPTWRVYSTGSNVFQTRAGCLIGAEHVNNSYECDIPIGAGICASYQTQTNSPRRARSVASQSIIAYTMSLGAENSVAYSNNSIAIPTNFTISVTTEILPVSMTKTSVDCTMYICGDSTECSNLLLQYGSFCTQLNRALTGIAVEQDKNTQEVFAQVKQIYKTPPIKDCGGFNFSQILPDPSKPSKRSFIEDLLFNKVTLADAGFIKQYGDCLGDIAARDLICAQKFNGLTVLPPLLTDEMIAQYTSALLAGTITSGWTFGAGAALQIPFAMQMAYRFNGIGVTQNVLYENQKLIANQFNSAIGKIQDSLSSTASALGKLQDVVNQNAQALNTLVKQLSSNFGAISSVLNDILSRLDPPEAEVQIDRLITGRLQSLQTYVTQQLIRAAEIRASANLAATKMSECVLGQSKRVDFCGKGYHLMSFPQSAPHGVVFLHVTYVFAQEKNFTTAPAICHDGKAHFPREGVFVSNGTHWFVTQRNFYEPQIITTDNTFVSGNCDVVIGIVNNTVYDPLQPELDSFKEELDKYFKNHTSPDVDLGDISGINASVVNIQKEIDRLNEVAKNLNESLIDLQELGKYEQYIK

SEQ ID NO: 1829 - protein, 1211 aa, Artificial Sequence
  SARS-CoV-2/Tianmen/HBCDC-HB-07/2020__EPI_ISL_412983 spike protein (1-1211)(K986P_V987P_P1069F)
MFVFLVLLPLVSSQCVNLTTRTQLPPAYTNSFTRGVYYPDKVFRSSVLHSTQDLFLPFFSNVTWFHAIHVSGTNGTKRFDNPVLPFNDGVYFASTEKSNIIRGWIFGTTLDSKTQSLLIVNNATNVVIKVCEFQFCNDPFLGVYYHKNNKSWMESEFRVYSSANNCTFEYVSQPFLMDLEGKQGNFKNLREFVFKNIDGYFKIYSKHTPINLVRDLPQGFSALEPLVDLPIGINITRFQTLLALHRSYLTPGDSSSGWTAGAAAYYVGYLQPRTFLLKYNENGTITDAVDCALDPLSETKCTLKSFTVEKGIYQTSNFRVQPTESIVRFPNITNLCPFGEVFNATRFASVYAWNRKRISNCVADYSVLYNSASFSTFKCYGVSPTKLNDLCFTNVYADSFVIRGDEVRQIAPGQTGKIADYNYKLPDDFTGCVIAWNSNNLDSKVGGNYNYLYRLFRKSNLKPFERDISTEIYQAGSTPCNGVEGFNCYFPLQSYGFQPTNGVGYQPYRVVVLSFELLHAPATVCGPKKSTNLVKNKCVNFNFNGLTGTGVLTESNKKFLPFQQFGRDIADTTDAVRDPQTLEILDITPCSFGGVSVITPGTNTSNQVAVLYQDLNCTEVPVAIHADQLTPTWRVYSTGSNVFQTRAGCLIGAEHVNNSYECDIPIGAGICASYQTQTNSPRRARSVASQSIIAYTMSLGAENSVAYSNNSIAIPTNFTISVTTEILPVSMTKTSVDCTMYICGDSTECSNLLLQYGSFCTQLNRALTGIAVEQDKNTQEVFAQVKQIYKTPPIKDFGGFNFSQILPDPSKPSKRSFIEDLLFNKVTLADAGFIKQYGDCLGDIAARDLICAQKFNGLTVLPPLLTDEMIAQYTSALLAGTITSGWTFGAGAALQIPFAMQMAYRFNGIGVTQNVLYENQKLIANQFNSAIGKIQDSLSSTASALGKLQDVVNQNAQALNTLVKQLSSNFGAISSVLNDILSRLDPPEAEVQIDRLITGRLQSLQTYVTQQLIRAAEIRASANLAATKMSECVLGQSKRVDFCGKGYHLMSFPQSAPHGVVFLHVTYVFAQEKNFTTAPAICHDGKAHFPREGVFVSNGTHWFVTQRNFYEPQIITTDNTFVSGNCDVVIGIVNNTVYDPLQPELDSFKEELDKYFKNHTSPDVDLGDISGINASVVNIQKEIDRLNEVAKNLNESLIDLQELGKYEQYIK

SEQ ID NO: 1830 - protein, 1211 aa, Artificial Sequence
  SARS-CoV-2/Hong Kong/case42_VM20002493/2020__EPI_ISL_414527 spike protein (1-1211)(K986P_V987P_P1069F)
MFVFLVLLPLVSSQCVNLTTRTQLPPAYTNSFTRGVYYPDKVFRSSVLHSTQDLFLPFFSNVTWFHAIHVSGTNGTKRFDNPVLPFNDGVYFASTEKSNIIRGWIFGTTLDSKTQSLLIVNNATNVVIKVCEFQFCNDPFLGVYYHKNNKSWMESEFRVYSSANNCTFEYVSQPFLMDLEGKQGNFKNLREFVFKNIDGYFKIYSKHTPINLVRDLPQGFSALEPLVDLPIGINITRFQTLLALHRSYLTPGDSSSGWTAGAAAYYVGYLQPRTFLLKYNENGTITDAVDCALDPLSETKCTLKSFTVEKGIYQTSNFRVQPTESIVRFPNITNLCPFGEVFNATRFASVYAWNRKRISNCVADYSVLYNSASFSTFKCYGVSPTKLNDLCFTNVYADSFVIRGDEVRQIAPGQTGKIADYNYKLPDDFTGCVIAWNSNNLDSKVGGNYNYLYRLFRKSNLKPFERDISTEIYQAGSTPCNGVEGFNCYFPLQSYGFQPTNGVGYQPYRVVVLSFELLHAPATVCGPKKSTNLVKNKCVNFNFNGLTGTGVLTESNKKFLPFQQFGRDIADTTDAVRDPQTLEILDITPCSFGGVSVITPGTNTSNQVAVLYQDVNCTEVPVAIHADQLTPTWRVYSTGSNVFQTRAGCLIGAEHVNNSYECDIPIGAGICASYQTQTNSPRRARSVASQSIIAYTMSLGAENSVAYSNNSIAIPTNFAISVTTEILPVSMTKTSVDCTMYICGDSTECSNLLLQYGSFCTQLNRALTGIAVEQDKNTQEVFAQVKQIYKTPPIKDFGGFNFSQILPDPSKPSKRSFIEDLLFNKVTLADAGFIKQYGDCLGDIAARDLICAQKFNGLTVLPPLLTDEMIAQYTSALLAGTITSGWTFGAGAALQIPFAMQMAYRFNGIGVTQNVLYENQKLIANQFNSAIGKIQDSLSSTASALGKLQDVVNQNAQALNTLVKQLSSNFGAISSVLNDILSRLDPPEAEVQIDRLITGRLQSLQTYVTQQLIRAAEIRASANLAATKMSECVLGQSKRVDFCGKGYHLMSFPQSAPHGVVFLHVTYVFAQEKNFTTAPAICHDGKAHFPREGVFVSNGTHWFVTQRNFYEPQIITTDNTFVSGNCDVVIGIVNNTVYDPLQPELDSFKEELDKYFKNHTSPDVDLGDISGINASVVNIQKEIDRLNEVAKNLNESLIDLQELGKYEQYIK

SEQ ID NO: 1831 - protein, 1211 aa, Artificial Sequence
  SARS-CoV-2/USA/CruiseA-23/2020__EPI_ISL_414482 spike protein (1-1211)(K986P_V987P_P1069F)
MFVFLVLLPLVSSQCVNLTTRTQLPPAYTNSFTRGVYYPDKVFRSSVLHSTQDLFLPFFSNVTWFHAIHVSGTNGTKRFDNPVLPFNDGVYFASTEKSNIIRGWIFGTTLDSKTQSLLIVNNATNVVIKVCEFQFCNDPFLGVYYHKNNKSWMESEFRVYSSANNCTFEYVSQPFLMDLEVKQGNFKNLREFVFKNIDGYFKIYSKHTPINLVRDLPQGFSALEPLVDLPIGINITRFQTLLALHRSYLTPGDSSSGWTAGAAAYYVGYLQPRTFLLKYNENGTITDAVDCALDPLSETKCTLKSFTVEKGIYQTSNFRVQPTESIVRFPNITNLCPFGEVFNATRFASVYAWNRKRISNCVADYSVLYNSASFSTFKCYGVSPTKLNDLCFTNVYADSFVIRGDEVRQIAPGQTGKIADYNYKLPDDFTGCVIAWNSNNLDSKVGGNYNYLYRLFRKSNLKPFERDISTEIYQAGSTPCNGVEGFNCYFPLQSYGFQPTNGVGYQPYRVVVLSFELLHAPATVCGPKKSTNLVKNKCVNFNFNGLTGTGVLTESNKKFLPFQQFGRDIADTTDAVRDPQTLEILDITPCSFGGVSVITPGTNTSNQVAVLYQDVNCTEVPVAIHADQLTPTWRVYSTGSNVFQTRAGCLIGAEHVNNSYECDIPIGAGICASYQTQTNSPRRARSVASQSIIAYTMSLGAENSVAYSNNSIAIPTNFTISVTTEILPVSMTKTSVDCTMYICGDSTECSNLLLQYGSFCTQLNRALTGIAVEQDKNTQEVFAQVKQIYKTPPIKDFGGFNFSQILPDPSKPSKRSFIEDLLFNKVTLADAGFIKQYGDCLGDIAARDLICAQKFNGLTVLPPLLTDEMIAQYTSALLAGTITSGWTFGAGAALQIPFAMQMAYRFNGIGVTQNVLYENQKLIANQFNSAIGKIQDSLSSTASALGKLQDVVNQNAQALNTLVKQLSSNFGAISSVLNDILSRLDPPEAEVQIDRLITGRLQSLQTYVTQQLIRAAEIRASANLAATKMSECVLGQSKRVDFCGKGYHLMSFPQSAPHGVVFLHVTYVFAQEKNFTTAPAICHDGKAHFPREGVFVSNGTHWFVTQRNFYEPQIITTDNTFVSGNCDVVIGIVNNTVYDPLQPELDSFKEELDKYFKNHTSPDVDLGDISGINASVVNIQKEIDRLNEVAKNLNESLIDLQELGKYEQYIK

SEQ ID NO: 1832 - protein, 1211 aa, Artificial Sequence
  SARS-CoV-2/Hong Kong/case85_VM20002868/2020__EPI_ISL_414519 spike protein (1-1211)(K986P_V987P_P1069F)
MFVFLVLVPLVSSQCVNLTTRTQLPPAYTNSFTRGVYYPDKVFRSSVLHSTQDLFLPFFSNVTWFHAIHVSGTNGTKRFDNPVLPFNDGVYFASTEKSNIIRGWIFGTTLDSKTQSLLIVNNATNVVIKVCEFQFCNDPFLGVYYHKNNKSWMESEFRVYSSANNCTFEYVSQPFLMDLEGKQGNFKNLREFVFKNIDGYFKIYSKHTPINLVRDLPQGFSALEPLVDLPIGINITRFQTLLALHRSYLTPGDSSSGWTAGAAAYYVGYLQPRTFLLKYNENGTITDAVDCALDPLSETKCTLKSFTVEKGIYQTSNFRVQPTESIVRFPNITNLCPFGEVFNATRFASVYAWNRKRISNCVADYSVLYNSASFSTFKCYGVSPTKLNDLCFTNVYADSFVIRGDEVRQIAPGQTGKIADYNYKLPDDFTGCVIAWNSNNLDSKVGGNYNYLYRLFRKSNLKPFERDISTEIYQAGSTPCNGVEGFNCYFPLQSYGFQPTNGVGYQPYRVVVLSFELLHAPATVCGPKKSTNLVKNKCVNFNFNGLTGTGVLTESNKKFLPFQQFGRDIADTTDAVRDPQTLEILDITPCSFGGVSVITPGTNTSNQVAVLYQDVNCTEVPVAIHADQLTPTWRVYSTGSNVFQTRAGCLIGAEHVNNSYECDIPIGAGICASYQTQTNSPRRARSVASQSIIAYTMSLGAENSVAYSNNSIAIPTNFTISVTTEILPVSMTKTSVDCTMYICGDSTECSNLLLQYGSFCTQLNRALTGIAVEQDKNTQEVFAQVKQIYKTPPIKDFGGFNFSQILPDPSKPSKRSFIEDLLFNKVTLADAGFIKQYGDCLGDIAARDLICAQKFNGLTVLPPLLTDEMIAQYTSALLAGTITSGWTFGAGAALQIPFAMQMAYRFNGIGVTQNVLYENQKLIANQFNSAIGKIQDSLSSTASALGKLQDVVNQNAQALNTLVKQLSSNFGAISSVLNDILSRLDPPEAEVQIDRLITGRLQSLQTYVTQQLIRAAEIRASANLAATKMSECVLGQSKRVDFCGKGYHLMSFPQSAPHGVVFLHVTYVFAQEKNFTTAPAICHDGKAHFPREGVFVSNGTHWFVTQRNFYEPQIITTDNTFVSGNCDVVIGIVNNTVYDPLQPELDSFKEELDKYFKNHTSPDVDLGDISGINASVVNIQKEIDRLNEVAKNLNESLIDLQELGKYEQYIK

SEQ ID NO: 1833 - protein, 1211 aa, Artificial Sequence; identical to SEQ ID NO: 1823
  SARS-CoV-2/England/200990660/2020__EPI_ISL_414523 spike protein (1-1211)(K986P_V987P_P1069F)

SEQ ID NO: 1834 - protein, 1211 aa, Artificial Sequence
  SARS-CoV-2/Australia/NSW09/2020__EPI_ISL_413595 spike protein (1-1211)(K986P_V987P_P1069F)
MFVFLVLLPLVSSQCVNLTTRTQLPPAYTNSFTRGVYYPDKVFRSSVLHSTQDLFLPFFSNVTWFHAIHVSGTNGTKRFDNPVLPFNDGVYFASTEKSNIIRGWIFGTTLDSKTQSLLIVNNATNVVIKVCEFQFCNDPFLGVYYHKNNKSWMESEFRVYSSANNCTFEYVSQPFLMDLEGKQGNFKNLREFVFKNIDGYFKIYSKHTPINLVRDLPQGFSALEPLVDLPIGINITRFQTLLALHRSYLTPGDSSSGWTAGAAAYYVGYLQPRTFLLKYNENGTITDAVDCALDPLSETKCTLKSFTVEKGIYQTSNFRVQPTESIVRFPNITNLCPFGEVFNATRFASVYAWNRKRISNCVADYSVLYNSASFSTFKCYGVSPTKLNDLCFTNVYADSFVIRGDEVRQIAPGQTGKIADYNYKLPDDFTGCVIAWNSNNLDSKVGGNYNYLYRLFRKSNLKPFERDISTEIYQAGSTPCNGVEGFNCYFPLQSYGFQPTNGVGYQPYRVVVLSFELLHAPATVCGPKKSTNLVKNKCVNFNFNGLTGTGVLTESNKKFLPFQQFGRDIADTTDAVRDPQTLEILDITPCSFGGVSVITPGTNTSNQVAVLYQDVNCTEVPVAIHADQLTPTWRVYSTGSNVFQTRAGCLIGAEHVNNSYECDIPIGAGICASYQTQTNSPRRARSVASQSIIAYTMSLGAENSVAYSNNSIAIPTNFTISVTTEILPVSMTKTSVDCTMYICGDSTECSNLLLQYGSFCTQLNRALTGIAVEQDKNTQEVFAQVKQIYKTPPIKDFGGFNFSQILPDPSKPSKRSFIEDLLFNKVTLADAGFIKQYGDCLGDIAARDLICAQKFNGLTVLPPLLTDEMIAQYTSALLAGTITSGWTFGAGAALQIPFAMQMAYRFNGIGVTQNVLYENQKLIANQFNSAIGKIQDSLSFTASALGKLQDVVNQNAQALNTLVKQLSSNFGAISSVLNDILSRLDPPEAEVQIDRLITGRLQSLQTYVTQQLIRAAEIRASANLAATKMSECVLGQSKRVDFCGKGYHLMSFPQSAPHGVVFLHVTYVFAQEKNFTTAPAICHDGKAHFPREGVFVSNGTHWFVTQRNFYEPQIITTDNTFVSGNCDVVIGIVNNTVYDPLQPELDSFKEELDKYFKNHTSPDVDLGDISGINASVVNIQKEIDRLNEVAKNLNESLIDLQELGKYEQYIK

SEQ ID NO: 1835 - protein, 1211 aa, Artificial Sequence; identical to SEQ ID NO: 1815
  SARS-CoV-2/Australia/NSW10/2020__EPI_ISL_413596 spike protein (1-1211)(K986P_V987P_P1069F)

SEQ ID NO: 1836 - protein, 1211 aa, Artificial Sequence
  SARS-CoV-2/Switzerland/1000477797/2020__EPI_ISL_413023 spike protein (1-1211)(K986P_V987P_P1069F)
MFVFLVLLPLVSSQCVNLTTRTQLPPAYTNSFTRGVYYPDKVFRSSVLHSTQDLFLPFFSNVTWFHAIHVSGTNGTKRFDNPVLPFNDGVYFASTEKSNIIRGWIFGTTLDSKTQSLLIVNNATNVVIKVCEFQFCNDPFLGVYYHKNNKSWMESEFRVYSSANNCTFEYVSQPFLMDLEGKQGNFKNLREFVFKNIDGYFNIYSKHTPINLVRDLPQGFSALEPLVDLPIGINITRFQTLLALHRSYLTPGDSSSGWTAGAAAYYVGYLQPRTFLLKYNENGTITDAVDCALDPLSETKCTLKSFTVEKGIYQTSNFRVQPTESIVRFPNITNLCPFGEVFNATRFASVYAWNRKRISNCVADYSVLYNSASFSTFKCYGVSPTKLNDLCFTNVYADSFVIRGDEVRQIAPGQTGKIADYNYKLPDDFTGCVIAWNSNNLDSKVGGNYNYLYRLFRKSNLKPFERDISTEIYQAGSTPCNGVEGFNCYFPLQSYGFQPTNGVGYQPYRVVVLSFELLHAPATVCGPKKSTNLVKNKCVNFNFNGLTGTGVLTESNKKFLPFQQFGRDIADTTDAVRDPQTLEILDITPCSFGGVSVITPGTNTSNQVAVLYQGVNCTEVPVAIHADQLTPTWRVYSTGSNVFQTRAGCLIGAEHVNNSYECDIPIGAGICASYQTQTNSPRRARSVASQSIIAYTMSLGAENSVAYSNNSIAIPTNFTISVTTEILPVSMTKTSVDCTMYICGDSTECSNLLLQYGSFCTQLNRALTGIAVEQDKNTQEVFAQVKQIYKTPPIKDFGGFNFSQILPDPSKPSKRSFIEDLLFNKVTLADAGFIKQYGDCLGDIAARDLICAQKFNGLTVLPPLLTDEMIAQYTSALLAGTITSGWTFGAGAALQIPFAMQMAYRFNGIGVTQNVLYENQKLIANQFNSAIGKIQDSLSSTASALGKLQDVVNQNAQALNTLVKQLSSNFGAISSVLNDILSRLDPPEAEVQIDRLITGRLQSLQTYVTQQLIRAAEIRASANLAATKMSECVLGQSKRVDFCGKGYHLMSFPQSAPHGVVFLHVTYVFAQEKNFTTAPAICHDGKAHFPREGVFVSNGTHWFVTQRNFYEPQIITTDNTFVSGNCDVVIGIVNNTVYDPLQPELDSFKEELDKYFKNHTSPDVDLGDISGINASVVNIQKEIDRLNEVAKNLNESLIDLQELGKYEQYIK

SEQ ID NO: 1837 - protein, 1211 aa, Artificial Sequence
  SARS-CoV-2/Belgium/BA-02291/2020__EPI_ISL_415159 spike protein (1-1211)(K986P_V987P_P1069F)
MFVFLVLLPLVSSQCVNLTTRTQLPPAYTNSFTRGVYYPDKVFRSSVLHSTQDLFLPFFSNVTWFHAIHVSGTNGTKRFDNPVLPFNDGVYFASTEKSNIIRGWIFGTTLDSKTQSLLIVNNATNVVIKVCEFQFCNDPFLGVYYHKNNKSWMESEFRVYSSANNCTFEYVSQPFLMDLEGKQGNFKNLREFVFKNIDGYFKIYSKHTPINLVRDLPQGFSALEPLVDLPIGINITRFQTLLALHRSYLTPGDSSSGWTAGAAAYYVGYLQPRTFLLKYNENGTITDAVDCALDPLSETKCTLKSFTVEKGIYQTSNFRVQPTESIVRFPNITNLCPFGEVFNATRFASVYAWNRKRISNCVADYSVLYNSASFSTFKCYGVSPTKLNDLCFTNVYADSFVIRGDEVRQIAPGQTGKIADYNYKLPDDFTGCVIAWNSNNLDSKVGGNYNYLYRLFRRSNLKPFERDISTEIYQAGSTPCNGVEGFNCYFPLQSYGFQPTNGVGYQPYRVVVLSFELLPAPATVCGPKKSTNLVKNKCVNFNFNGLTGTGVLTESNKKFLPFQQFGRDIADTTDAVRDPQTLEILDITPCSFGGVSVITPGTNTSNQVAVLYQGVNCTEVPVAIHADQLTPTWRVYSTGSNVFQTRAGCLIGAEHVNNSYECDIPIGAGICASYQTQTNSPRRARSVASQSIIAYTMSLGAENSVAYSNNSIAIPTNFTISVTTEILPVSMTKTSVDCTMYICGDSTECSNLLLQYGSFCTQLNRALTGIAVEQDKNTQEVFAQVKQIYKTPPIKDFGGFNFSQILPDPSKPSKRSFIEDLLFNKVTLADAGFIKQYGDCLGDIAARDLICAQKFNGLTVLPPLLTDEMIAQYTSALLAGTITSGWTFGAGAALQIPFAMQMAYRFNGIGVTQNVLYENQKLIANQFNSAIGKIQDSLSSAAPALGKLQDVVNQNAQALNTLVKQLSSNFGAISSVLNDILSRLDPPEAEVQIDRLITGRLQSLQTYVTQQLIRAAEIRASANLAATKMSECVLGQSKRVDFCGKGYHLMSFPQSAPHGVVFLHVTYVFAQEKNFTTAPAICHDGKAHFPREGVFVSNGTHWFVTQRNFYEPQIITTDNTFVSGNCDVVIGIVNNTVYDPLQPELDSFKEELDKYFKNHTSPDVDLGDISGINASVVNIQKEIDRLNEVAKNLNESLIDLQELGKYEQYIK

SEQ ID NO: 1838 - protein, 1211 aa, Artificial Sequence
  SARS-CoV-2/USA/WA8-UW5/2020__EPI_ISL_413486 spike protein (1-1211)(K986P_V987P_P1069F)
MFVFLVLLPLVSSQCVNLTTRTQLPPAYTNSFTRGVYYPDKVFRSSVLHSTQDLFLPFFSNVTWFHAIHVSGTNGTKRFDNPVLPFNDGVYFASTEKSNIIRGWIFGTTLDSKTQSLLIVNNATNVVIKVCEFQFCNDPFLGVYYHKNNKSWMESEFRVYSSANNCTFEYVSQPFLMDLEGKQGNFKNLREFVFKNIDGYFKIYSKHTPINLVRDLPQGFSALEPLVDLPIGINITRFQTLLALHRSYLTPGDSSSGWTAGAAAYYVGYLQPRTFLLKYNENGTITDAVDCALDPLSETKCTLKSFTVEKGIYQTSNFRVQPTESIVRFPNITNLCPFGEVFNATRFASVYAWNRKRISNCVADYSVLYNSASFSTFKCYGVSPTKLNDLCFTNVYADSFVIRGDEVRQIAPGQTGKIADYNYKLPDDFTGCVIAWNSNNLDSKVGGNYNYLYRLFRKSNLKPFERDISTEIYQAGSTPCNGVEGFNCYFPLQSYGFQPTNGVGYQPYRVVVLSFELLHAPATVCGPKKSTNLVKNKCVNFNFNGLTGTGVLTESNKKFLPFQQFGRDIADTTDAVRDPQTLEILDITPCSFGGVSVITPGTNTSNQVAVLYQDVNCTEVPVAIHADQLTPTWRVYSTGSNVFQTRAGCLIGAEYVNNSYECDIPIGAGICASYQTQTNSPRRARSVASQSIIAYTMSLGAENSVAYSNNSIAIPTNFTISVTTEILPVSMTKTSVDCTMYICGDSTECSNLLLQYGSFCTQLNRALTGIAVEQDKNTQEVFAQVKQIYKTPPIKDFGGFNFSQILPDPSKPSKRSFIEDLLFNKVTLADAGFIKQYGDCLGDIAARDLICAQKFNGLTVLPPLLTDEMIAQYTSALLAGTITSGWTFGAGAALQIPFAMQMAYRFNGIGVTQNVLYENQKLIANQFNSAIGKIQDSLSSTASALGKLQDVVNQNAQALNTLVKQLSSNFGAISSVLNDILSRLDPPEAEVQIDRLITGRLQSLQTYVTQQLIRAAEIRASANLAATKMSECVLGQSKRVDFCGKGYHLMSFPQSAPHGVVFLHVTYVFAQEKNFTTAPAICHDGKAHFPREGVFVSNGTHWFVTQRNFYEPQIITTDNTFVSGNCDVVIGIVNNTVYDPLQPELDSFKEELDKYFKNHTSPDVDLGDISGINASVVNIQKEIDRLNEVAKNLNESLIDLQELGKYEQYIK

SEQ ID NO: 1839 - protein, 1211 aa, Artificial Sequence
  SARS-CoV-2/England/20102000506/2020__EPI_ISL_415147 spike protein (1-1211)(K986P_V987P_P1069F)
MFVFLVLLPLVSSQCVNLTTRTQLPPAYTNSFTRGVYYPDKVFRSSVLHSTQDLFLPFFSNVTWFHAIHVSGTNGTKRFDNPVLPFNDGVYFASTEKSNIIRGWIFGTTLDSKTQSLLIVNNATNVVIKVCEFQFCNDPFLGVYYHKNNKSWMESEFRVYSSANNCTFEYVSQPFLMDLEGKQGNFKNLREFVFKNIDGYFKIYSKHTPINLVRDLPQGFSALEPLVDLPIGINITRFQTLLALHRSYLTPGDSSSGWTAGAAAYYVGYLQPRTFLLKYNENGTITDAVDCALDPLSETKCTLKSFTVEKGIYQTSNFRVQPTESIVRFPNITNLCPFGEVFNATRFASVYAWNRKRISNCVADYSVLYNSASFSTFKCYGVSPTKLNDLCFTNVYADSFVIRGDEVRQIAPGQTGKIADYNYKLPDDFTGCVIAWNSNNLDSKVGGNYNYLYRLFRKSNLKPFERDISTEIYQAGSTPCNGVEGFNCYFPLQSYGFQPTNGVGYQPYRVVVLSFELLHAPATVCGPKKSTNLVKNKCVNFNFNGLTGTGVLTESNKKFLPFQQFGRDIADTTDAVRDPQTLEILDITPCSFGGVSVITPGTNTSNQVAVLYQGVNCTEVPVAIHADQLTPTWRVYSTGSNVFQTRAGCLIGAEHVNNSYECDIPIGAGICASYQTQTNSPRRARSVASQSIIAYTMSLGAENSVAYSNNSIAIPTNFTISVTTEILPVSMTKTSVDCTMYICGDSTECSNLLLQYGSFCTQLNRALTGIAVEQDKNTQEVFAQVKQIYKTPPIKDFGGFNFSQILPDPSKPSKRSFIEDLLFNKVTLADAGFIKQYGYCLGDIAARDLICAQKFNGLTVLPPLLTDEMIAQYTSALLAGTITSGWTFGAGAALQIPFAMQMAYRFNGIGVTQNVLYENQKLIANQFNSAIGKIQDSLSSTASALGKLQDVVNQNAQALNTLVKQLSSNFGAISSVLNDILSRLDPPEAEVQIDRLITGRLQSLQTYVTQQLIRAAEIRASANLAATKMSECVLGQSKRVDFCGKGYHLMSFPQSAPHGVVFLHVTYVFAQEKNFTTAPAICHDGKAHFPREGVFVSNGTHWFVTQRNFYEPQIITTDNTFVSGNCDVVIGIVNNTVYDPLQPELDSFKEELDKYFKNHTSPDVDLGDISGINASVVNIQKEIDRLNEVAKNLNESLIDLQELGKYEQYIK

SEQ ID NO: 1840 - protein, 1211 aa, Artificial Sequence
  SARS-CoV-2/Belgium/VAG-03013/2020__EPI_ISL_415155 spike protein (1-1211)(K986P_V987P_P1069F)
MFVFLVLLPLVSSQCVNLTTRTQLPPAYTNSFTRGVYYPDKVFRSSVLHSTQDLFLPFFSNVTWFHAIHVSGTNGTKRFDNPVLPFNDGVYFASTEKSNIIRGWIFGTTLDSKTQSLLIVNNATNVVIKVCEFQFCNDPFLGVYYHKNNKSWMESEFRVYSSANNCTFEYVSQPFLMDLEGKQGNFKNLREFVFKNIDGYFKIYSKHTPINLVRDLPQGFSALEPLVDLPIGINITRFQTLLALHRSYLTPGDSSSGWTAGAAAYYVGYLQPRTFLLKYNENGTITDAVDCALDPLSETKCTLKSFTVEKGIYQTSNFRVQPTESIVRFPNITNLCPFGEVFNATRFASVYAWNRKRISNCVADYSVLYNSASFSTFKCYGVSPTKLNDLCFTNVYADSFVIRGDEVRQIAPGQTGKIADYNYKLPDDFTGCVIAWNSNNLDSKVGGNYNYLYRLFRKSNLKPFERDISTEIYQAGSTPCNGVEGFNCYFPLQSYGFQPTNGVGYQPYRVVVLSFELLHAPATVCGPKKSTNLVKNKCVNFNFNGLTGTGVLTESNKKFLPFQQFGRDIADTTDAVRDPQTLEILDITPCSFGGVSVITPGTNTSNQVAVLYQGVNCTEVPVAIHADQLTPTWRVYSTGSNVFQTRAGCLIGAEHVNNSYECDIPIGAGICASYQTQTNSPRRARSVASQSIIAYTMSLGAENSVAYSNNSIAIPTNFTISVTTEILPVSMTKTSVDCTMYICGDSTECSNLLLQYGSFCTQLNRALTGIAVEQDKNTQEVFAQVKQIYKTPPIKDFGGFNFSQILPDPSKPSKRSFIEDLLFNKVTLADAGFIKQYGDCLGDIAARDLICAQKFNGLTVLPPLLTDEMIAQYTSALLAGTITSGWTFGAGAALQIPFAMQMAYRFNGIGVTQNVLYENQKLIANQFNSAIGKIQDSLSSTATALGKLQDVVNQNAQALNTLVKQLSSNFGAISSVLNDILSRLDPPEAEVQIDRLITGRLQSLQTYVTQQLIRAAEIRASANLAATKMSECVLGQSKRVDFCGKGYHLMSFPQSAPHGVVFLHVTYVFAQEKNFTTAPAICHDGKAHFPREGVFVSNGTHWFVTQRNFYEPQIITTDNTFVSGNCDVVIGIVNNTVYDPLQPELDSFKEELDKYFKNHTSPDVDLGDISGINASVVNIQKEIDRLNEVAKNLNESLIDLQELGKYEQYIK

SEQ ID NO: 1841 - protein, 1211 aa, Artificial Sequence
  SARS-CoV-2/Belgium/BC-03016/2020__EPI_ISL_415157 spike protein (1-1211)(K986P_V987P_P1069F)
MFVFLVLLPLVSSQCVNLTTRTQLPPAYTNSFTRGVYYPDKVFRSSVLHSTQDLFLPFFSNVTWFHAIHVSGTNGTKRFDNPVLPFNDGVYFASTEKSNIIRGWIFGTTLDSKTQSLLIVNNATNVVIKVCEFQFCNDPFLGVYYHKNNKSWMESEFRVYSSANNCTFEYVSQPFLMDLEGKQGNFKNLREFVFKNIDGYFKIYSKHTPINLVRDLPQGFSALEPLVDLPIGINITRFQTLLALHRSYLTPGDSSSGWTAGAAAYYVGYLQPRTFLLKYNENGTITDAVDCALDPLSETKCTLKSFTVEKGIYQTSNFRVQPTESIVRFPNITNLCPFGEVFNATRFASVYAWNRKRISNCVADYSVLYNSASFSTFKCYGVSPTKLNDLCFTNVYADSFVIRGDEVRQIAPGQTGKIADYNYKLPDDFTGCVIAWNSNNLDSKVGGNYNYLYRLFRKSNLKPFERDISTEIYQAGSTPCNGVEGFNCYFPLQSYGFQPTNGVGYQPYRVVVLSFELLHAPATVCGPKKSTNLVKNKCVNFNFNGLTGTGVLTESNKKFLPFQQFGRDIADTTDAVRDPQTLEILDITPCSFGGVSVITPGTNTSNQVAVLYQGVNCTEVPVAIHADQLTPTWRVYSTGSNVFQTRAGCLIGAEHVNNSYECDIPIGAGICASYQTQTNSPRRARSVASQSIIAYTMSLGAENSVAYSNNSIAIPTNFTISVTTEILPVSMTKTSVDCTMYICGDSTECSNLLLQYGSFCTQLNRALTGIAVEQDKNTQEVFAQVKQIYKTPPIKDFGGFNFSQILPDPSKPSKRSFIEDLLFNKVTLADAGFIKQYGDCLGDIAARDLICAQKFNGLTVLPPLLTDEMIAQYTSALLAGTITSGWTFGAGAALQIPFAMQMAYRFNGIGVTQNVLYENQKLIANQFNSAIGKIQDSLSSTAPALGKLQDVVNQNAQALNTLVKQLSSNFGAISSVLNDILSRLDPPEAEVQIDRLITGRLQSLQTYVTQQLIRAAEIRASANLAATKMSECVLGQSKRVDFCGKGYHLMSFPQSAPHGVVFLHVTYVFAQEKNFTTAPAICHDGKAHFPREGVFVSNGTHWFVTQRNFYEPQIITTDNTFVSGNCDVVIGIVNNTVYDPLQPELDSFKEELDKYFKNHTSPDVDLGDISGINASVVNIQKEIDRLNEVAKNLNESLIDLQELGKYEQYIK

SEQ ID NO: 1842 - protein, 1211 aa, Artificial Sequence
  SARS-CoV-2/Germany/BavPat3/2020__EPI_ISL_414521 spike protein (1-1211)(K986P_V987P_P1069F)
MFVFLVLLPLVSSQCVNLTTRTQLPPAYTNSFTRGVYYPDKVFRSSVLHSTQDLFLPFFSNVTWFHAIHVSGTNGTKRFDNPVLPFNDGVYFASTEKSNIIRGWIFGTTLDSKTQSLLIVNNATNVVIKVCEFQFCNDPFLGVYYHKNNKSWMESEFRVYSSANNCTFEYVSQPFLMDLEGKQGNFKNLREFVFKNIDGYFKIYSKHTPINLVRDLPQGFSALEPLVDLPIGINITRFQTLLALHRSYLTPGDSSSGWTAGAAAYYVGYLQPRTFLLKYNENGTITDAVDCALDPLSETKCTLKSFTVEKGIYQTSNFRVQPTESIVRFPNITNLCPFGEVFNATRFASVYAWNRKRISNCVADYSVLYNSASFSTFKCYGVSPTKLNDLCFTNVYADSFVIRGDEVRQIAPGQTGKIADYNYKLPDDFTGCVIAWNSNNLDSKVGGNYNYLYRLFRKSNLKPFERDISTEIYQAGSTPCNGVEGFNCYFPLQSYGFQPTNGVGYQPYRVVVLSFELLHAPATVCGPKKSTNLVKNKCVNFNFNGLTGTGVLTESNKKFLPFQQFGRDIADTTDAVRDPQTLEILDITPCSFGGVSVITPGTNTSNQVAVLYQDVNCTEVPVAIHADQLTPTWRVYSTGSNVFQTRAGCLIGAEHVNNSYECDIPIGAGICASYQTQTNSPRRARSVASQSIIAYTMSLGAENSVAYSNNSIAIPTNFTISVTTEILPVSMTKTSVDCTMYICGDSTECSNLLLQYGSFCTQLNRALTGIAVEQDKNTQQVFAQVKQIYKTPPIKDFGGFNFSQILPDPSKPSKRSFIEDLLFNKVTLADAGFIKQYGDCLGDIAARDLICAQKFNGLTVLPPLLTDEMIAQYTSALLAGTITSGWTFGAGAALQIPFAMQMAYRFNGIGVTQNVLYENQKLIANQFNSAIGKIQDSLSSTASALGKLQDVVNQNAQALNTLVKQLSSNFGAISSVLNDILSRLDPPEAEVQIDRLITGRLQSLQTYVTQQLIRAAEIRASANLAATKMSECVLGQSKRVDFCGKGYHLMSFPQSAPHGVVFLHVTYVFAQEKNFTTAPAICHDGKAHFPREGVFVSNGTHWFVTQRNFYEPQIITTDNTFVSGNCDVVIGIVNNTVYDPLQPELDSFKEELDKYFKNHTSPDVDLGDISGINASVVNIQKEIDRLNEVAKNLNESLIDLQELGKYEQYIK

SEQ ID NO: 1843 - protein, 1211 aa, Artificial Sequence
  SARS-CoV-2/France/HF1805/2020__EPI_ISL_414628 spike protein (1-1211)(K986P_V987P_P1069F)
MFVFLVLLPLVSSQCVNLTTRTQLPPAYTNSFTRGVYYPDKVFRSSVLHSTQDLFLPFFSNVTWFHAIHVSGTNGTKRFDNPVLPFNDGVYFASTEKSNIIRGWIFGTTLDSKTQSLLIVNNATNVVIKVCEFQFCNDPFLGVYYHKNNKSWMESEFRVYSSANNCTFEYVSQPFLMDLEGKQGNFKNLREFVFKNIDGYFKIYSKHTPINLVRDLPQGFSALEPLVDLPIGINITRFQTLLALHRSYLTPGDSSSGWTAGAAAYYVGYLQPRTFLLKYNENGTITDAVDCALDPLSETKCTLKSFTVEKGIYQTSNFRVQPTESIVRFPNITNLCPFGEVFNATRFASVYAWNRKRISNCVADYSVLYNSASFSTFKCYGVSPTKLNDLCFTNVYADSFVIRGDEVRQIAPGQTGKIADYNYKLPDDFTGCVIAWNSNNLDSKVGGNYNYLYRLFRKSNLKPFERDISTEIYQAGSTPCNGVEGFNCYFPLQSYGFQPTNGVGYQPYRVVVLSFELLHAPATVCGPKKSTNLVKNKCVNFNFNGLTGTGVLTESNKKFLPFQQFGRDIADTTDAVRDPQTLEILDITPCSFGGVSVITPGTNTSNQVAVLYQGVNCTEVPVAIHADQLTPTWRVYSTGSNVFQTRAGCLIGAEHVNNSYECDIPIGAGICASYQTQTNSPRRARSVASQSIIAYTMSLGAENSVAYSNNSIAIPTNFTISVTTEILPVSMTKTSVDCTMYICGDSTECSNLLLQYGSFCTQLNRALTGIAVEQDKNTQEVFAQVKQIYKTPPIKDFGGFNFSQILPDPSKPSKRSFIEDLLFNKVTLADAGFIKQYGDCLGDIAARDLICAQKFNGLTVLPPLLTDEMIAQYTSALLAGTITSGWTFGAGAALQIPFAMQMAYRFNGIGVTQNVLYENQKLIANQFNSAIGKIQDSLSSTASALGKLQDVVNQNAQALNTLVKQLSSNFGAISSVLNDILSRLDPPEAEVQIDRLITGRLQSLQTYVTQQLIRAAEIRASANLAATKMSECVLGQSKRVDFCGKGYHLMSFPQSAPHGVVFLHVTYVFAQEKNFTTAPAICHDGKAHFPREGVFVSNGTHWFVTQRNFYEPQIITTDNTFVSGNCDVVIGVVNNTVYDPLQPELDSFKEELDKYFKNHTSPDVDLGDISGINASVVNIQKEIDRLNEVAKNLNESLIDLQELGKYEQYIK

SEQ ID NO: 1844 - protein, 1211 aa, Artificial Sequence
  SARS-CoV-2/Netherlands/ZuidHolland_9/2020__EPI_ISL_414445 spike protein (1-1211)(K986P_V987P_P1069F)
MFVFLVLLPLVSSQCVNLTTRTQLPPAYTNSFTRGVYYPDKVFRSSVLHSTQDLFLPFFSNVTWFHAIHVSGTNGTKRFDNPVLPFNDGVYFASTEKSNIIRGWIFGTTLDSKTQSLLIVNNATNVVIKVCEFQFCNDPFLGVYYHKNNKSWMESEFRVYSSANNCTFEYVSQPFLMDLEGKQGNFKNLREFVFKNIDGYFKIYSKHTPINLVRDLPQGFSALEPLVDLPIGINITRFQTLLALHRSYLTPGDSSSGWTAGAAAYYVGYLQPRTFLLKYNENGTITDAVDCALDPLSETKCTLKSFTVEKGIYQTSNFRVQPTESIVRFPNITNLCPFGEVFNATRFASVYAWNRKRISNCVADYSVLYNSASFSTFKCYGVSPTKLNDLCFTNVYADSFVIRGDEVRQIAPGQTGKIADYNYKLPDDFTGCVIAWNSNNLDSKVGGNYNYLYRLFRKSNLKPFERDISTEIYQAGSTPCNGVEGFNCYFPLQSYGFQPTNGVGYQPYRVVVLSFELLHAPATVCGPKKSTNLVKNKCVNFNFNGLTGTGVLTESNKKFLPFQQFGRDIADTTDAVRDPQTLEILDITPCSFGGVSVITPGTNTSNQVAVLYQGVNCTEVPVAIHADQLTPTWRVYSTGSNVFQTRAGCLIGAEHVNNSYECDIPIGAGICASYQTQTNSPRRARSVASQSIIAYTMSLGAENSVAYSNNSIAIPTNFTISVTTEILPVSMTKTSVDCTMYICGDSTECSNLLLQYGSFCTQLNRALTGIAVEQDKNTQEVFAQVKQIYKTPPIKDFGGFNFSQILPDPSKPSKRSFIEDLLFNKVTLADAGFIKQYGDCLGDIAARDLICVQKFNGLTVLPPLLTDEMIAQYTSALLAGTITSGWTFGAGAALQIPFAMQMAYRFNGIGVTQNVLYENQKLIANQFNSAIGKIQDSLSSTASALGKLQDVVNQNAQALNTLVKQLSSNFGAISSVLNDILSRLDPPEAEVQIDRLITGRLQSLQTYVTQQLIRAAEIRASANLAATKMSECVLGQSKRVDFCGKGYHLMSFPQSAPHGVVFLHVTYVFAQEKNFTTAPAICHDGKAHFPREGVFVSNGTHWFVTQRNFYEPQIITTDNTFVSGNCDVVIGIVNNTVYDPLQPELDSFKEELDKYFKNHTSPDVDLGDISGINASVVNIQKEIDRLNEVAKNLNESLIDLQELGKYEQYIK

SEQ ID NO: 1845 - protein, 1211 aa, Artificial Sequence
  SARS-CoV-2/Finland/FIN03032020A/2020__EPI_ISL_413602 spike protein (1-1211)(K986P_V987P_P1069F)
MFVFLVLLPLVSSQCVNLTTRTQLPPAYTNSFTRGVYYPDKVFRSSVLHSTQDLFLPFFSNVTWFHAIHVSGTNGTKRFDNPVLPFNDGVYFASTEKSNIIRGWIFGTTLDSKTQSLLIVNNATNVVIKVCEFQFCNDPFLGVYYHKNNKSWMESEFRVYSSANNCTFEYVSQPFLMDLEGKQGNFKNLREFVFKNIDGYFKIYSKHTPINLVRDLPQGFSALEPLVDLPIGINITRFQTLLALHRSYLTPGDSSSGWTAGAAAYYVGYLQPRTFLLKYNENGTITDAVDCALDPLSETKCTLKSFTVEKGIYQTSNFRVQPTESIVRFPNITNLCPFGEVFNATRFASVYAWNRKRISNCVADYSVLYNSASFSTFKCYGVSPTKLNDLCFTNVYADSFVIRGDEVRQIAPGQTGKIADYNYKLPDDFTGCVISWNSNNLDSKVGGNYNYLYRLFRKSNLKPFERDISTEIYQAGSTPCNGVEGFNCYFPLQSYGFQPTNGVGYQPYRVVVLSFELLHAPATVCGPKKSTNLVKNKCVNFNFNGLTGTGVLTESNKKFLPFQQFGRDIADTTDAVRDPQTLEILDITPCSFGGVSVITPGTNTSNQVAVLYQGVNCTEVPVAIHADQLTPTWRVYSTGSNVFQTRAGCLIGAEHVNNSYECDIPIGAGICASYQTQTNSPRRARSVASQSIIAYTMSLGAENSVAYSNNSIAIPTNFTISVTTEILPVSMTKTSVDCTMYICGDSTECSNLLLQYGSFCTQLNRALTGIAVEQDKNTQEVFAQVKQIYKTPPIKDFGGFNFSQILPDPSKPSKRSFIEDLLFNKVTLADAGFIKQYGDCLGDIAARDLICAQKFNGLTVLPPLLTDEMIAQYTSALLAGTITSGWTFGAGAALQIPFAMQMAYRFNGIGVTQNVLYENQKLIANQFNSAIGKIQDSLSSTASALGKLQDVVNQNAQALNTLVKQLSSNFGAISSVLNDILSRLDPPEAEVQIDRLITGRLQSLQTYVTQQLIRAAEIRASANLAATKMSECVLGQSKRVDFCGKGYHLMSFPQSAPHGVVFLHVTYVFAQEKNFTTAPAICHDGKAHFPREGVFVSNGTHWFVTQRNFYEPQIITTDNTFVSGNCDVVIGIVNNTVYDPLQPELDSFKEELDKYFKNHTSPDVDLGDISGINASVVNIQKEIDRLNEVAKNLNESLIDLQELGKYEQYIK

SEQ ID NO: 1846 - protein, 1211 aa, Artificial Sequence
  SARS-CoV-2/France/GE1977/2020__EPI_ISL_414632 spike protein (1-1211)(K986P_V987P_P1069F)
MFVFLVLLPLVSSQCVNLTTRTQLPPAYTNSFTRGVYYPDKVFRSSVLHSTQDLFLPFFSNVTWFHAIHVSGTNGTKRFDNPVLPFNDGVYFASTEKSNIIRGWIFGTTLDSKTQSLLIVNNATNVVIKVCEFQFCNDPFLGVYYHKNNKSWMESEFRVYSSANNCTFEYVSQPFLMDLEGKQGNFKNLREFVFKNIDGYFKIYSKHTPINLVRDLPQGFSALEPLVDLPIGINITRFQTLLALHRSYLTPGDSSSGWTAGAAAYYVGYLQPRTFLLKYNENGTITDAVDCALDPLSETKCTLKSFTVEKGIYQTSNFRVQPTESIVRFPNITNLCPFGEVFNATRFASVYAWNRKRISNCVADYSVLYNSASFSTFKCYGVSPTKLNDLCFTNVYADSFVIRGDEVRQIAPGQTGKIADYNYKLPDDFTGCVIAWNSNNLDSKVGGNYNYLYRLFRKSNLKPFERDISTEIYQAGSTPCNGVEGFNCYFPLQSYGFQPTNGVGYQPYRVVVLSFELLHAPATVCGPKKSTNLVKNKCVNFNFNGLTGTGVLTESNKKFLPFQQFGRDIADTTDAVRDPQTLEILDITPCSFGGVSVITPGTNTSNQVAVLYQGVNCTEVPVAIHADQLTPTWRVYSTGSNVFQTRAGCLIGAEHVNNSYECDIPIGAGICASYQTQTNSPRRARSVASQSIIAYTMSLGAENSVAYSNNSIAIPTNFTISVTTEILPVSMTKTSVDCTMYICGDSTECSNLLLQYGSFCTQLNRALTGIAVEQDKNTQEVFAQVKQIYKTPPIKDFGGFNFSQILPDPSKPSKRSFIEDLLFNKVTLADAGFIKQYGDCLGDIAARDLICAQKFNGLTVLPPLLTDEMIAQYTSALLAGTITSGWTFGAGAALQIPFAMQMAYRFNGIGVTQNVLYENQKLIANQFNSAIGKIQDSLFSTASALGKLQDVVNQNAQALNTLVKQLSSNFGAISSVLNDILSRLDPPEAEVQIDRLITGRLQSLQTYVTQQLIRAAEIRASANLAATKMSECVLGQSKRVDFCGKGYHLMSFPQSAPHGVVFLHVTYVFAQEKNFTTAPAICHDGKAHFPREGVFVSNGTHWFVTQRNFYEPQIITTDNTFVSGNCDVVIGIVNNTVYDPLQPELDSFKEELDKYFKNHTSPDVDLGDISGINASVVNIQKEIDRLNEVAKNLNESLIDLQELGKYEQYIK

SEQ ID NO: 1847 - protein, 1211 aa, Artificial Sequence
  SARS-CoV-2/Finland/FIN-313/2020__EPI_ISL_414641 spike protein (1-1211)(K986P_V987P_P1069F)
MFVFLVLLPLVSSQCVNLTTRTQLPPAYTNSFTRGVYYPDKVFRSSVLHSTQDLFLPFFSNVTWFHAIHVSGTNGTKRFDNPVLPFNDGVYFASTEKSNIIRGWIFGTTLDSKTQSLLIVNNATNVVIKVCEFQFCNDPFLGVYYHKNNKSWMESEFRVYSSANNCTFEYVSQPFLMDLEGKQGNFKNLREFVFKNIDGYFKIYSKHTPINLVRDLPQGFSALEPLVDLPIGINITRFKTLLALHRSYLTPGDSSSGWTAGAAAYYVGYLQPRTFLLKYNENGTITDAVDCALDPLSETKCTLKSFTVEKGIYQTSNFRVQPTESIVRFPNITNLCPFGEVFNATRFASVYAWNRKRISNCVADYSVLYNSASFSTFKCYGVSPTKLNDLCFTNVYADSFVIRGDEVRQIAPGQTGKIADYNYKLPDDFTGCVIAWNSNNLDSKVGGNYNYLYRLFRKSNLKPFERDISTEIYQAGSTPCNGVEGFNCYFPLQSYGFQPTNGVGYQPYRVVVLSFELLHAPATVCGPKKSTNLVKNKCVNFNFNGLTGTGVLTESNKKFLPFQQFGRDIADTTDAVRDPQTLEILDITPCSFGGVSVITPGTNTSNQVAVLYQGVNCTEVPVAIHADQLTPTWRVYSTGSNVFQTRAGCLIGAEHVNNSYECDIPIGAGICASYQTQTNSPRRARSVASQSIIAYTMSLGAENSVAYSNNSIAIPTNFTISVTTEILPVSMTKTSVDCTMYICGDSTECSNLLLQYGSFCTQLNRALTGIAVEQDKNTQEVFAQVKQIYKTPPIKDFGGFNFSQILPDPSKPSKRSFIEDLLFNKVTLADAGFIKQYGDCLGDIAARDLICAQKFNGLTVLPPLLTDEMIAQYTSALLAGTITSGWTFGAGAALQIPFAMQMAYRFNGIGVTQNVLYENQKLIANQFNSAIGKIQDSLSSTASALGKLQDVVNQNAQALNTLVKQLSSNFGAISSVLNDILSRLDPPEAEVQIDRLITGRLQSLQTYVTQQLIRAAEIRASANLAATKMSECVLGQSKRVDFCGKGYHLMSFPQSAPHGVVFLHVTYVFAQEKNFTTAPAICHDGKAHFPREGVFVSNGTHWFVTQRNFYEPQIITTDNTFVSGNCDVVIGIVNNTVYDPLQPELDSFKEELDKYFKNHTSPDVDLGDISGINASVVNIQKEIDRLNEVAKNLNESLIDLQELGKYEQYIK

SEQ ID NO: 1848 - protein, 1211 aa, Artificial Sequence
  SARS-CoV-2/Netherlands/ZuidHolland_2/2020__EPI_ISL_414556 spike protein (1-1211)(K986P_V987P_P1069F)
MFVFLVLLPLVSSQCVNLTTRTQLPPAYTNSFTRGVYYPDKVFRSSVLHSTQDLFLPFFSNVTWFHAIHVSGTNGTKRFDNPVLPFNDGVYFASTEKSNIIRGWIFGTTLDSKTQSLLIVNNATNVVIKVCEFQFCNDPFLGVYYHKNNKSWMESEFRVYSSANNCTFEYVSQPFLMDLEGKQGNFKNLREFVFKNIDGYFKIYSKHTPINLVRDLPQGFSALEPLVDLPIGINITRFQTLLALHRSYLTPGDSSSGWTAGAAAYYVGYLQPRTFLLKYNENGTITDAVDCALDPLSETKCTLKSFTVEKGIYQTSNFRVQPTESIVRFPNITNLCPFGEVFNATRFASVYAWNRKRISNCVADYSVLYNSASFSTFKCYGVSPTKLNDLCFTNVYADSFVIRGDEVRQIAPGQTGKIADYNYKLPDDFTGCVIAWNSNNLDSKVGGNYNYLYRLFRKSNLKPFERDISTEIYQAGSTPCNGVEGFNCYFPLQSYGFQPTNGVGYQPYRVVVLSFELLHAPATVCGPKKSTNLVKNKCVNFNFNGLTGTGVLTESNKKFLPFQQFGRDIADTTDAVRDPQTLEILDITPCSFGGVSVITPGTNTSNQVAVLYQGVNCTEVPVAIHADQLTPTWRVYSTGSNVFQTRAGCLIGAEHVNNSYECDIPIGAGICASYQTQTNSPRRARSVASQSIIAYTMSLGAENSVAYSNNSIAIPTNFTISVTTEILPVSMTKTSVDCTMYICGDSTECSNLLLQYGSFCTQLNRALTGIALEQDKNTQEVFAQVKQIYKTPPIKDFGGFNFSQILPDPSKPSKRSFIEDLLFNKVTLADAGFIKQYGDCLGDIAARDLICAQKFNGLTVLPPLLTDEMIAQYTSALLAGTITSGWTFGAGAALQIPFAMQMAYRFNGIGVTQNVLYENQKLIANQFNSAIGKIQDSLSSTASALGKLQDVVNQNAQALNTLVKQLSSNFGAISSVLNDILSRLDPPEAEVQIDRLITGRLQSLQTYVTQQLIRAAEIRASANLAATKMSECVLGQSKRVDFCGKGYHLMSFPQSAPHGVVFLHVTYVFAQEKNFTTAPAICHDGKAHFPREGVFVSNGTHWFVTQRNFYEPQIITTDNTFVSGNCDVVIGIVNNTVYDPLQPELDSFKEELDKYFKNHTSPDVDLGDISGINASVVNIQKEIDRLNEVAKNLNESLIDLQELGKYEQYIK

SEQ ID NO: 1849 - protein, 1211 aa, Artificial Sequence
  SARS-CoV-2/USA/WA-UW31/2020__EPI_ISL_414618 spike protein (1-1211)(K986P_V987P_P1069F)
MFVFLVLLPLVSSQCVNLTTRTQLPPAYTNSFTRGVYYPDKVFRSSVLHSTQDLFLPFFSNVTWFHAIHVSGTNGTKRFDNPVLPFNDGVYFASTEKSNIIRGWIFGTTLDSKTQSLLIVNNATNVVIKVCEFQFCNDPFLGVYYHKNNKSWMESEFRVYSSANNCTFEYVSQPFLMDLEGKQGNFKNLREFVFKNIDGYFKIYSKHTPINLVRDLPQGFSALEPLVDLPIGINITRFQTLLALHRSYLTPGDSSSGWTAGAAAYYVGYLQPRTFLLKYNENGTITDAVDCALDPLSETKCTLKSFTVEKGIYQTSNFRVQPTESIVRFPNITNLCPFGEVFNATRFASVYAWNRKRISNCVADYSVLYNSASFSTFKCYGVSPTKLNDLCFTNVYADSFVIRGDEVRQIAPGQTGKIADYNYKLPDDFTGCVIAWNSNNLDSKVGGNYNYLYRLFRKSNLKPFERDISTEIYQAGSTPCNGAEGFNCYFPLQSYGFQPTNGVGYQPYRVVVLSFELLHAPATVCGPKKSTNLVKNKCVNFNFNGLTGTGVLTESNKKFLPFQQFGRDIADTTDAVRDPQTLEILDITPCSFGGVSVITPGTNTSNQVAVLYQDVNCTEVPVAIHADQLTPTWRVYSTGSNVFQTRAGCLIGAEHVNNSYECDIPIGAGICASYQTQTNSPRRARSVASQSIIAYTMSLGAENSVAYSNNSIAIPTNFTISVTTEILPVSMTKTSVDCTMYICGDSTECSNLLLQYGSFCTQLNRALTGIAVEQDKNTQEVFAQVKQIYKTPPIKDFGGFNFSQILPDPSKPSKRSFIEDLLFNKVTLADAGFIKQYGDCLGDIAARDLICAQKFNGLTVLPPLLTDEMIAQYTSALLAGTITSGWTFGAGAALQIPFAMQMAYRFNGIGVTQNVLYENQKLIANQFNSAIGKIQDSLSSTASALGKLQDVVNQNAQALNTLVKQLSSNFGAISSVLNDILSRLDPPEAEVQIDRLITGRLQSLQTYVTQQLIRAAEIRASANLAATKMSECVLGQSKRVDFCGKGYHLMSFPQSAPHGVVFLHVTYVFAQEKNFTTAPAICHDGKAHFPREGVFVSNGTHWFVTQRNFYEPQIITTDNTFVSGNCDVVIGIVNNTVYDPLQPELDSFKEELDKYFKNHTSPDVDLGDISGINASVVNIQKEIDRLNEVAKNLNESLIDLQELGKYEQYIK

SEQ ID NO: 1850 - protein, 1211 aa, Artificial Sequence
  SARS-CoV-2/South Korea/SNU01/2020__EPI_ISL_411929 spike protein (1-1211)(K986P_V987P_P1069F)
MFVFLVLLPLVSSQCVNLTTRTQLPPAYTNSFTRGVYYPDKVFRSSVLHSTQDLFLPFFSNVTWFHAIHVSGTNGTKRFDNPVLPFNDGVYFASTEKSNIIRGWIFGTTLDSKTQSLLIVNNATNVVIKVCEFQFCNDPFLGVYYHKNNKSWMESEFRVYSSANNCTFEYVSQPFLMDLEGKQGNFKNLREFVFKNIDGYFKIYSKHTPINLVRDLPQGFWALEPLVDLPIGINITRFQTLLALHRSYLTPGDSSSGWTAGAAAYYVGYLQPRTFLLKYNENGTITDAVDCALDPLSETKCTLKSFTVEKGIYQTSNFRVQPTESIVRFPNITNLCPFGEVFNATRFASVYAWNRKRISNCVADYSVLYNSASFSTFKCYGVSPTKLNDLCFTNVYADSFVIRGDEVRQIAPGQTGKIADYNYKLPDDFTGCVIAWNSNNLDSKVGGNYNYLYRLFRKSNLKPFERDISTEIYQAGSTPCNGVEGFNCYFPLQSYGFQPTNGVGYQPYRVVVLSFELLHAPATVCGPKKSTNLVKNKCVNFNFNGLTGTGVLTESNKKFLPFQQFGRDIADTTDAVRDPQTLEILDITPCSFGGVSVITPGTNTSNQVAVLYQDVNCTEVPVAIHADQLTPTWRVYSTGSNVFQTRAGCLIGAEHVNNSYECDIPIGAGICASYQTQTNSPRRARSVASQSIIAYTMSLGAENSVAYSNNSIAIPTNFTISVTTEILPVSMTKTSVDCTMYICGDSTECSNLLLQYGSFCTQLNRALTGIAVEQDKNTQEVFAQVKQIYKTPPIKDFGGFNFSQILPDPSKPSKRSFIEDLLFNKVTLADAGFIKQYGDCLGDIAARDLICAQKFNGLTVLPPLLTDEMIAQYTSALLAGTITSGWTFGAGAALQIPFAMQMAYRFNGIGVTQNVLYENQKLIANQFNSAIGKIQDSLSSTASALGKLQDVVNQNAQALNTLVKQLSSNFGAISSVLNDILSRLDPPEAEVQIDRLITGRLQSLQTYVTQQLIRAAEIRASANLAATKMSECVLGQSKRVDFCGKGYHLMSFPQSAPHGVVFLHVTYVFAQEKNFTTAPAICHDGKAHFPREGVFVSNGTHWFVTQRNFYEPQIITTDNTFVSGNCDVVIGIVNNTVYDPLQPELDSFKEELDKYFKNHTSPDVDLGDISGINASVVNIQKEIDRLNEVAKNLNESLIDLQELGKYEQYIK

SEQ ID NO: 1851 - protein, 1211 aa, Artificial Sequence
  SARS-CoV-2/China/WF0004/2020__EPI_ISL_413694 spike protein (1-1211)(K986P_V987P_P1069F)
MFVFLVLLPLVSSQCVNLTTRTQLPPAYTNSFTRGVYYPDKVFRSSVLHSTQDLFLPFFSNVTWFHAIHVSGTNGTKRFDNPVLPFNDGVYFASTEKSNIIRGWIFGTTLDSKTQSLLIVNNATNVVIKVCEFQFCNDPFLGVYYHKNNKSWTESEFRVYSSANNCTFEYVSQPFLMDLEGKQGNFKNLREFVFKNIDGYFKIYSKHTPINLVRDLPQGFSALEPLVDLPIGINITRFQTLLALHRSYLTPGDSSSGWTAGAAAYYVGYLQPRTFLLKYNENGTITDAVDCALDPLSETKCTLKSFTVEKGIYQTSNFRVQPTESIVRFPNITNLCPFGEVFNATRFASVYAWNRKRISNCVADYSVLYNSASFSTFKCYGVSPTKLNDLCFTNVYADSFVIRGDEVRQIAPGQTGKIADYNYKLPDDFTGCVIAWNSNNLDSKVGGNYNYLYRLFRKSNLKPFERDISTEIYQAGSTPCNGVEGFNCYFPLQSYGFQPTNGVGYQPYRVVVLSFELLHAPATVCGPKKSTNLVKNKCVNFNFNGLTGTGVLTESNKKFLPFQQFGRDIADTTDAVRDPQTLEILDITPCSFGGVSVITPGTNTSNQVAVLYQDVNCTEVPVAIHADQLTPTWRVYSTGSNVFQTRAGCLIGAEHVNNSYECDIPIGAGICASYQTQTNSPRRARSVASQSIIAYTMSLGAENSVAYSNNSIAIPTNFTISVTTEILPVSMTKTSVDCTMYICGDSTECSNLLLQYGSFCTQLNRALTGIAVEQDKNTQEVFAQVKQIYKTPPIKDFGGFNFSQILPDPSKPSKRSFIEDLLFNKVTLADAGFIKQYGDCLGDIAARDLICAQKFNGLTVLPPLLTDEMIAQYTSALLAGTITSGWTFGAGAALQIPFAMQMAYRFNGIGVTQNVLYENQKLIANQFNSAIGKIQDSLSSTASALGKLQDVVNQNAQALNTLVKQLSSNFGAISSVLNDILSRLDPPEAEVQIDRLITGRLQSLQTYVTQQLIRAAEIRASANLAATKMSECVLGQSKRFDFCGKGYHLMSFPQSAPHGVVFLHVTYVFAQEKNFTTAPAICHDGKAHFPREGVFVSNGTHWFVTQRNFYEPQIITTDNTFVSGNCDVVIGIVNNTVYDPLQPELDSFKEELDKYFKNHTSPDVDLGDISGINASVVNIQKEIDRLNEVAKNLNESLIDLQELGKYEQYIK

SEQ ID NO: 1852 - protein, 1211 aa, Artificial Sequence
  SARS-CoV-2/China/WF0028/2020__EPI_ISL_413791 spike protein (1-1211)(K986P_V987P_P1069F)
MFVFLVLLPLVSSQCVNLTTRTQLPPAYTNSFTRGVYYPDKVFRSSVLHSTQDLFLPFFSNVTWFHAIHVSGTNGTKRFDNPVLPFNDGVYFASTEKSNIIRGWIFGTTLDSKTQSLLIVNNATNVVIKVCEFQFCNDPFLGVYYHKNNKSWMESEFRVYSSANNCTFEYVSQPFLMDLEGKQGNFKNLREFVFKNIDGYFKIYSKHTPINLVRDLPQGFSALEPLVDLPIGINITRFQTLLALHRSYLTPGDSSSGWTAGAAAYYVGYLQPRTFLLKYNENGTITDAVDCALDPLSETKCTLKSFTVEKGIYQTSNFRVQPTESIVRFPNITNLCPFGEVFNATRFASVYAWNRKRISNCVADYSVLYNSASFSTFKCYGVSPTKLNDLCFTNVYADSFVIRGDEVRQIAPGQTGKIADYNYKLPDDFTGCVIAWNSNNLDSKVGGNYNYLYRLFRKSNLKPFERDISTEIYQAGSTPCNGVEGFNCYFPLQSYGFQPTNGVGYQPYRVVVLSFELLHAPATVCGPKKSTNLVKNKCVNFNFNGLTGTGVLTESNKKFLPFQQFGRDIADTTDAVRDPQTLEILDITPCSFGGVSVITPGTNTSNQVAVLYQDVNCTEVPVAIHADQLTPTWRVYSTGSNVFQTRAGCLIGAEHVNNSYECDIPIGAGICASYQTQTNSPRRARSVASQSIIAYTMSLGAENSVAYSNNSIAIPTNFTISVTTEILPVSMTKTSVDCTMYICGDSTECSNLLLQYGSFCTQLNRALTGIAVEQDKNTQEVFAQVKQIYKTPPIKDFGGFNFSQILPDPSKPSKRSFIEDLLFNKVTLADAGFIKQYGDCLGDIAARDLICAQKFNGLTVLPPLLTDEMIAQYTSALLAGTITSGWTFGAGAALQIPFAMQMAYRFNGIGVTQNVLYENQKLIANQFNSAIGKIQDSLSSTASALGKLQDVVNQNAQALNTLVKQLSSNFGAISSVLNDILSRLDPPEAEVQIDRLITGRLQSLQTYVTQQLIRAAEIRASANLAATKMSECVLGQSKRVDFCGKGYHLMSFPQSAPHGVVFLHVTYVFAQEKNFTTAPAICHDGKAHFPREGVFVSNGTHWFVTQRNFYEPQIITTDNTFVSGNCDVVIGIVNNTVYDPLQPELESFKEELDKYFKNHTSPDVDLGDISGINASVVNIQKEIDRLNEVAKNLNESLIDLQELGKYEQYIK

SEQ ID NO: 1853 - protein, 1211 aa, Artificial Sequence
  SARS-CoV-2/2019-nCoV/USA-CruiseA-18/2020__MT159716.1 spike protein (1-1211)(K986P_V987P_P1069F)
MFVFLVLLPLVSSQCVNLTTRTQLPPAYTNSFTRGVYYPDKVFRSSVLHSTQDLFLPFFSNVTWFHAIHVSGTNGTKRFDNPVLPFNDGVYFASTEKSNIIRGWIFGTTLDSKTQSLLIVNNATNVVIKVCEFQFCNDPFLGVYYHKNNKSWMESELRVYSSANNCTFEYVSQPFLMDLEGKQGNFKNLREFVFKNIDGYFKIYSKHTPINLVRDLPQGFSALEPLVDLPIGINITRFQTLLALHRSYLTPGDSSSGWTAGAAAYYVGYLQPRTFLLKYNENGTITDAVDCALDPLSETKCTLKSFTVEKGIYQTSNFRVQPTESIVRFPNITNLCPFGEVFNATRFASVYAWNRKRISNCVADYSVLYNSASFSTFKCYGVSPTKLNDLCFTNVYADSFVIRGDEVRQIAPGQTGKIADYNYKLPDDFTGCVIAWNSNNLDSKVGGNYNYLYRLFRKSNLKPFERDISTEIYQAGSTPCNGVEGFNCYFPLQSYGFQPTNGVGYQPYRVVVLSFELLHAPATVCGPKKSTNLVKNKCVNFNFNGLTGTGVLTESNKKFLPFQQFGRDIADTTDAVRDPQTLEILDITPCSFGGVSVITPGTNTSNQVAVLYQDVNCTEVPVAIHADQLTPTWRVYSTGSNVFQTRAGCLIGAEHVNNSYECDIPIGAGICASYQTQTNSPRRARSVASQSIIAYTMSLGAENSVAYSNNSIAIPTNFTISVTTEILPVSMTKTSVDCTMYICGDSTECSNLLLQYGSFCTQLNRALTGIAVEQDKNTQEVFAQVKQIYKTPPIKDFGGFNFSQILPDPSKPSKRSFIEDLLFNKVTLADAGFIKQYGDCLGDIAARDLICAQKFNGLTVLPPLLTDEMIAQYTSALLAGTITSGWTFGAGAALQIPFAMQMAYRFNGIGVTQNVLYENQKLIANQFNSAIGKIQDSLSSTASALGKLQDVVNQNAQALNTLVKQLSSNFGAISSVLNDILSRLDPPEAEVQIDRLITGRLQSLQTYVTQQLIRAAEIRASANLAATKMSECVLGQSKRVDFCGKGYHLMSFPQSAPHGVVFLHVTYVFAQEKNFTTAPAICHDGKAHFPREGVFVSNGTHWFVTQRNFYEPQIITTDNTFVSGNCDVVIGIVNNTVYDPLQPELDSFKEELDKYFKNHTSPDVDLGDISGINASVVNIQKEIDRLNEVAKNLNESLIDLQELGKYEQYIK

SEQ ID NO: 1854 - protein, 1211 aa, Artificial Sequence
  SARS-CoV-2/SARS-CoV-2/Yunnan-01/human/2020/CHN__MT049951.1 spike protein (1-1211)(K986P_V987P_P1069F)
MFVFLVLLPLVSSQCVNLTTRTQLPPANTNSFTRGVYYPDKVFRSSVLHSTQDLFLPFFSNVTWFHAIHVSGTNGTKRFDNPVLPFNDGVYFASTEKSNIIRGWIFGTTLDSKTQSLLIVNNATNVVIKVCEFQFCNDPFLGVYYHKNNKSWMESEFRVYSSANNCTFEYVSQPFLMDLEGKQGNFKNLREFVFKNIDGYFKIYSKHTPINLVRDLPQGFSALEPLVDLPIGINITRFQTLLALHRSYLTPGDSSSGWTAGAAAYYVGYLQPRTFLLKYNENGTITDAVDCALDPLSETKCTLKSFTVEKGIYQTSNFRVQPTESIVRFPNITNLCPFGEVFNATRFASVYAWNRKRISNCVADYSVLYNSASFSTFKCYGVSPTKLNDLCFTNVYADSFVIRGDEVRQIAPGQTGKIADYNYKLPDDFTGCVIAWNSNNLDSKVGGNYNYLYRLFRKSNLKPFERDISTEIYQAGSTPCNGVEGFNCYFPLQSYGFQPTNGVGYQPYRVVVLSFELLHAPATVCGPKKSTNLVKNKCVNFNFNGLTGTGVLTESNKKFLPFQQFGRDIADTTDAVRDPQTLEILDITPCSFGGVSVITPGTNTSNQVAVLYQDVNCTEVPVAIHADQLTPTWRVYSTGSNVFQTRAGCLIGAEHVNNSYECDIPIGAGICASYQTQTNSPRRARSVASQSIIAYTMSLGAENSVAYSNNSIAIPTNFTISVTTEILPVSMTKTSVDCTMYICGDSTECSNLLLQYGSFCTQLNRALTGIAVEQDKNTQEVFAQVKQIYKTPPIKDFGGFNFSQILPDPSKPSKRSFIEDLLFNKVTLADAGFIKQYGDCLGDIAARDLICAQKFNGLTVLPPLLTDEMIAQYTSALLAGTITSGWTFGAGAALQIPFAMQMAYRFNGIGVTQNVLYENQKLIANQFNSAIGKIQDSLSSTASALGKLQDVVNQNAQALNTLVKQLSSNFGAISSVLNDILSRLDPPEAEVQIDRLITGRLQSLQTYVTQQLIRAAEIRASANLAATKMSECVLGQSKRVDFCGKGYHLMSFPQSAPHGVVFLHVTYVFAQEKNFTTAPAICHDGKAHFPREGVFVSNGTHWFVTQRNFYEPQIITTDNTFVSGNCDVVIGIVNNTVYDPLQPELDSFKEELDKYFKNHTSPDVDLGDISGINASVVNIQKEIDRLNEVAKNLNESLIDLQELGKYEQYIK

SEQ ID NO: 1855 - protein, 1211 aa, Artificial Sequence
  SARS-CoV-2/USA/WA-UW292/2020__EPI_ISL_418077 spike protein (1-1211)(K986P_V987P_P1069F)
MFVFLVLLPLVSSQCVNLTTRTQLPPAYTNSFTRGVYYPDKVFRSSVLHSTQDLFLPFFSNVTWFHAIHVSGTNGTKRFDNPVLPFNDGVYFASTEKSNIIRGWIFGTTLDSKTQSLLIVNNATNVVIKVCEFQFCNDPFLGVYYHKNNKSWMESEFRVYSSANNCTFEYVSQPFLMDLEGKQGNFKNLREFVFKNIDGYFKIYSKHTPINLVRDLPQGFSALEPLVDLPIGINITRFQTLLALHRSYLTPGDSSSGWTAGAAAYYVGYLQPRTFLLKYNENGTITDAVDCALDPLSETKCTLKSFTVEKGIYQTSNFRVQPTESIVRFPNITNLCPFGEVFNATRFASVYAWNRKRISNCVADYSVLYNSASFSTFKCYGVSPTKLNDLCFTNVYADSFVIRGDEVRQIAPGQTGKIADYNYKLPDDFTGCVIAWNSNNLDSKVGGNYNYLYRLFRKSNLKPFERDISTEIYQASSTPCNGVEGFNCYFPLQSYGFQPTNGVGYQPYRVVVLSFELLHAPATVCGPKKSTNLVKNKCVNFNFNGLTGTGVLTESNKKFLPFQQFGRDIADTTDAVRDPQTLEILDITPCSFGGVSVITPGTNTSNQVAVLYQDVNCTEVPVAIHADQLTPTWRVYSTGSNVFQTRAGCLIGAEHVNNSYECDIPIGAGICASYQTQTNSPRRARSVASQSIIAYTMSLGAENSVAYSNNSIAIPTNFTISVTTEILPVSMTKTSVDCTMYICGDSTECSNLLLQYGSFCTQLNRALTGIAVEQDKNTQEVFAQVKQIYKTPPIKDFGGFNFSQILPDPSKPSKRSFIEDLLFNKVTLADAGFIKQYGDCLGDIAARDLICAQKFNGLTVLPPLLTDEMIAQYTSALLAGTITSGWTFGAGAALQIPFAMQMAYRFNGIGVTQNVLYENQKLIANQFNSAIGKIQDSLSSTASALGKLQDVVNQNAQALNTLVKQLSSNFGAISSVLNDILSRLDPPEAEVQIDRLITGRLQSLQTYVTQQLIRAAEIRASANLAATKMSECVLGQSKRVDFCGKGYHLMSFPQSAPHGVVFLHVTYVFAQEKNFTTAPAICHDGKAHFPREGVFVSNGTHWFVTQRNFYEPQIITTDNTFVSGNCDVVIGIVNNTVYDPLQPELDSFKEELDKYFKNHTSPDVDLGDISGINASVVNIQKEIDRLNEVAKNLNESLIDLQELGKYEQYIK

SEQ ID NO: 1856 - protein, 1211 aa, Artificial Sequence
  SARS-CoV-2/Iceland/192/2020__EPI_ISL_417819 spike protein (1-1211)(K986P_V987P_P1069F)
MFVFFVLLPLVSSQCVNLTTRTQLPPAYTNSFTRGVYYPDKVFRSSVLHSTQDLFLPFFSNVTWFHAIHVSGTNGTKRFDNPVLPFNDGVYFASTEKSNIIRGWIFGTTLDSKTQSLLIVNNATNVVIKVCEFQFCNDPFLGVYYHKNNKSWMESEFRVYSSANNCTFEYVSQPFLMDLEGKQGNFKNLREFVFKNIDGYFKIYSKHTPINLVRDLPQGFSALEPLVDLPIGINITRFQTLLALHRSYLTPGDSSSGWTAGAAAYYVGYLQPRTFLLKYNENGTITDAVDCALDPLSETKCTLKSFTVEKGIYQTSNFRVQPTESIVRFPNITNLCPFGEVFNATRFASVYAWNRKRISNCVADYSVLYNSASFSTFKCYGVSPTKLNDLCFTNVYADSFVIRGDEVRQIAPGQTGKIADYNYKLPDDFTGCVIAWNSNNLDSKVGGNYNYLYRLFRKSNLKPFERDISTEIYQAGSTPCNGVEGFNCYFPLQSYGFQPTNGVGYQPYRVVVLSFELLHAPATVCGPKKSTNLVKNKCVNFNFNGLTGTGVLTESNKKFLPFQQFGRDIADTTDAVRDPQTLEILDITPCSFGGVSVITPGTNTSNQVAVLYQGVNCTEVPVAIHADQLTPTWRVYSTGSNVFQTRAGCLIGAEHVNNSYECDIPIGAGICASYQTQTNSPRRARSVASQSIIAYTMSLGAENSVAYSNNSIAIPTNFTISVTTEILPVSMTKTSVDCTMYICGDSTECSNLLLQYGSFCTQLNRALTGIAVEQDKNTQEVFAQVKQIYKTPPIKDFGGFNFSQILPDPSKPSKRSFIEDLLFNKVTLADAGFIKQYGDCLGDIAARDLICAQKFNGLTVLPPLLTDEMIAQYTSALLAGTITSGWTFGAGAALQIPFAMQMAYRFNGIGVTQNVLYENQKLIANQFNSAIGKIQDSLSSTASALGKLQDVVNQNAQALNTLVKQLSSNFGAISSVLNDILSRLDPPEAEVQIDRLITGRLQSLQTYVTQQLIRAAEIRASANLAATKMSECVLGQSKRVDFCGKGYHLMSFPQSAPHGVVFLHVTYVFAQEKNFTTAPAICHDGKAHFPREGVFVSNGTHWFVTQRNFYEPQIITTDNTFVSGNCDVVIGIVNNTVYDPLQPELDSFKEELDKYFKNHTSPDVDLGDISGINASVVNIQKEIDRLNEVAKNLNESLIDLQELGKYEQYIK

SEQ ID NO: 1857 - protein, 1211 aa, Artificial Sequence
  SARS-CoV-2/Belgium/ULG-6939/2020__EPI_ISL_417020 spike protein (1-1211)(K986P_V987P_P1069F)
MFVFLVLLPLVSSQCVNLTTRTQLPPAYTNSFTRGVYYPDKVFRSSVLHSTQDLFLPFFSNVTWFHAIHVSGTNGTKRFDNPVLPFNDGVYFASTEKSNIIRGWIFGTTLDSKTQSLLIVNNATNVVIKVCEFQFCNDPFLGVYYHKNNKSWMESEFRVYSSANNCTFEYVSQPFLMDLEGKQGNFKNLREFVFKNIDGYFKIYSKHTPINLVRDLPQGFSALEPLVDLPIGINITRFQTLLALHRSYLTPGDSSSGWTAGAAAYYVGYLQPRTFLLKYNENGTITDAVDCALDPLSETKCTLKSFTVEKGIYQTSNFRVQPTESIVRFPNITNLCPFGEVFNATRFASVYAWNRKRISNCVADYSVLYNSASFSTFKCYGVSPTKLNDLCFTNVYADSFVIRGDEVRQIAPGQTGKIADYNYKLPDDFTGCVIAWNSNNLDSKVGGNYNYLYRLFRKSNLKPFERDISTEIYQAGSTPCNGVEGFNCYFPLQSYGFQPTNGVGYQPYRVVVLSFELLHAPATVCGPKKSTNLVKNKCVNFNFNGLTGTGVLTESNKKFLPFQQFGRDIADTTDAVRDPQTLEILDITPCSFGGVSVITPGTNTSNQVAVLYQGVNCTEVPVAIHADQLTPTWRVYSTGSNVFQTRAGCLIGAEHVNNSYECDIPIGAGICASYQTQTNSPRRARSVASQSIIAYTMSLGAENSVVYSNNSIAIPTNFTISVTTEILPVSMTKTSVDCTMYICGDSTECSNLLLQYGSFCTQLNRALTGIAVEQDKNTQEVFAQVKQIYKTPPIKDFGGFNFSQILPDPSKPSKRSFIEDLLFNKVTLADAGFIKQYGDCLGDIAARDLICAQKFNGLTVLPPLLTDEMIAQYTSALLAGTITSGWTFGAGAALQIPFAMQMAYRFNGIGVTQNVLYENQKLIANQFNSAIGKIQDSLSSTASALGKLQDVVNQNAQALNTLVKQLSSNFGAISSVLNDILSRLDPPEAEVQIDRLITGRLQSLQTYVTQQLIRAAEIRASANLAATKMSECVLGQSKRVDFCGKGYHLMSFPQSAPHGVVFLHVTYVFAQEKNFTTAPAICHDGKAHFPREGVFVSNGTHWFVTQRNFYEPQIITTDNTFVSGNCDVVIGIVNNTVYDPLQPELDSFKEELDKYFKNHTSPDVDLGDISGINASVVNIQKEIDRLNEVAKNLNESLIDLQELGKYEQYIK

SEQ ID NO: 1858 - protein, 1211 aa, Artificial Sequence
  SARS-CoV-2/France/HF2496/2020__EPI_ISL_418231 spike protein (1-1211)(K986P_V987P_P1069F)
MFVFLVLLPLVSSQCVNLTTRTQLPPAYTNSFTRGVYYPDKVFRSSVLHSTQDLFLPFFSNVTWFHAIHVSGTNGTKRFDNPVLPFNDGVYFASTEKSNIIRGWIFGTTLDSKTQSLLIVNNATNVVIKVCEFQFCNDPFLGVYYHKNNKSWMESEFRVYSSANNCTFEYVSQPFLMDLEGKQGNFKNLREFVFKNIDGYFKIYSKHTPINLVRDLPQGFSALEPLVDLPIGINITRFQTLLALHRSYLTPGDSSSGWTAGAAAYYVGYLQPRTFLLKYNENGTITDAVDCALDPLSETKCTLKSFTVEKGIYQTSNFRVQPTESIVRFPNITNLCPFGEVFNATRFASVYAWNRKRISNCVADYSVLYNSASFSTFKCYGVSPTKLNDLCFTNVYADSFVIRGDEVRQIAPGQTGKIADYNYKLPDDFTGCVIAWNSNNLDSKVGGNYNYLYRLFRKSNLKPFERDISTEIYQAGSTPCNGVEGFNCYFPLQSYGFQPTNGVGYQPYRVVVLSFELLHAPATVCGPKKSTNLVKNKCVNFNFNGLTGTGVLTESNKKFLPFQQFGRDIADTTDAVRDPQTLEILDITPCSFGGVSVITPGTNTSNQVAVLYQGVNCTEVPVAIHADQLTPTWRVYSTGSNVFQTRAGCLIGAEHVNNSYECDIPIGAGICASYQTQTNSPRRARSVASQSIIAYTMSLGAENSVAYSNNSIAIPTNFTISVTTEILPVSMTKTSVDCTMYICGDSTECSNLLLQYGSFCTQLNRALTGIAVEQDKNTQEVFAQVKQIYKTPPIKDFGGFNFSQILPDPSKPSKRSFIEDLLFNKVTLADAGFIKQYGDCLGDIVARDLICAQKFNGLTVLPPLLTDEMIAQYTSALLAGTITSGWTFGAGAALQIPFAMQMAYRFNGIGVTQNVLYENQKLIANQFNSAIGKIQDSLSSTASALGKLQDVVNQNAQALNTLVKQLSSNFGAISSVLNDILSRLDPPEAEVQIDRLITGRLQSLQTYVTQQLIRAAEIRASANLAATKMSECVLGQSKRVDFCGKGYHLMSFPQSAPHGVVFLHVTYVFAQEKNFTTAPAICHDGKAHFPREGVFVSNGTHWFVTQRNFYEPQIITTDNTFVSGNCDVVIGIVNNTVYDPLQPELDSFKEELDKYFKNHTSPDVDLGDISGINASVVNIQKEIDRLNEVAKNLNESLIDLQELGKYEQYIK

SEQ ID NO: 1859 - protein, 1211 aa, Artificial Sequence
  SARS-CoV-2/USA/WA-UW291/2020__EPI_ISL_418076 spike protein (1-1211)(K986P_V987P_P1069F)
MFVFLVLLPLVSSQCVNLTTRTQLPPAYTNSFTRGVYYPDKVFRSSVLHSTQDLFLPFFSNVTWFHAIHVSGTNGTKRFDNPVLPFNDGVYFASTEKSNIIRGWIFGTTLDSKTQSLLIVNNATNVVIKVCEFQFCNDPFLGVYYHKNNKSWMESEFRVYSSANNCTFEYVSQPFLMDLEGKQGNFKNLREFVFKNIDGYFKIYSKHTPINLVRDLPQGFSALEPLVDLPIGINITRFQTLLALHRSYLTPGDSSSGWTAGAAAYYVGYLQPRTFLLKYNENGTITDAVDCALDPLSETKCTLKSFTVEKGIYQTSNFRVQPTESIVRFPNITNLCPFGEVFNATRFASVYAWNRKRISNCVADYSVLYNSASFSTFKCYGVSPTKLNDLCFTNVYADSFVIRGDEVRQIAPGQTGKIADYNYKLPDDFTGCVIAWNSNNLDSKVGGNYNYLYRLFRKSNLKPFERDISTEIYQAGSTPCNGVEGFNCYFPLQSYGFQPTNGVGYQPYRVVVLSFELLHAPATVCGPKKSTNLVKNKCVNFNFNGLTGTGVLTESNKKFLPFQQFGRDIADTTDAVRDPQTLEILDITPCSFGGVSVITPGTNTSNQVAVLYQGVNCTEVPVAIHADQLTPTWRVYSTGSNVFQTRAGCLIGAEHVNNSYECDIPIGAGICASYQTQTNSPRRARSVASQSIIAYTMSLGAENSVAYSNNSIAIPTNFTISVTTEILPVSMTKTSVDCTMYICGDSTECSNLLLQYGSFCTQLNRALTGIAVEQDKNTQEVFAQVKQIYKTPPIKDFGGFNFSQILPDPSKPSKRSFIEDLLFNKVTLADAGFIKQYGDCLGDIAARDLICAQKFNGLTVLPPLLTDEMIAQYTSALLAGTITSGWTFGAGAALQIPFAMQMAYRFNGIGVTQNVLYENQKLIANQFNSAIGKIQYSLSSTASALGKLQDVVNQNAQALNTLVKQLSSNFGAISSVLNDILSRLDPPEAEVQIDRLITGRLQSLQTYVTQQLIRAAEIRASANLAATKMSECVLGQSKRVDFCGKGYHLMSFPQSAPHGVVFLHVTYVFAQEKNFTTAPAICHDGKAHFPREGVFVSNGTHWFVTQRNFYEPQIITTDNTFVSGNCDVVIGIVNNTVYDPLQPELDSFKEELDKYFKNHTSPDVDLGDISGINASVVNIQKEIDRLNEVAKNLNESLIDLQELGKYEQYIK

SEQ ID NO: 1860 - protein, 1211 aa, Artificial Sequence; identical to SEQ ID NO: 1823
  SARS-CoV-2/Portugal/PT0034/2020__EPI_ISL_418019 spike protein (1-1211)(K986P_V987P_P1069F)

SEQ ID NO: 1861 - protein, 1211 aa, Artificial Sequence
  SARS-CoV-2/Iceland/202/2020__EPI_ISL_417750 spike protein (1-1211)(K986P_V987P_P1069F)
MFVFLVLLPLVSSQCVNLTTRTQLPPAYTNSFTRGVYYPDKVFRSSVLHSTQDLFLPFFSNVTWFHAIHVSGTNGTKRFDNPVLPFNDGVYFASTEKSNIIRGWIFGTTLDSKTQSLLIVNNATNVVIKVCEFQFCNDPFLGVYYHKNNKSWMESEFRVYSSANNCTFEYVSQPFLMDLEGKQGNFKNLREFVFKNIDGYFKIYSKHTPINLVRDLPQGFSALEPLVDLPIGINITRFQTLLALHRSYLTPGDSSSGWTAGAAAYYVGYLQPRTFLLKYNENGTITDAVDCALDPLSETKCTLKSFTVEKGIYQTSNFRVQPTESIVRFPNITNLCPFGEVFNATRFASVYAWNRKRISNCVADYSVLYNSASFSTFKCYGVSPTKLNDLCFTNVYADSFVIRGDEVRQIAPGQTGKIADYNYKLPDDFTGCVIAWNSNNLDSKVGGNYNYLYRLFRKSNLKPFERDISTEIYQAGSTPCNGVEGFNCYFPLQSYGFQPTNGVGYQPYRVVVLSFELLHAPATVCGPKKSTNLVKNKCVNFNFNGLTGTGVLTESNKKFLPFQQFGRDIADTTDAVRDPQTLEILDITPCSFGGVSVITPGTNTSNQVAVLYQDVNCTEVPVAIHADQLTPTWRVYSTGSNVFQTRAGCLIGAEHVNNSYECDIPIGAGICASYQTQTNSPRRARSVASQSIIAYTMSLGAENSVAYSNNSIAIPTNFTISVTTEILPVSMTKTSVDCTMYICGDSTECSNLLLQYGSFCTQLNRALTGIAVEQDKNTQEVFAQVKQIYKTPPIKDFGGFNFSQILPDPSKPSKRSFIEDLLFNKVTLADAGFIKQYGDCLGDIAARDLICAQKFNGLTVLPPLLTDEMIAQYTSALLAGTITSGWTFGAGAALQIPFAMQMAYRFNGIGVTQNVLYENQKLIANQFNSAIGKIQDSLSSTASALGKLQDVVNQNAQALNTLVKQLSSNFGAISSVLNDILSRLDPPEAEVQIDRLITGRLQSLQTYVTQQLIRAAEIRASANLAATKMSECVLGQSKRVDFCGKGYHLMSFPQSAPHGVVFLHVTYVFAQEKNFTTAPAICHDGKAHFPREGVFVSNGTHWFVTQRNFYEPQIITTDNTFVSGNCDVVIGIVNNTVYDPLQPELDSFKEELDKYFKNHTSPDVDLGDIPGINASVVNIQKEIDRLNEVAKNLNESLIDLQELGKYEQYIK

SEQ ID NO: 1862 - protein, 1211 aa, Artificial Sequence
  SARS-CoV-2/USA/WA-UW261/2020__EPI_ISL_418046 spike protein (1-1211)(K986P_V987P_P1069F)
MFVFLVLLPLVSSQCVNLTTRTQLPPAYTNSFTRGVYYPDKVFRSSVLHSTQDLFLPFFSNVTWFHAIHVSGTNGTKRFDNPVLPFNDGVYFASTEKSNIIRGWIFGTTLDSKTQSLLIVNNATNVVIKVCEFQFCNDPFLGVYYHKNNKSWMESEFRVYSSANNCTFEYVSQPFLMDLEGKQGNFKNLREFVFKNIDGYFKIYSKHTPINLVRDLPQGFSALEPLVDLPIGINITRFQTLLALHRSYLTPGDSSSGWTAGAAAYYVGYLQPRTFLLKYNENGTITDAVDCALDPLSETKCTLKSFTVEKGIYQTSNFRVQPTESIVRFPNITNLCPFGEVFNATRFTSVYAWNRKRISNCVADYSVLYNSASFSTFKCYGVSPTKLNDLCFTNVYADSFVIRGDEVRQIAPGQTGKIADYNYKLPDDFTGCVIAWNSNNLDSKVGGNYNYLYRLFRKSNLKPFERDISTEIYQAGSTPCNGVEGFNCYFPLQSYGFQPTNGVGYQPYRVVVLSFELLHAPATVCGPKKSTNLVKNKCVNFNFNGLTGTGVLTESNKKFLPFQQFGRDIADTTDAVRDPQTLEILDITPCSFGGVSVITPGTNTSNQVAVLYQDVNCTEVPVAIHADQLTPTWRVYSTGSNVFQTRAGCLIGAEHVNNSYECDIPIGAGICASYQTQTNSPRRARSVASQSIIAYTMSLGAENSVAYSNNSIAIPTNFTISVTTEILPVSMTKTSVDCTMYICGDSTECSNLLLQYGSFCTQLNRALTGIAVEQDKNTQEVFAQVKQIYKTPPIKDFGGFNFSQILPDPSKPSKRSFIEDLLFNKVTLADAGFIKQYGDCLGDIAARDLICAQKFNGLTVLPPLLTDEMIAQYTSALLAGTITSGWTFGAGAALQIPFAMQMAYRFNGIGVTQNVLYENQKLIANQFNSAIGKIQDSLSSTASALGKLQDVVNQNAQALNTLVKQLSSNFGAISSVLNDILSRLDPPEAEVQIDRLITGRLQSLQTYVTQQLIRAAEIRASANLAATKMSECVLGQSKRVDFCGKGYHLMSFPQSAPHGVVFLHVTYVFAQEKNFTTAPAICHDGKAHFPREGVFVSNGTHWFVTQRNFYEPQIITTDNTFVSGNCDVVIGIVNNTVYDPLQPELDSFKEELDKYFKNHTSPDVDLGDISGINASVVNIQKEIDRLNEVAKNLNESLIDLQELGKYEQYIK

SEQ ID NO: 1863 - protein, 1211 aa, Artificial Sequence
  SARS-CoV-2/Portugal/PT0035/2020__EPI_ISL_418020 spike protein (1-1211)(K986P_V987P_P1069F)
MFVFLVLLPLVSSQCVNLTTRTQLPPAYTNSFTRGVYYPDKVFRSSVLHSTQDLFLPFFSNVTWFHAIHVSGTNGTKRFDNPVLPFNDGVYFASTEKSNIIRGWIFGTTLDSKTQSLLIVNNATNVVIKVCEFQFCNDPFLGVYYHKNNKSWMESEFRVYSSANNCTFEYVSQPFLMDLEGKQGNFKNLREFVFKNIDGYFKIYSKHTPINLVRDLPQGFSALEPLVDLPIGINITRFQTLLALHRSYLTPGDSSSGWTAGAAAYYVGYLQPRTFLLKYNENGTITDAVDCALDPLSETKCTLKSFTVEKGIYQTSNFRVQPTESIVRFPNITNLCPFGEVFNATRFASVYAWNRKRISNCVADYSVLYNSASFSTFKCYGVSPTKLNDLCFTNVYADSFVIRGDEVRQIAPGQTGKIADYNYKLPDDFTGCVIAWNSNNLDSKVGGNYNYLYRLFRKSNLKPFERDISTEIYQAGSTPCNGVEGFNCYFPLQSYGFQPTNGVGYQPYRVVVLSFELLHAPATVCGPKKSTNLVKNKCVNFNFNGLTGTGVLTESNKKFLPFQQFGRDIADTTDAVRDPQTLEILDITPCSFGGVSVITPGTNTSNQVAVLYQDVNCTEVPVAIHADQLTPTWRVYSTGSNVFQTRAGCLIGAEHVNNSYECDIPIGAGICASYQTQTNSPRRARSVASQSIIAYTMSLGAENSVAYSNNSIAIPTNFTISVTTEILPVSMTKTSVDCTMYICGDSTECSNLLLQYGSFCTQLNRALTGIAVEQDKNTQEVFAQVKQIYKTPPIKDFGGFNFSQILPDPSKPSKRSFIEDLLFNKVTLADAGFIKQYGDCLGDISARDLICAQKFNGLTVLPPLLTDEMIAQYTSALLAGTITSGWTFGAGAALQIPFAMQMAYRFNGIGVTQNVLYENQKLIANQFNSAIGKIQDSLSSTASALGKLQDVVNQNAQALNTLVKQLSSNFGAISSVLNDILSRLDPPEAEVQIDRLITGRLQSLQTYVTQQLIRAAEIRASANLAATKMSECVLGQSKRVDFCGKGYHLMSFPQSAPHGVVFLHVTYVFAQEKNFTTAPAICHDGKAHFPREGVFVSNGTHWFVTQRNFYEPQIITTDNTFVSGNCDVVIGIVNNTVYDPLQPELDSFKEELDKYFKNHTSPDVDLGDISGINASVVNIQKEIDRLNEVAKNLNESLIDLQELGKYEQYIK

SEQ ID NO: 1864 - protein, 1211 aa, Artificial Sequence
  SARS-CoV-2/USA/NY-NYUMC7/2020__EPI_ISL_418192 spike protein (1-1211)(K986P_V987P_P1069F)
MFVFLVLLPLVSSQCVNLTTRTQLPPAYTNSFTRGVYYPDKVFRSSVLHSTQDLFLPFFSNVTWFHAIHVSGTNGTKRFDNPVLPFNDGVYFASTEKSNIIRGWIFGTTLDSKTQSLLIVNNATNVVIKVCEFQFCNDPFLGVYHHKNNKSWMESEFRVYSSANNCTFEYVSQPFLMDLEGKQGNFKNLREFVFKNIDGYFKIYSKHTPINLVRDLPQGFSALEPLVDLPIGINITRFQTLLALHRSYLTPGDSSSGWTAGAAAYYVGYLQPRTFLLKYNENGTITDAVDCALDPLSETKCTLKSFTVEKGIYQTSNFRVQPTESIVRFPNITNLCPFGEVFNATRFASVYAWNRKRISNCVADYSVLYNSASFSTFKCYGVSPTKLNDLCFTNVYADSFVIRGDEVRQIAPGQTGKIADYNYKLPDDFTGCVIAWNSNNLDSKVGGNYNYLYRLFRKSNLKPFERDISTEIYQAGSTPCNGVEGFNCYFPLQSYGFQPTNGVGYQPYRVVVLSFELLHAPATVCGPKKSTNLVKNKCVNFNFNGLTGTGVLTESNKKFLPFQQFGRDIADTTDAVRDPQTLEILDITPCSFGGVSVITPGTNTSNQVAVLYQGVNCTEVPVAIHADQLTPTWRVYSTGSNVFQTRAGCLIGAEHVNNSYECDIPIGAGICASYQTQTNSPRRARSVASQSIIAYTMSLGAENSVAYSNNSIAIPTNFTISVTTEILPVSMTKTSVDCTMYICGDSTECSNLLLQYGSFCTQLNRALTGIAVEQDKNTQEVFAQVKQIYKTPPIKDFGGFNFSQILPDPSKPSKRSFIEDLLFNKVTLADAGFIKQYGDCLGDIAARDLICAQKFNGLTVLPPLLTDEMIAQYTSALLAGTITSGWTFGAGAALQIPFAMQMAYRFNGIGVTQNVLYENQKLIANQFNSAIGKIQDSLSSTASALGKLQDVVNQNAQALNTLVKQLSSNFGAISSVLNDILSRLDPPEAEVQIDRLITGRLQSLQTYVTQQLIRAAEIRASANLAATKMSECVLGQSKRVDFCGKGYHLMSFPQSAPHGVVFLHVTYVFAQEKNFTTAPAICHDGKAHFPREGVFVSNGTHWFVTQRNFYEPQIITTDNTFVSGNCDVVIGIVNNTVYDPLQPELDSFKEELDKYFKNHTSPDVDLGDISGINASVVNIQKEIDRLNEVAKNLNESLIDLQELGKYEQYIK

SEQ ID NO: 1865 - protein, 1211 aa, Artificial Sequence
  SARS-CoV-2/Iceland/189/2020__EPI_ISL_417709 spike protein (1-1211)(K986P_V987P_P1069F)
MFVFLVLLPLVSSQCVNLTTRTQLPPAYTNSFTRGVYYPDKVFRSSVLHSTQDLFLPFFSNVTWFHAIHVSGTNGTKRFDNPVLPFNDGVYFASTEKSNIIRGWIFGTTLDSKTQSLLIVNNATNVVIKVCEFQFCNDPFLGVYYHKNNKSWMESEFRVYSSANNCTFEYVSQPFLMDLEGKQGNFKNLREFVFKNIDGYFKIYSKHTPINLVRDLPQGFSALEPLVDLPIGINITRFQTLLALHRSYLTPGDSSSGWTAGAAAYYVGYLQPRTFLLKYNENGTITDAVDCALDPLSETKCTLKSFTVEKGIYQTSNFRVQPTESIVRFPNITNLCPFGEVFNATRFASVYAWNRKRISNCVADYSVLYNSASFSTFKCYGVSPTKLNDLCFTNVYADSFVIRGDEVRQIAPGQTGKIADYNYKLPDDFTGCVIAWNSNNLDSKVGGNYNYLYRLFRKSNLKPFERDISTEIYQAGSTPCNGVEGFNCYFPLQSYGFQPTNGVGYQPYRVVVLSFELLHAPATVCGPKKSTNLVKNKCVNFNFNGLTGTGVLTESNKKFLPFQQFGRDIADTTDAVRDPQTLEILDITPCSFGGVSVITPGTNTSNQVAVLYQGVNCTEVPVAIHADQLTPTWRVYSTGSNVFQTRAGCLIGAEHVNNSYECDIPIGAGICASYQTQTNSPRRARSVASQSIIAYTMSLGAENSVAYSNNSIAIPTNFTISVTTEILPVSMTKTSVDCTMYICGDSTECSNLLLQYGSFCTQLNRALTGIAVEQDKNTQEVFAQVKQIYKTPPIKDFGGFNFSQILPDPSKPSKRSFIEDLLFNKVTLADAGFTKQYGDCLGDIAARDLICAQKFNGLTVLPPLLTDEMIAQYTSALLAGTITSGWTFGAGAALQIPFAMQMAYRFNGIGVTQNVLYENQKLIANQFNSAIGKIQDSLSSTASALGKLQDVVNQNAQALNTLVKQLSSNFGAISSVLNDILSRLDPPEAEVQIDRLITGRLQSLQTYVTQQLIRAAEIRASANLAATKMSECVLGQSKRVDFCGKGYHLMSFPQSAPHGVVFLHVTYVFAQEKNFTTAPAICHDGKAHFPREGVFVSNGTHWFVTQRNFYEPQIITTDNTFVSGNCDVVIGIVNNTVYDPLQPELDSFKEELDKYFKNHTSPDVDLGDISGINASVVNIQKEIDRLNEVAKNLNESLIDLQELGKYEQYIK

SEQ ID NO: 1866 - protein, 1211 aa, Artificial Sequence
  SARS-CoV-2/Australia/NSW56/2020__EPI_ISL_417408 spike protein (1-1211)(K986P_V987P_P1069F)
MFVFLVLLPLVSSQCVNLTTRTQLPPAYTNSFTRGVYYPDKVFRSSVLHSTQDLFLPFFSNVTWFHAIHVSGTNGTKRFDNPVLPFNDGVYFASTEKSNIIRGWIFGTTLDSKTQSLLIVNNATNVVIKVCEFQFCNDPFLGVYYHKNNKSWMESEFRVYSSANNCTFEYVSQPFLMDLEGKQGNFKNLREFVFKNIDGYFKIYSKHTPINLVRDLPQGFSALEPLVDLPIGINITRFQTLLALHRSYLTPGDSSSGWTAGAAAYYVGYLQPRTFLLKYNENGTITDAVDCALDPLSETKCTLKSFTVEKGIYQTSNFRVQPTESIVRFPNITNLCPFGEVFNATRFASVYAWNRKRISNCVADYSVLYNSASFSTFKCYGVSPTKLNDLCFTNVYADSFVIRGDEVRQIAPGQTGKIADYNYKLPDDFTGCVIAWNSNNLDSKVGGNYNYLYRLFRKSNLKPFERDISTEIYQAGSTPCNGVEGFNCYFPLQSYGFQPTNGVGYQPYRVVVLSFELLHAPATVCGPKKSTNLVKNKCVNFNFNGLTGTGVLTESNKKFLPFQQFGRDIADTTDAVRDPQTLEILDITPCSFGGVSVITPGTNTSNQVAVLYQDVNCTEVPVAIHADQLTPTWRVYSTGSNVFQTRAGCLIGAEHVNNSYECDIPIGAGICASYQTQTNSPRRARSVASQSIIAYTMSLGAENSVAYSNNSIAIPTNFTISVTTEILPVSMTKTSVDCTMYICGDSTECSNLLLQYGSFCTQLNRALTGIAVEQDKNTQEVFAQVKQIYKTPPIKDFGGFNFSQILPDSSKPSKRSFIEDLLFNKVTLADAGFIKQYGDCLGDIAARDLICAQKFNGLTVLPPLLTDEMIAQYTSALLAGTITSGWTFGAGAALQIPFAMQMAYRFNGIGVTQNVLYENQKLIANQFNSAIGKIQDSLSSTASALGKLQDVVNQNAQALNTLVKQLSSNFGAISSVLNDILSRLDPPEAEVQIDRLITGRLQSLQTYVTQQLIRAAEIRASANLAATKMSECVLGQSKRVDFCGKGYHLMSFPQSAPHGVVFLHVTYVFAQEKNFTTAPAICHDGKAHFPREGVFVSNGTHWFVTQRNFYEPQIITTDNTFVSGNCDVVIGIVNNTVYDPLQPELDSFKEELDKYFKNHTSPDVDLGDISGINASVVNIQKEIDRLNEVAKNLNESLIDLQELGKYEQYIK

SEQ ID NO: 1867 - protein, 1211 aa, Artificial Sequence
  SARS-CoV-2/Iceland/280/2020__EPI_ISL_417608 spike protein (1-1211)(K986P_V987P_P1069F)
MFVFLVLLPLVSSQCVNLTTRTQLPPAYTNSFTRGVYYPDKVFRSSVLHSTQDLFLPFFSNVTWFHAIHVSGTNGTKRFDNPVLPFNDGVYFASTEKSNIIRGWIFGTTLDSKTQSLLIVNNATNVVIKVCEFQFCNDPFLGVYYHKNNKSWMESEFRVYSSANNCTFEYVSQPFLMDLEGKQGNFKNLREFVFKNIDGYFKIYSKHTPINLVRDLPQGFSALEPLVDLPIGINITRFQTLLALHRSYLTPGDSSSGWTAGAAAYYVGYLQPRTFLLKYNENGTITDAVDCALDPLSETKCTLKSFTVEKGIYQTSNFRVQPTESIVRFPNITNLCPFGEVFNATRFASVYAWNRKRISNCVADYSVLYNSASFSTFKCYGVSPTKLNDLCFTNVYADSFVIRGDEVRQIAPGQTGKIADYNYKLPDDFTGCVIAWNSNNLDSKVGGNYNYLYRLFRKSNLKPFERDISTEIYQAGSTPCNGVEGFNCYFPLQSYGFQPTNGVGYQPYRVVVLSFELLHAPATVCGPKKSTNLVKNKCVNFNFNGLTGTGVLTESNKKFLPFQQFGRDIADTTDAVRDPQTLEILDITPCSFGGVSVITPGTNTSNQVAVLYQGVNCTEVPVAIHADQLTPTWRVYSTGSNVFQTRAGCLIGAEHVNNSYECDIPIGAGICASYHTQTNSPRRARSVASQSIIAYTMSLGAENSVAYSNNSIAIPTNFTISVTTEILPVSMTKTSVDCTMYICGDSTECSNLLLQYGSFCTQLNRALTGIAVEQDKNTQEVFAQVKQIYKTPPIKDFGGFNFSQILPDPSKPSKRSFIEDLLFNKVTLADAGFIKQYGDCLGDIAARDLICAQKFNGLTVLPPLLTDEMIAQYTSALLAGTITSGWTFGAGAALQIPFAMQMAYRFNGIGVTQNVLYENQKLIANQFNSAIGKIQDSLSSTASALGKLQDVVNQNAQALNTLVKQLSSNFGAISSVLNDILSRLDPPEAEVQIDRLITGRLQSLQTYVTQQLIRAAEIRASANLAATKMSECVLGQSKRVDFCGKGYHLMSFPQSAPHGVVFLHVTYVFAQEKNFTTAPAICHDGKAHFPREGVFVSNGTHWFVTQRNFYEPQIITTDNTFVSGNCDVVIGIVNNTVYDPLQPELDSFKEELDKYFKNHTSPDVDLGDISGINASVVNIQKEIDRLNEVAKNLNESLIDLQELGKYEQYIK

SEQ ID NO: 1868 - protein, 1211 aa, Artificial Sequence; identical to SEQ ID NO: 1823
  SARS-CoV-2/Iceland/247/2020__EPI_ISL_417575 spike protein (1-1211)(K986P_V987P_P1069F)

SEQ ID NO: 1869 - protein, 1211 aa, Artificial Sequence
  SARS-CoV-2/Iceland/238/2020__EPI_ISL_417566 spike protein (1-1211)(K986P_V987P_P1069F)
MFVFLVLLPLVSSQCVNLTTRTQLPPAYTNSFTRGVYYPDKVFRSSVLHSTQDLFLPFFSNVTWFHAIHVSGTNGTKRFDNPVLPFNDGVYFASTEKSNIIRGWIFGTTLDSKTQSLLIVNNATNVVIKVCEFQFCNDPFLGVYYHKNNKSWMESEFRVYSSANNCTFEYVSQPFLMDLEGKQGNFKNLREFVFKNIDGYFKIYSKHTPINLVRDLPQGFSALEPLVDLPIGINITRFQTLLALHRSYLTPGDSSSGWTAGAAAYYVGYLQPRTFLLKYNENGTITDAVDCALDPLSETKCTLKSFTVEKGIYQTSNFRVQPTESIVRFPNITNLCPFGEVFNATRFASVYAWNRKRISNCVADYSVLYNSASFSTFKCYGVSPTKLNDLCFTNVYADSFVIRGDEVRQIAPGQTGKIADYNYKLPDDFTGCVIAWNSNNLDSKVGGNYNYLYRLFRKSNLKPFERDISTEIYQAGSTPCNGVEGFNCYFPLQSYGFQPTNGVGYQPYRVVVLSFELLHAPATVCGPKKSTNLVKNKCVNFNFNGLTGTGVLTESNKKFLPFQQFGRDIADTTDAVRDPQTLEILDITPCSFGGVSVITPGTNTSNQVAVLYQGVNCTEVPVAIHADQLTPTWRVYSTGSNVFQTRAGCLIGAEHVNNSYECDIPIGAGICASYQTQTNSPRRARSVASQSIIAYTMSLGAENSVAYSNNSIAIPTNFTISVTTEILPVSMTKTSVDCTMYICGDSTECSNLLLQYGSFCTQLNRALTGIAVEQDKNTQEVFAQVKQIYKTPPIKDFGGFNFSQILPDPSKPSKRSFIEDLLFNKVTLADVGFIKQYGDCLGDIAARDLICAQKFNGLTVLPPLLTDEMIAQYTSALLAGTITSGWTFGAGAALQIPFAMQMAYRFNGIGVTQNVLYENQKLIANQFNSAIGKIQDSLSSTASALGKLQDVVNQNAQALNTLVKQLSSNFGAISSVLNDILSRLDPPEAEVQIDRLITGRLQSLQTYVTQQLIRAAEIRASANLAATKMSECVLGQSKRVDFCGKGYHLMSFPQSAPHGVVFLHVTYVFAQEKNFTTAPAICHDGKAHFPREGVFVSNGTHWFVTQRNFYEPQIITTDNTFVSGNCDVVIGIVNNTVYDPLQPELDSFKEELDKYFKNHTSPDVDLGDISGINASVVNIQKEIDRLNEVAKNLNESLIDLQELGKYEQYIK

SEQ ID NO: 1870 - protein, 1211 aa, Artificial Sequence
  SARS-CoV-2/Greece/16/2020__EPI_ISL_418265 spike protein (1-1211)(K986P_V987P_P1069F)
MFVFLVLLPLVSSQCVNLTTRTQLPPAYTNSFTRGVYYPDKVFRSSVLHSTQDLFLPFFSNVTWFHAIHVSGTNGTKRFDNPVLPFNDGVYFASTEKSNIIRGWIFGTTLDSKTQSLLIVNNATNVVIKVCEFQFCNDPFLGVYYHKNNKSWMESEFRVYSSANNCTFEYVSQPFLMDLEGKQGNFKNLREFVFKNVDGYFKIYSKHTPINLVRDLPQGFSALEPLVDLPIGINITRFQTLLALHRSYLTPGDSSSGWTAGAAAYYVGYLQPRTFLLKYNENGTITDAVDCALDPLSETKCTLKSFTVEKGIYQTSNFRVQPTESIVRFPNITNLCPFGEVFNATRFASVYAWNRKRISNCVADYSVLYNSASFSTFKCYGVSPTKLNDLCFTNVYADSFVIRGDEVRQIAPGQTGKIADYNYKLPDDFTGCVIAWNSNNLDSKVGGNYNYLYRLFRKSNLKPFERDISTEIYQAGSTPCNGVEGFNCYFPLQSYGFQPTNGVGYQPYRVVVLSFELLHAPATVCGPKKSTNLVKNKCVNFNFNGLTGTGVLTESNKKFLPFQQFGRDIADTTDAVRDPQTLEILDITPCSFGGVSVITPGTNTSNQVAVLYQDVNCTEVPVAIHADQLTPTWRVYSTGSNVFQTRAGCLIGAEHVNNSYECDIPIGAGICASYQTQTNSPRRARSVASQSIIAYTMSLGAENSVAYSNNSIAIPTNFTISVTTEILPVSMTKTSVDCTMYICGDSTECSNLLLQYGSFCTQLNRALTGIAVEQDKNTQEVFAQVKQIYKTPPIKDFGGFNFSQILPDPSKPSKRSFIEDLLFNKVTLADAGFIKQYGDCLGDIAARDLICAQKFNGLTVLPPLLTDEMIAQYTSALLAGTITSGWTFGAGAALQIPFAMQMAYRFNGIGVTQNVLYENQKLIANQFNSAIGKIQDSLSSTASALGKLQDVVNQNAQALNTLVKQLSSNFGAISSVLNDILSRLDPPEAEVQIDRLITGRLQSLQTYVTQQLIRAAEIRASANLAATKMSECVLGQSKRVDFCGKGYHLMSFPQSAPHGVVFLHVTYVFAQEKNFTTAPAICHDGKAHFPREGVFVSNGTHWFVTQRNFYEPQIITTDNTFVSGNCDVVIGIVNNTVYDPLQPELDSFKEELDKYFKNHTSPDVDLGDISGINASVVNIQKEIDRLNEVAKNLNESLIDLQELGKYEQYIK

SEQ ID NO: 1871 - protein, 1211 aa, Artificial Sequence
  SARS-CoV-2/Iceland/319/2020__EPI_ISL_417648 spike protein (1-1211)(K986P_V987P_P1069F)
MFVFLVLLPLVSSQCVNLTTRTQLPPAYTNSFTRGVYYPDKVFRSSVLHSTQDLFLPFFSNVTWFHAIHVSGTNGTKRFDNPVLPFNDGVYFASTEKSNIIRGWIFGTTLDSKTQSLLIVNNATNVVIKVCEFQFCNDPFLGVYYHKNNKSWMESEFRVYSSANNCTFEYVSQPFLIDLEGKQGNFKNLREFVFKNIDGYFKIYSKHTPINLVRDLPQGFSALEPLVDLPIGINITRFQTLLALHRSYLTPGDSSSGWTAGAAAYYVGYLQPRTFLLKYNENGTITDAVDCALDPLSETKCTLKSFTVEKGIYQTSNFRVQPTESIVRFPNITNLCPFGEVFNATRFASVYAWNRKRISNCVADYSVLYNSASFSTFKCYGVSPTKLNDLCFTNVYADSFVIRGDEVRQIAPGQTGKIADYNYKLPDDFTGCVIAWNSNNLDSKVGGNYNYLYRLFRKSNLKPFERDISTEIYQAGSTPCNGVEGFNCYFPLQSYGFQPTNGVGYQPYRVVVLSFELLHAPATVCGPKKSTNLVKNKCVNFNFNGLTGTGVLTESNKKFLPFQQFGRDIADTTDAVRDPQTLEILDITPCSFGGVSVITPGTNTSNQVAVLYQGVNCTEVPVAIHADQLTPTWRVYSTGSNVFQTRAGCLIGAEHVNNSYECDIPIGAGICASYQTQTNSPRRARSVASQSIIAYTMSLGAENSVAYSNNSIAIPTNFTISVTTEILPVSMTKTSVDCTMYICGDSTECSNLLLQYGSFCTQLNRALTGIAVEQDKNTQEVFAQVKQIYKTPPIKDFGGFNFSQILPDPSKPSKRSFIEDLLFNKVTLADAGFIKQYGDCLGDIAARDLICAQKFNGLTVLPPLLTDEMIAQYTSALLAGTITSGWTFGAGAALQIPFAMQMAYRFNGIGVTQNVLYENQKLIANQFNSAIGKIQDSLSSTASALGKLQDVVNQNAQALNTLVKQLSSNFGAISSVLNDILSRLDPPEAEVQIDRLITGRLQSLQTYVTQQLIRAAEIRASANLAATKMSECVLGQSKRVDFCGKGYHLMSFPQSAPHGVVFLHVTYVFAQEKNFTTAPAICHDGKAHFPREGVFVSNGTHWFVTQRNFYEPQIITTDNTFVSGNCDVVIGIVNNTVYDPLQPELDSFKEELDKYFKNHTSPDVDLGDISGINASVVNIQKEIDRLNEVAKNLNESLIDLQELGKYEQYIK

SEQ ID NO: 1872 - protein, 1211 aa, Artificial Sequence
  SARS-CoV-2/Congo/94/2020__EPI_ISL_417947 spike protein (1-1211)(K986P_V987P_P1069F)
MFVFLVLLPLVSSQCVNLTTRTQLPPAYTNSFTRGVYYPDKVFRSSVLHSTQDLFLPFFSNVTWFHAIHVSGTNGTKRFDNPVLPFNDGVYFASTEKSNIIRGWIFGTTLDSKTQSLLIVNNATNVVIKVCEFQFCNDPFLGVYYHKNNKSWMESEFRVYSSANNCTFEYVSQPFLMDLEGKQGNFKNLREFVFKNIDGYFKIYSKHTPINLVRDLPQGFSALEPLVDLPIGINITRFQTLLALHRSYLTPGDSSSGWTAGAAAYYVGYLQPRTFLLKYNENGTITDAVDCALDPLSETKCTLKSFTVEKGIYQTSNFRVQPTESIVRFPNITNLCPFGEVFNATRFASVYAWNRKRISNCVADYSVLYNSASFSTFKCYGVSPTKLNDLCFTNVYADSFVIRGDEVRQIAPGQTGKIADYNYKLPDDFTGCVIAWNSNNLDSKVGGNYNYLYRLFRKSNLKPFERDISTEIYQAGSTPCNGVEGFNCYFPLQSYGFQPTNGVGYQPYRVVVLSFELLHAPATVCGPKKSTNLVKNKCVNFNFNGLTGTGVLTESNKKFLPFQQFGRDIADTTDAVRDPQTLEILDITPCSFGGVSVITPGTNTSNQVAVLYQGVNCTEVPVAIHADQLTPTWRVYSTGSNVFQTRAGCLIGAEHVNNSYECDIPIGAGICASYQTQTNSPRRARSVASQSIIAYTMSLGAENSVAYSNNSIAIPTNFTISVTTEILPVSMTKTSVDCTMYICGDSTECSNLLLQYGSFCTQLNRALTGIAVEQDKNTQEVFAQVKQIYKTPPIKDFGGFNFSQILPDPSKPSKRSFIEDILFNKVTLADAGFIKQYGDCLGDIAARDLICAQKFNGLTVLPPLLTDEMIAQYTSALLAGTITSGWTFGAGAALQIPFAMQMAYRFNGIGVTQNVLYENQKLIANQFNSAIGKIQDSLSSTASALGKLQDVVNQNAQALNTLVKQLSSNFGAISSVLNDILSRLDPPEAEVQIDRLITGRLQSLQTYVTQQLIRAAEIRASANLAATKMSECVLGQSKRVDFCGKGYHLMSFPQSAPHGVVFLHVTYVFAQEKNFTTAPAICHDGKAHFPREGVFVSNGTHWFVTQRNFYEPQIITTDNTFVSGNCDVVIGIVNNTVYDPLQPELDSFKEELDKYFKNHTSPDVDLGDISGINASVVNIQKEIDRLNEVAKNLNESLIDLQELGKYEQYIK

SEQ ID NO: 1873 - protein, 1211 aa, Artificial Sequence
  SARS-CoV-2/Congo/158/2020__EPI_ISL_417950 spike protein (1-1211)(K986P_V987P_P1069F)
MFVFLVLLPLVSSQCVNLTTRTQLPPAYTNSFTRGVYYPDKVFRSSVLHSTQDLFLPFFSNVTWFHAIHVSGTNGTKRFDNPVLPFNDGVYFASTEKSNIIRGWIFGTTLDSKTQSLLIVNNATNVVIKVCEFQFCNDPFLGVYYHKNNKSWMESEFRVYSSANNCTFEYVSQPFLMDLEGKQGNFKNLREFVFKNIDGYFKIYSKHTPINLVRDLPQGFSALEPLVDLPIGINITRFQTLLALHRSYLTPGDSSSGWTAGAAAYYVGYLQPRTFLLKYNENGTITDAVDCALDPLSETKCTLKSFTVEKGIYQTSNFRVQPTESIVRFPNITNLCPFGEVFNATRFASVYAWNRKRISNCVADYSVLYNSASFSTFKCYGVSPTKLNDLCFTNVYADSFVIRGDEVRQIAPGQTGKIADYNYKLPDDFTGCVIAWNSNNLDSKVGGNYNYLYRLFRKSNLKPFERDISTEIYQAGSTPCNGVEGFNCYFPLQSYGFQPTNGVGYQPYRVVVLSFELLHAPATVCGPKKSTNLVKNKCVNFNFNGLTGTGVLTESNKKFLPFQQFGRDIADTTDAVRDPQTLEILDITPCSFGGVSVITPGTNTSNQVAVLYQDVNCTEVPVAIHADQLTPTWRVYSTGSNVFQTRAGCLIGAEHVNNSYECDIPIGAGICASYQTQTNSPRRARSVASQSIIAYTMSLGAENSVAYSNNSIAIPTNFTISVTTEILPVSMTKTSVDCTMYICGDSTECSNLLLQYGSFCTQLNRALTGIAVEQDKNTQEVFAQVKQIYKTPPIKDFGGFNFSQILPDPSKPSKRSFIEDLLFNKVTLADAGFIKQYGDCLGDIAARDLICAQKFNGLTVLPPLLTDEMIAQYTSALLAGTITSGWTFGAGAALQIPFAMQMAYRFNGIGVTQNVLYENQKLIANQFNSAIGKIQDSLSSTASALGKLQDVVNQNAQALNTLVKQLSSNFGAISSVLNDILSRLDPPEAEVQIDRLITGRLQSLQTYVTQQLIRAAEIRASANLAATKMSECVLGQSKRVDFCGKGYHLMSFPQSAPHGVVFLHVTYVFAQEKNFTTAPAICHDGKAHFPREGVFVSNGTHWFVTQRNFYEPQIITTDNTFLSGNCDVVIGIVNNTVYDPLQPELDSFKEELDKYFKNHTSPDVDLGDISGINASVVNIQKEIDRLNEVAKNLNESLIDLQELGKYEQYIK

SEQ ID NO: 1874 - protein, 1211 aa, Artificial Sequence
  SARS-CoV-2/USA/UT-00034/2020__EPI_ISL_417977 spike protein (1-1211)(K986P_V987P_P1069F)
MFVFLVLLPLVSSQCVNLTTRTQLPPAYTNSFTRGVYYPDKVFRSSVLHSTQDLFLPFFSNVTWFHAIHVSGTNGTKRFDNPVLPFNDGVYFASTEKSNIIRGWIFGTTLDSKTQSLLIVNNATNVVIKVCEFQFCNDPFLGVYYYKNNKSWMESEFRVYSSANNCTFEYVSQPFLMDLEGKQGNFKNLREFVFKNIDGYFKIYSKHTPINLVRDLPQGFSALEPLVDLPIGINITRFQTLLALHRSYLTPGDSSSGWTAGAAAYYVGYLQPRTFLLKYNENGTITDAVDCALDPLSETKCTLKSFTVEKGIYQTSNFRVQPTESIVRFPNITNLCPFGEVFNATRFASVYAWNRKRISNCVADYSVLYNSASFSTFKCYGVSPTKLNDLCFTNVYADSFVIRGDEVRQIAPGQTGKIADYNYKLPDDFTGCVIAWNSNNLDSKVGGNYNYLYRLFRKSNLKPFERDISTEIYQAGSTPCNGVEGFNCYFPLQSYGFQPTNGVGYQPYRVVVLSFELLHAPATVCGPKKSTNLVKNKCVNFNFNGLTGTGVLTESNKKFLPFQQFGRDIADTTDAVRDPQTLEILDITPCSFGGVSVITPGTNTSNQVAVLYQGVNCTEVPVAIHADQLTPTWRVYSTGSNVFQTRAGCLIGAEHVNNSYECDIPIGAGICASYQTQTNSPRRARSVASQSIIAYTMSLGAENSVAYSNNSIAIPTNFTISVTTEILPVSMTKTSVDCTMYICGDSTECSNLLLQYGSFCTQLNRALTGIAVEQDKNTQEVFAQVKQIYKTPPIKDFGGFNFSQILPDPSKPSKRSFIEDLLFNKVTLADAGFIKQYGDCLGDIAARDLICAQKFNGLTVLPPLLTDEMIAQYTSALLAGTITSGWTFGAGAALQIPFAMQMAYRFNGIGVTQNVLYENQKLIANQFNSAIGKIQDSLSSTASALGKLQDVVNQNAQALNTLVKQLSSNFGAISSVLNDILSRLDPPEAEVQIDRLITGRLQSLQTYVTQQLIRAAEIRASANLAATKMSECVLGQSKRVDFCGKGYHLMSFPQSAPHGVVFLHVTYVFAQEKNFTTAPAICHDGKAHFPREGVFVSNGTHWFVTQRNFYEPQIITTDNTFVSGNCDVVIGIVNNTVYDPLQPELDSFKEELDKYFKNHTSPDVDLGDISGINASVVNIQKEIDRLNEVAKNLNESLIDLQELGKYEQYIK

SEQ ID NO: 1875 - protein, 1211 aa, Artificial Sequence
  SARS-CoV-2/USA/UT-00033/2020__EPI_ISL_417976 spike protein (1-1211)(K986P_V987P_P1069F)
MFVFLVLLPLVSSQCVNLTTRTQLPPAYTNSFTRGVYYPDKVFRSSVLHSTQDLFLPFFSNVTWFHAIHVSGTNGTKRFDNPVLPFNDGVYFASTEKSNIIRGWIFGTTLDSKTQSLLIVNNATNVVIKVCEFQFCNDPFLGVYYHKNNKSWMESEFRVYSSANNCTFEYVSQPFLMDLEGKQGNFKNLREFVFKNIDGYFKIYSKHTPINLVRDLPQGFSALEPLVDLPIGINITRFQTLLALHRSYLTPGDSSSGLTAGAAAYYVGYLQPRTFLLKYNENGTITDAVDCALDPLSETKCTLKSFTVEKGIYQTSNFRVQPTESIVRFPNITNLCPFGEVFNATRFASVYAWNRKRISNCVADYSVLYNSASFSTFKCYGVSPTKLNDLCFTNVYADSFVIRGDEVRQIAPGQTGKIADYNYKLPDDFTGCVIAWNSNNLDSKVGGNYNYLYRLFRKSNLKPFERDISTEIYQAGSTPCNGVEGFNCYFPLQSYGFQPTNGVGYQPYRVVVLSFELLHAPATVCGPKKSTNLVKNKCVNFNFNGLTGTGVLTESNKKFLPFQQFGRDIADTTDAVRDPQTLEILDITPCSFGGVSVITPGTNTSNQVAVLYQGVNCTEVPVAIHADQLTPTWRVYSTGSNVFQTRAGCLIGAEHVNNSYECDIPIGAGICASYQTQTNSPRRARSVASQSIIAYTMSLGAENSVAYSNNSIAIPTNFTISVTTEILPVSMTKTSVDCTMYICGDSTECSNLLLQYGSFCTQLNRALTGIAVEQDKNTQEVFAQVKQIYKTPPIKDFGGFNFSQILPDPSKPSKRSFIEDLLFNKVTLADAGFIKQYGDCLGDIAARDLICAQKFNGLTVLPPLLTDEMIAQYTSALLAGTITSGWTFGAGAALQIPFAMQMAYRFNGIGVTQNVLYENQKLIANQFNSAIGKIQDSLSSTASALGKLQDVVNQNAQALNTLVKQLSSNFGAISSVLNDILSRLDPPEAEVQIDRLITGRLQSLQTYVTQQLIRAAEIRASANLAATKMSECVLGQSKRVDFCGKGYHLMSFPQSAPHGVVFLHVTYVFAQEKNFTTAPAICHDGKAHFPREGVFVSNGTHWFVTQRNFYEPQIITTDNTFVSGNCDVVIGIVNNTVYDPLQPELDSFKEELDKYFKNHTSPDVDLGDISGINASVVNIQKEIDRLNEVAKNLNESLIDLQELGKYEQYIK

SEQ ID NO: 1876 - protein, 1211 aa, Artificial Sequence
  SARS-CoV-2/USA/WI-13/2020__EPI_ISL_417516 spike protein (1-1211)(K986P_V987P_P1069F)
MFVFLVLLPLVSSQCVNLTTRTQLPPAYTNSFTRGVYYPDKVFRSSVLHSTQDLFLPFFSNVTWFHAIHVSGTNGTKRFDNPVLPFNDGVYFASTEKSNIIRGWIFGTTLDSKTQSLLIVNNATNVVIKVCEFQFCNDPFLGVYYHKNNKSWMESEFRVYSSANNCTFEYVSQPFLMDLEGKQGNFKNLREFVFKNIDGYFKIYSKHTPINLVRDLPQGFSALEPLVDLPIGINITRFQTLLALHRSYLTPGDSSSGWTAGAAAYYVGYLQPRTFLLKYNENGTITDAVDCALDPLSETKCTLKSFTVEKGIYQTSNFRVLPTESIVRFPNITNLCPFGEVFNATRFASVYAWNRKRISNCVADYSVLYNSASFSTFKCYGVSPTKLNDLCFTNVYADSFVIRGDEVRQIAPGQTGKIADYNYKLPDDFTGCVIAWNSNNLDSKVGGNYNYLYRLFRKSNLKPFERDISTEIYQAGSTPCNGVEGFNCYFPLQSYGFQPTNGVGYQPYRVVVLSFELLHAPATVCGPKKSTNLVKNKCVNFNFNGLTGTGVLTESNKKFLPFQQFGRDIADTTDAVRDPQTLEILDITPCSFGGVSVITPGTNTSNQVAVLYQGVNCTEVPVAIHADQLTPTWRVYSTGSNVFQTRAGCLIGAEHVNNSYECDIPIGAGICASYQTQTNSPRRARSVASQSIIAYTMSLGAENSVAYSNNSIAIPTNFTISVTTEILPVSMTKTSVDCTMYICGDSTECSNLLLQYGSFCTQLNRALTGIAVEQDKNTQEVFAQVKQIYKTPPIKDFGGFNFSQILPDPSKPSKRSFIEDLLFNKVTLADAGFIKQYGDCLGDIAARDLICAQKFNGLTVLPPLLTDEMIAQYTSALLAGTITSGWTFGAGAALQIPFAMQMAYRFNGIGVTQNVLYENQKLIANQFNSAIGKIQDSLSSTASALGKLQDVVNQNAQALNTLVKQLSSNFGAISSVLNDILSRLDPPEAEVQIDRLITGRLQSLQTYVTQQLIRAAEIRASANLAATKMSECVLGQSKRVDFCGKGYHLMSFPQSAPHGVVFLHVTYVFAQEKNFTTAPAICHDGKAHFPREGVFVSNGTHWFVTQRNFYEPQIITTDNTFVSGNCDVVIGIVNNTVYDPLQPELDSFKEELDKYFKNHTSPDVDLGDISGINASVVNIQKEIDRLNEVAKNLNESLIDLQELGKYEQYIK

SEQ ID NO: 1877 - protein, 1210 aa, Artificial Sequence
  SARS-CoV-2/India/1-27/2020__EPI_ISL_413522 spike protein (1-1210)(K985P_V986P_P1068F)
MFVFLVLLPLVSSQCVNLTTRTQLPPAYTNSFTRGVYYPDKVFRSSVLHSTQDLFLPFFSNVTWFHAIHVSGTNGTKRFDNPVLPFNDGVYFASTEKSNIIRGWIFGTTLDSKTQSLLIVNNATNVVIKVCEFQFCNDPFLGVYHKNNKSWMESEFRVYSSANNCTFEYVSQPFLMDLEGKQGNFKNLREFVFKNIDGYFKIYSKHTPINLVRDLPQGFSALEPLVDLPIGINITRFQTLLALHRSYLTPGDSSSGWTAGAAAYYVGYLQPRTFLLKYNENGTITDAVDCALDPLSETKCTLKSFTVEKGIYQTSNFRVQPTESIVRFPNITNLCPFGEVFNATRFASVYAWNRKRISNCVADYSVLYNSASFSTFKCYGVSPTKLNDLCFTNVYADSFVIRGDEVIQIAPGQTGKIADYNYKLPDDFTGCVIAWNSNNLDSKVGGNYNYLYRLFRKSNLKPFERDISTEIYQAGSTPCNGVEGFNCYFPLQSYGFQPTNGVGYQPYRVVVLSFELLHAPATVCGPKKSTNLVKNKCVNFNFNGLTGTGVLTESNKKFLPFQQFGRDIADTTDAVRDPQTLEILDITPCSFGGVSVITPGTNTSNQVAVLYQDVNCTEVPVAIHADQLTPTWRVYSTGSNVFQTRAGCLIGAEHVNNSYECDIPIGAGICASYQTQTNSPRRARSVASQSIIAYTMSLGAENSVAYSNNSIAIPTNFTISVTTEILPVSMTKTSVDCTMYICGDSTECSNLLLQYGSFCTQLNRALTGIAVEQDKNTQEVFAQVKQIYKTPPIKDFGGFNFSQILPDPSKPSKRSFIEDLLFNKVTLADAGFIKQYGDCLGDIAARDLICAQKFNGLTVLPPLLTDEMIAQYTSALLAGTITSGWTFGAGAALQIPFAMQMAYRFNGIGVTQNVLYENQKLIANQFNSAIGKIQDSLSSTASALGKLQDVVNQNAQALNTLVKQLSSNFGAISSVLNDILSRLDPPEAEVQIDRLITGRLQSLQTYVTQQLIRAAEIRASANLAATKMSECVLGQSKRVDFCGKGYHLMSFPQSAPHGVVFLHVTYVFAQEKNFTTAPAICHDGKAHFPREGVFVSNGTHWFVTQRNFYEPQIITTDNTFVSGNCDVVIGIVNNTVYDPLQPELDSFKEELDKYFKNHTSPDVDLGDISGINASVVNIQKEIDRLNEVAKNLNESLIDLQELGKYEQYIK

SEQ ID NO: 1878 - protein, 1205 aa, Artificial Sequence
  SARS-CoV-2/pangolin/Guangxi/P4L/2017__EPI_ISL_410538 spike protein (1-1205)(K980P_V981P_P1063F)
MFVFLFVLPLVSSQCVNLTTRTGIPPGYTNSSTRGVYYPDKVFRSSILHLTQDLFLPFFSNVTWFNTINYQGGFKKFDNPVLPFNDGVYFASTEKSNIIRGWIFGTTLDARTQSLLIVNNATNVVIKVCEFQFCTDPFLGVYYHNNNKTWVENEFRVYSSANNCTFEYISQPFLMDLEGKQGNFKNLREFVFKNVDGYFKIYSKHTPIDLVRDLPRGFAALEPLVDLPIGINITRFQTLLALHRSYLTPGNLESGWTTGAAAYYVGYLQQRTFLLSYNQNGTITDAVDCSLDPLSETKCTLKSLTVEKGIYQTSNFRVQPTISIVRFPNITNLCPFGEVFNASKFASVYAWNRKRISNCVADYSVLYNSTSFSTFKCYGVSPTKLNDLCFTNVYADSFVVKGDEVRQIAPGQTGVIADYNYKLPDDFTGCVIAWNSVKQDALTGGNYGYLYRLFRKSKLKPFERDISTEIYQAGSTPCNGQVGLNCYYPLERYGFHPTTGVNYQPFRVVVLSFELLNGPATVCGPKLSTTLVKDKCVNFNFNGLTGTGVLTTSKKQFLPFQQFGRDISDTTDAVRDPQTLEILDITPCSFGGVSVITPGTNTSNQVAVLYQDVNCTEVPMAIHAEQLTPAWRVYSAGANVFQTRAGCLVGAEHVNNSYECDIPVGAGICASYHSMSSLRSVNQRSIIAYTMSLGAENSVAYSNNSIAIPTNFTISVTTEILPVSMTKTSVDCTMYICGDSIECSNLLLQYGSFCTQLNRALTGIAVEQDKNTQEVFAQVKQIYKTPPIKDFGGFNFSQILPDPSKPSKRSFIEDLLFNKVTLADAGFIKQYGDCLGDIAARDLICAQKFNGLTVLPPLLTDEMIAQYTSALLAGTITSGWTFGAGAALQIPFAMQMAYRFNGIGVTQNVLYENQKLIANQFNSAIGKIQDSLSSTASALGKLQDVVNQNAQALNTLVKQLSSNFGAISSVLNDILSRLDPPEAEVQIDRLITGRLQSLQTYVTQQLIRAAEIRASANLAATKMSECVLGQSKRVDFCGKGYHLMSFPQSAPHGVVFLHVTYVFAQEKNFTTAPAICHEGKAHFPREGVFVSNGTHWFITQRNFYEPQIITTDNTFVSGSCDVVIGIVNNTVYDPLQPELDSFKEELDKYFKNHTSPDVDLGDISGINASVVNIQKEIDRLNEVAKNLNESPIDLQELGKYEQYIK

SEQ ID NO: 1879 - protein, 1205 aa, Artificial Sequence
  SARS-CoV-2/pangolin/Guangxi/P5L/2017__EPI_ISL_410540 spike protein (1-1205)(K980P_V981P_P1063F)
MFVFLFVLPLVSSQCVNLTTRTGIPPGYTNSSTRGVYYPDKVFRSSILHLTQDLFLPFFSNVTWFNTINYQGGFKKFDNPVLPFNDGVYFASTEKSNIIRGWIFGTTLDARTQSLLIVNNATNVVIKVCEFQFCTDPFLGVYYHNNNKTWVENEFRVYSSANNCTFEYISQPFLMDLEGKQGNFKNLREFVFKNVDGYFKIYSKHTPIDLVRDLPRGFAALEPLVDLPIGINITRFQTLLALHRSYLTPGKLESGWTTGAAAYYVGYLQQRTFLLSYNQNGTITDAVDCSLDPLSETKCTLKSLTVEKGIYQTSNFRVQPTISIVRFPNITNLCPFGEVFNASKFASVYAWNRKRISNCVADYSVLYNSTSFSTFKCYGVSPTKLNDLCFTNVYADSFVVKGDEVRQIAPGQTGVIADYNYKLPDDFTGCVIAWNSVKQDALTGGNYGYLYRLFRKSKLKPFERDISTEIYQAGSTPCNGQVGLNCYYPLERYGFHPTTGVNYQPFRVVVLSFELLNGPATVCGPKLSTTLVKDKCVNFNFNGLTGTGVLTTSKKQFLPFQQFGRDISDTTDAVRDPQTLEILDITPCSFGGVSVITPGTNTSNQVAVLYQDVNCTEVPMAIHAEQLTPAWRVYSAGANVFQTRAGCLVGAEHVNNSYECDIPVGAGICASYHSMSSFRSVNQRSIIAYTMSLGAENSVAYSNNSIAIPTNFTISVTTEILPVSMTKTSVDCTMYICGDSIECSNLLLQYGSFCTQLNRALTGIAVEQDKNTQEVFAQVKQIYKTPPIKDFGGFNFSQILPDPSKPSKRSFIEDLLFNKVTLADAGFIKQYGDCLGDIAARDLICAQKFNGLTVLPPLLTDEMIAQYTSALLAGTITSGWTFGAGAALQIPFAMQMAYRFNGIGVTQNVLYENQKLIANQFNSAIGKIQDSLSSTASALGKLQDVVNQNAQALNTLVKQLSSNFGAISSVLNDILSRLDPPEAEVQIDRLITGRLQSLQTYVTQQLIRAAEIRASANLAATKMSECVLGQSKRVDFCGKGYHLMSFPQSAPHGVVFLHVTYVFAQEKNFTTAPAICHEGKAHFPREGVFVSNGTHWFITQRNFYEPQIITTDNTFVSGSCDVVIGIVNNTVYDPLQPELDSFKEELDKYFKNHTSPDVDLGDISGINASVVNIQKEIDRLNEVAKNLNESLIDLQELGKYEQYIK

SEQ ID NO: 1880 - protein, 1205 aa, Artificial Sequence
  SARS-CoV-2/pangolin/Guangxi/P5E/2017__EPI_ISL_410541 spike protein (1-1205)(K980P_V981P_P1063F)
MFVFLFVLPLVSSQCVNLTTRTGIPPGYTNSSTRGVYYPDKVFRSSILHLTQDLFLPFFSNVTWFNTITYQGGSKKFDNPVLPFNDGVYFASTEKSNIIRGWIFGTTLDARTQSLLIVNNATNVVIKVCEFQFCTDPFLGVYYHNNNKTWVENEFRVYSSANNCTFEYISQPFLMDLEGKQGNFKNLREFVFKNVDGYFKIYSKHTPIDLVRDLPRGFAALEPLVDLPIGINITRFQTLLALHRSYLTPGKLESGWTTGAAAYYVGYLQQRTFLLSYNQNGTITDAVDCSLDPLSETKCTLKSLTVEKGIYQTSNFRVQPTISIVRFPNITNLCPFGEVFNASKFASVYAWNRKRISNCVADYSVLYNSTSFSTFKCYGVSPTKLNDLCFTNVYADSFVVKGDEVRQIAPGQTGVIADYNYKLPDDFTGCVIAWNSVKQDALTGDNYGYLYRLFRKSKLKPFERDISTEIYQAGSTPCNGQVGLNCYYPLERYGFHPTTGVNYQPFRVVVLSFELLNGPATVCGPKLSTTLVKDKCVNFNFNGLTGTGVLTTSKKQFLPFQQFGRDISDTTDAVRDPQTLEILDITPCSFGGVSVITPGTNTSNQVAVLYQDVNCTEVPMAIHAEQLTPAWRVYSAGANVFQTRAGCLVGAEHVNNSYECDIPVGAGICASYHSMSSFRSVNQRSIIAYTMSLGAENSVAYSNNSIAIPTNFTISVTTEILPVSMTKTSVDCTMYICGDSIECSNLLLQYGSFCTQLNRALTGIAVEQDKNTQEVFAQVKQIYKTPPIKDFGGFNFSQILPDPSKPSKRSFIEDLLFNKVTLADAGFIKQYGDCLGDIAARDLICAQKFNGLTVLPPLLTDEMIAQYTSALLAGTITSGWTFGAGAALQIPFAMQMAYRFNGIGVTQNVLYENQKLIANQFNSAIGKIQDSLSSTASALGKLQDVVNQNAQALNTLVKQLSSNFGAISSVLNDILSRLDPPEAEVQIDRLITGRLQSLQTYVTQQLIRAAEIRASANLAATKMSECVLGQSKRVDFCGKGYHLMSFPQSAPHGVVFLHVTYVFAQEKNFTTAPAICHEGKAHFPREGVFVSNGTHWFITQRNFYEPQIITTDNTFVSGSCDVVIGIVNNTVYDPLQPELDSFKEELDKYFKNHTSPDVDLGDISGINASVVNIQKEIDRLNEVAKNLNESLIDLQELGKYEQYIK

SEQ ID NO: 1881 - protein, 1203 aa, Artificial Sequence
  SARS-CoV-2/pangolin/Guangxi/P1E/2017__EPI_ISL_410539 spike protein (1-1203)(K978P_V979P_P1061F)
MFVFLFVLPLVSSQCVNLTTRTGIQPGYTNSSTRGVYYPDKVFRSSILHLTQDLFLPFFSNVTWFNTINYQGGFKKFDNPVLPFNDGVYFASTEKSNIIRGWIFGTTLDARTQSLLIVNNATNVVIKVCEFQFCTDPFLGVYYHNNNKTWVENEFRVYSSANNCTFEYISQPFLMDLEGKQGNFKNLREFVFKNVDGYFKIYSKHTPIDLVRDLPRGFAALEPLVDLPIGINITRFQTLLALHRSYLTPGKLESGWTTGAAAYYVGYLQQRTFLLSYNQNGTITDAVDCSLDPLSETKCTLKSLTVEKGIYQTSNFRVQPTISIVRFPNITNLCPFGEVFNASKFASVYAWNRKRISNCVADYSVLYNSTSFSTFKCYGVSPTKLNDLCFTNVYADSFVVKGDEVRQIAPGQTGVIADYNYKLPDDFTGCVIAWNSVKQDALTGGNYLYRLFRKSKLKPFERDISTEIYQAGSTPCNGQVGLNCYYPLERYGFHPTTGVNYQPFRVVVLSFELLNGPATVCGPKLSTTLVKDKCVNFNFNGLTGTGVLTTSKKQFLPFQQFGRDISDTTDAVRDPQTLEILDITPCSFGGVSVITPGTNTSNQVAVLYQDVNCTEVPMAIHAEQLTPAWRVYSAGANVFQTRAGCLVGAEHVNNSYECDIPVGAGICASYHSMSSLRSVNQRSIIAYTMSLGAENSVAYSNNSIAIPTNFTISVTTEILPVSMTKTSVDCTMYICGDSIECSNLLLQYGSFCTQLNRALTGIAVEQDKNTQEVFAQVKQIYKTPPIKDFGGFNFSQILPDPSKPSKRSFIEDLLFNKVTLADAGFIKQYGDCLGDIAARDLICAQKFNGLTVLPPLLTDEMIAQYTSALLAGTITSGWTFGAGAALQIPFAMQMAYRFNGIGVTQNVLYENQKLIANQFNSAIGKIQDSLSSTASALGKLQDVVNQNAQALNTLVKQLSSNFGAISSVLNDILSRLDPPEAEVQIDRLITGRLQSLQTYVTQQLIRAAEIRASANLAATKMSECVLGQSKRVDFCGKGYHLMSFPQSAPHGVVFLHVTYVFAQEKNFTTAPAICHEGKAHFPREGVFVSNGTHWFITQRNFYEPQIITTDNTFVSGSCDVVIGIVNNTVYDPLQPELDSFKEELDKYFKNHTSPDVDLGDISGINASVVNIQKEIDRLNEVAKNLNESLIDLQELGKYEQYIK

SEQ ID NO: 1882 - protein, 1211 aa, Artificial Sequence
  SARS-CoV-2/Wuhan/WIV05/2019__EPI_ISL_402128 spike protein (1-1211)(K986P_V987P_ H1048Q_H1064N_ H1083N_H1101N)
MFVFLVLLPLVSSQCVNLTTRTQLPPAYTNSFTRGVYYPDKVFRSSVLHSTQDLFLPFFSNVTWFHAIHVSGTNGTKRFDNPVLPFNDGVYFASTEKSNIIRGWIFGTTLDSKTQSLLIVNNATNVVIKVCEFQFCNDPFLGVYYHKNNKSWMESEFRVYSSANNCTFEYVSQPFLMDLEGKQGNFKNLREFVFKNIDGYFKIYSKHTPINLVRDLPQGFSALEPLVDLPIGINITRFQTLLALHRSYLTPGDSSSGWTAGAAAYYVGYLQPRTFLLKYNENGTITDAVDCALDPLSETKCTLKSFTVEKGIYQTSNFRVQPTESIVRFPNITNLCPFGEVFNATRFASVYAWNRKRISNCVADYSVLYNSASFSTFKCYGVSPTKLNDLCFTNVYADSFVIRGDEVRQIAPGQTGKIADYNYKLPDDFTGCVIAWNSNNLDSKVGGNYNYLYRLFRKSNLKPFERDISTEIYQAGSTPCNGVEGFNCYFPLQSYGFQPTNGVGYQPYRVVVLSFELLHAPATVCGPKKSTNLVKNKCVNFNFNGLTGTGVLTESNKKFLPFQQFGRDIADTTDAVRDPQTLEILDITPCSFGGVSVITPGTNTSNQVAVLYQDVNCTEVPVAIHADQLTPTWRVYSTGSNVFQTRAGCLIGAEHVNNSYECDIPIGAGICASYQTQTNSPRRARSVASQSIIAYTMSLGAENSVAYSNNSIAIPTNFTISVTTEILPVSMTKTSVDCTMYICGDSTECSNLLLQYGSFCTQLNRALTGIAVEQDKNTQEVFAQVKQIYKTPPIKDFGGFNFSQILPDPSKPSKRSFIEDLLFNKVTLADAGFIKQYGDCLGDIAARDLICAQKFNGLTVLPPLLTDEMIAQYTSALLAGTITSGWTFGAGAALQIPFAMQMAYRFNGIGVTQNVLYENQKLIANQFNSAIGKIQDSLSSTASALGKLQDVVNQNAQALNTLVKQLSSNFGAISSVLNDILSRLDPPEAEVQIDRLITGRLQSLQTYVTQQLIRAAEIRASANLAATKMSECVLGQSKRVDFCGKGYQLMSFPQSAPHGVVFLNVTYVPAQEKNFTTAPAICNDGKAHFPREGVFVSNGTNWFVTQRNFYEPQIITTDNTFVSGNCDVVIGIVNNTVYDPLQPELDSFKEELDKYFKNHTSPDVDLGDISGINASVVNIQKEIDRLNEVAKNLNESLIDLQELGKYEQYIK

SEQ ID NO: 1883 - protein, 1207 aa, Artificial Sequence
  SARS-CoV-2/bat/Yunnan/RaTG13/2013__EPI_ISL_402131 spike protein (1-1207)(K982P_V983P_ H1044Q_H1060N_ H1079N_H1097N)
MFVFLVLLPLVSSQCVNLTTRTQLPPAYTNSSTRGVYYPDKVFRSSVLHLTQDLFLPFFSNVTWFHAIHVSGTNGIKRFDNPVLPFNDGVYFASTEKSNIIRGWIFGTTLDSKTQSLLIVNNATNVVIKVCEFQFCNDPFLGVYYHKNNKSWMESEFRVYSSANNCTFEYVSQPFLMDLEGKQGNFKNLREFVFKNIDGYFKIYSKHTPINLVRDLPPGFSALEPLVDLPIGINITRFQTLLALHRSYLTPGDSSSGWTAGAAAYYVGYLQPRTFLLKYNENGTITDAVDCALDPLSETKCTLKSFTVEKGIYQTSNFRVQPTDSIVRFPNITNLCPFGEVFNATTFASVYAWNRKRISNCVADYSVLYNSTSFSTFKCYGVSPTKLNDLCFTNVYADSFVITGDEVRQIAPGQTGKIADYNYKLPDDFTGCVIAWNSKHIDAKEGGNFNYLYRLFRKANLKPFERDISTEIYQAGSKPCNGQTGLNCYYPLYRYGFYPTDGVGHQPYRVVVLSFELLNAPATVCGPKKSTNLVKNKCVNFNFNGLTGTGVLTESNKKFLPFQQFGRDIADTTDAVRDPQTLEILDITPCSFGGVSVITPGTNASNQVAVLYQDVNCTEVPVAIHADQLTPTWRVYSTGSNVFQTRAGCLIGAEHVNNSYECDIPIGAGICASYQTQTNSRSVASQSIIAYTMSLGAENSVAYSNNSIAIPTNFTISVTTEILPVSMTKTSVDCTMYICGDSTECSNLLLQYGSFCTQLNRALTGIAVEQDKNTQEVFAQVKQIYKTPPIKDFGGFNFSQILPDPSKPSKRSFIEDLLFNKVTLADAGFIKQYGDCLGDIAARDLICAQKFNGLTVLPPLLTDEMIAQYTSALLAGTITSGWTFGAGAALQIPFAMQMAYRFNGIGVTQNVLYENQKLIANQFNSAIGKIQDSLSSTASALGKLQDVVNQNAQALNTLVKQLSSNFGAISSVLNDILSRLDPPEAEVQIDRLITGRLQSLQTYVTQQLIRAAEIRASANLAATKMSECVLGQSKRVDFCGKGYQLMSFPQSAPHGVVFLNVTYVPAQEKNFTTAPAICNDGKAHFPREGVFVSNGTNWFVTQRNFYEPQIITTDNTFVSGSCDVVIGIVNNTVYDPLQPELDSFKEELDKYFKNHTSPDVDLGDISGINASVVNIQKEIDRLNEVAKNLNESLIDLQELGKYEQYIK

SEQ ID NO: 1884 - protein, 1211 aa, Artificial Sequence
  SARS-CoV-2/Wuhan/HBCDC-HB-01/2019__EPI_ISL_402132 spike protein (1-1211)(K986P_V987P_ H1048Q_H1064N_ H1083N_H1101N)
MFVFLVLLPLVSSQCVNLTTRTQLPPAYTNSITRGVYYPDKVFRSSVLHSTQDLFLPFFSNVTWFHAIHVSGTNGTKRFDNPVLPFNDGVYFASTEKSNIIRGWIFGTTLDSKTQSLLIVNNATNVVIKVCEFQFCNDPFLGVYYHKNNKSWMESEFRVYSSANNCTFEYVSQPFLMDLEGKQGNFKNLREFVFKNIDGYFKIYSKHTPINLVRDLPQGFSALEPLVDLPIGINITRFQTLLALHRSYLTPGDSSSGWTAGAAAYYVGYLQPRTFLLKYNENGTITDAVDCALDPLSETKCTLKSFTVEKGIYQTSNFRVQPTESIVRFPNITNLCPFGEVFNATRFASVYAWNRKRISNCVADYSVLYNSASFSTFKCYGVSPTKLNDLCFTNVYADSFVIRGDEVRQIAPGQTGKIADYNYKLPDDFTGCVIAWNSNNLDSKVGGNYNYLYRLFRKSNLKPFERDISTEIYQAGSTPCNGVEGFNCYFPLQSYGFQPTNGVGYQPYRVVVLSFELLHAPATVCGPKKSTNLVKNKCVNFNFNGLTGTGVLTESNKKFLPFQQFGRDIADTTDAVRDPQTLEILDITPCSFGGVSVITPGTNTSNQVAVLYQDVNCTEVPVAIHADQLTPTWRVYSTGSNVFQTRAGCLIGAEHVNNSYECDIPIGAGICASYQTQTNSPRRARSVASQSIIAYTMSLGAENSVAYSNNSIAIPTNFTISVTTEILPVSMTKTSVDCTMYICGDSTECSNLLLQYGSFCTQLNRALTGIAVEQDKNTQEVFAQVKQIYKTPPIKDFGGFNFSQILPDPSKPSKRSFIEDLLFNKVTLADAGFIKQYGDCLGDIAARDLICAQKFNGLTVLPPLLTDEMIAQYTSALLAGTITSGWTFGAGAALQIPFAMQMAYRFNGIGVTQNVLYENQKLIANQFNSAIGKIQDSLSSTASALGKLQDVVNQNAQALNTLVKQLSSNFGAISSVLNDILSRLDPPEAEVQIDRLITGRLQSLQTYVTQQLIRAAEIRASANLAATKMSECVLGQSKRVDFCGKGYQLMSFPQSAPHGVVFLNVTYVPAQEKNFTTAPAICNDGKAHFPREGVFVSNGTNWFVTQRNFYEPQIITTDNTFVSGNCDVVIGIVNNTVYDPLQPELDSFKEELDKYFKNHTSPDVDLGDISGINASVVNIQKEIDRLNEVAKNLNESLIDLQELGKYEQYIK

SEQ ID NO: 1885 - protein, 1211 aa, Artificial Sequence
  SARS-CoV-2/Guangdong/20SF028/2020__EPI_ISL_403936 spike protein (1-1211)(K986P_V987P_ H1048Q_H1064N_ H1083N_H1101N)
MFVFLVLLPLVSSQCVNLTTRTQLPPAYTNSFTRGVYYPDKVFRSSVLYSTQDLFLPFFSNVTWFHAIHVSGTNGTKRFDNPVLPFNDGVYFASTEKSNIIRGWIFGTTLDSKTQSLLIVNNATNVVIKVCEFQFCNDPFLGVYYHKNNKSWMESEFRVYSSANNCTFEYVSQPFLMDLEGKQGNFKNLREFVFKNIDGYFKIYSKHTPINLVRDLPQGFSALEPLVDLPIGINITRFQTLLALHRSYLTPGDSSSGWTAGAAAYYVGYLQPRTFLLKYNENGTITDAVDCALDPLSETKCTLKSFTVEKGIYQTSNFRVQPTESIVRFPNITNLCPFGEVFNATRFASVYAWNRKRISNCVADYSVLYNSASFSTFKCYGVSPTKLNDLCFTNVYADSFVIRGDEVRQIAPGQTGKIADYNYKLPDDFTGCVIAWNSNNLDSKVGGNYNYLYRLFRKSNLKPFERDISTEIYQAGSTPCNGVEGFNCYFPLQSYGFQPTNGVGYQPYRVVVLSFELLHAPATVCGPKKSTNLVKNKCVNFNFNGLTGTGVLTESNKKFLPFQQFGRDIADTTDAVRDPQTLEILDITPCSFGGVSVITPGTNTSNQVAVLYQDVNCTEVPVAIHADQLTPTWRVYSTGSNVFQTRAGCLIGAEHVNNSYECDIPIGAGICASYQTQTNSPRRARSVASQSIIAYTMSLGAENSVAYSNNSIAIPTNFTISVTTEILPVSMTKTSVDCTMYICGDSTECSNLLLQYGSFCTQLNRALTGIAVEQDKNTQEVFAQVKQIYKTPPIKDFGGFNFSQILPDPSKPSKRSFIEDLLFNKVTLADAGFIKQYGDCLGDIAARDLICAQKFNGLTVLPPLLTDEMIAQYTSALLAGTITSGWTFGAGAALQIPFAMQMAYRFNGIGVTQNVLYENQKLIANQFNSAIGKIQDSLSSTASALGKLQDVVNQNAQALNTLVKQLSSNFGAISSVLNDILSRLDPPEAEVQIDRLITGRLQSLQTYVTQQLIRAAEIRASANLAATKMSECVLGQSKRVDFCGKGYQLMSFPQSAPHGVVFLNVTYVPAQEKNFTTAPAICNDGKAHFPREGVFVSNGTNWFVTQRNFYEPQIITTDNTFVSGNCDVVIGIVNNTVYDPLQPELDSFKEELDKYFKNHTSPDVDLGDISGINASVVNIQKEIDRLNEVAKNLNESLIDLQELGKYEQYIK

SEQ ID NO: 1886 - protein, 1211 aa, Artificial Sequence
  SARS-CoV-2/Shenzhen/SZTH-001/2020__EPI_ISL_406592 spike protein (1-1211)(K986P_V987P_ H1048Q_H1064N_ H1083N_H1101N)
MFVFLVLLPLVSSQCVNLTTRTQLPPAYTNSFTRGVYYPDKVFRSSVLHSTQDLFLPFFSNVTWFHAIHVSGTNGTKRFDNPVLPFNDGVYFASTEKSNIIRGWIFGTTLDSKTQSLLIVNNATNVVIKVCEFQFCNDPFLGVYYHKNNKSWMESEFRVYSSANNCTFEYVSQPFLMDLEGKQGNFKNLREFVFKNIDGYFKIYSKHTPINLVRDLPQGFSALEPLVDLPIGINITRFQTLLALHRSYLTPGDSSSGWTAGAAAYYVGYLQPRTFLLKYNENGTITDAVDCALDPLSETKCTLKSFTVEKGIYQTSNFRVQPTESIVRFPNITNLCPFGEVFNATRFASVYAWNRKRISNCVADYSVLYNSASFSTFKCYGVSPTKLNDLCFTNVYADSFVIRGDEVRQIAPGQTGKIADYNYKLPDDFTGCVIAWNSNNLDSKVGGNYNYLYRLFRKSNLKPFERDISTEIYQAGSTPCNGVEGFNCYFPLQSYGFQPTNGVGYQPYRVVVLSFELLHAPATVCGPKKSTNLVKNKCVNFNFNGLTGTGVLTESNKKFLPFQQFGRDIADTTDAVRDPQTLEILDITPCSFGGVSVITPGTNTSNQVAVLYQDVNCTEVPVAIHADQLTPTWRVYSTGSNVFQTRAGCLIGAEHVNNSYECDIPIGAGICASYQTQTNSPRRARSVASQSIIAYTMSLGAENSVAYSNNSIAIPTNFTISVTTEILPVSMTKTSVDCTMYICGDSTECSNLLLQYGSFCTQLNRALTGIAVEQDKNTQEVFAQVKQIYKTPPIKDFGGFNFSQILPDPSKPSKRSFIEDLLFNKVTLADAGFIKQYGDCLGDIAARDLICAQKFNGLTVLPPLLTDEMIAQYTSALLAGTITSGWTFGAGAALQIPFAMQMAYRFNGIGVTQNVLYENQKLIANQFNSAIGKIQDSLSSTASALGKLQDVVNQNAQALNTLVKQLSSNFGAISSVLNDILSRLDPPEAEVQIDRLITGRLQSLQTYVTQQLIRAAEIRASANLAATKMSECVLGQSKRVDFCGKGYQLMSFPQSAPHGVVFLNVTYVPAQEKNFTTAPAICNDGKAHFPREGVFVSNGTNWFVTQRNFYEPQIITTDNTFVSGNCDVLIGIVNNTVYDPLQPELDSFKEELDKYFKNHTSPDVDLGDISGINASVVNIQKEIDRLNEVAKNLNESLIDLQELGKYEQYIK

SEQ ID NO: 1887 - protein, 1211 aa, Artificial Sequence
  SARS-CoV-2/Shenzhen/SZTH-004/2020__EPI_ISL_406595 spike protein (1-1211)(K986P_V987P_ H1048Q_H1064N_ H1083N_H1101N)
MFVFLVLLPLVSSQCVNLTTRTQLPPAYTNSFTRGVYYPDKVFRSSVLHSTQDLFLPFFSNVTWFHAIHVSGTNGTKRFDNPVLPFNDGVYFASTEKSNIIRGWIFGTTLDSKTQSLLIVNNATNVVIKVCEFQFCNDPFLGVYYHKNNKSWMESEFRVYSSANNCTFEYVSQPFLMDLEGKQGNFKNLREFVFKNIDGYFKIYSKHTPINLVRDLPQGFSALEPLVDLPIGINITRFQTLLALHRSYLTPGDSSSGWTAGAAAYYVGYLQPRTFLLKYNENGTITDAVDCALDPLSETKCTLKSFTVEKGIYQTSNFRVQPTESIVRFPNITNLCPFGEVFNATRFASVYAWDRKRISNCVAYYSVLYNSASFSTFKCYGVSPTKLNDLCFTNVYADSFVIRGDEVRQIAPGQTGKIADYNYKLPDDFTGCVIAWNSNNLDSKVGGNYNYLYRLFRKSNLKPFERDISTEIYQAGSTPCNGVEGFNCYFPLQSYGFQPTNGVGYQPYRVVVLSFELLHAPATVCGPKKSTNLVKNKCVNFNFNGLTGTGVLTESNKKFLPFQQFGRDIADTTDAVRDPQTLEILDITPCSFGGVSVITPGTNTSNQVAVLYQDVNCTEVPVAIHADQLTPTWRVYSTGSNVFQTRAGCLIGAEHVNNSYECDIPIGAGICASYQTQTNSPRRARSVASQSIIAYTMSLGAENSVAYSNNSIAIPTNFTISVTTEILPVSMTKTSVDCTMYICGDSTECSNLLLQYGSFCTQLNRALTGIAVEQDKNTQEVFAQVKQIYKTPPIKDFGGFNFSQILPDPSKPSKRSFIEDLLFNKVTLADAGFIKQYGDCLGDIAARDLICAQKFNGLTVLPPLLTDEMIAQYTSALLAGTITSGWTFGAGAALQIPFAMQMAYRFNGIGVTQNVLYENQKLIANQFNSAIGKIQDSLSSTASALGKLQDVVNQNAQALNTLVKQLSSNFGAISSVLNDILSRLDPPEAEVQIDRLITGRLQSLQTYVTQQLIRAAEIRASANLAATKMSECVLGQSKRVDFCGKGYQLMSFPQSAPHGVVFLNVTYVPAQEKNFTTAPAICNDGKAHFPREGVFVSNGTNWFVTQRNFYEPQIITTDNTFVSGNCDVVIGIVNNTVYDPLQPELDSFKEELDKYFKNHTSPDVDLGDISGINASVVNIQKEIDRLNEVAKNLNESLIDLQELGKYEQYIK

SEQ ID NO: 1888 - protein, 1211 aa, Artificial Sequence
  SARS-CoV-2/France/IDF0372/2020__EPI_ISL_406596 spike protein (1-1211)(K986P_V987P_ H1048Q_H1064N_ H1083N_H1101N)
MFVFLVLLPLVSSQCVNLTTRTQLPPAYTNSFTRGVYYPDKVFRSSVLHSTQDLFLPFFSNVTWFHAIHVSGTNGTKRFDNPVLPFNDGVYFASTEKSNIIRGWIFGTTLDSKTQSLLIVNNATNVVIKVCEFQFCNDPFLGVYYHKNNKSWMESEFRVYSSANNCTFEYVSQPFLMDLEGKQGNFKNLREFVFKNIDGYFKIYSKHTPINLVRDLPQGFSALEPLVDLPIGINITRFQTLLALHRSYLTPGDSSSGWTAGAAAYYVGYLQPRTFLLKYNENGTITDAVDCALDPLSETKCTLKSFTVEKGIYQTSNFRVQPTESIVRFPNITNLCPFGEVFNATRFASVYAWNRKRISNCVADYSFLYNSASFSTFKCYGVSPTKLNDLCFTNVYADSFVIRGDEVRQIAPGQTGKIADYNYKLPDDFTGCVIAWNSNNLDSKVGGNYNYLYRLFRKSNLKPFERDISTEIYQAGSTPCNGVEGFNCYFPLQSYGFQPTNGVGYQPYRVVVLSFELLHAPATVCGPKKSTNLVKNKCVNFNFNGLTGTGVLTESNKKFLPFQQFGRDIADTTDAVRDPQTLEILDITPCSFGGVSVITPGTNTSNQVAVLYQDVNCTEVPVAIHADQLTPTWRVYSTGSNVFQTRAGCLIGAEHVNNSYECDIPIGAGICASYQTQTNSPRRARSVASQSIIAYTMSLGAENSVAYSNNSIAIPTNFTISVTTEILPVSMTKTSVDCTMYICGDSTECSNLLLQYGSFCTQLNRALTGIAVEQDKNTQEVFAQVKQIYKTPPIKDFGGFNFSQILPDPSKPSKRSFIEDLLFNKVTLADAGFIKQYGDCLGDIAARDLICAQKFNGLTVLPPLLTDEMIAQYTSALLAGTITSGWTFGAGAALQIPFAMQMAYRFNGIGVTQNVLYENQKLIANQFNSAIGKIQDSLSSTASALGKLQDVVNQNAQALNTLVKQLSSNFGAISSVLNDILSRLDPPEAEVQIDRLITGRLQSLQTYVTQQLIRAAEIRASANLAATKMSECVLGQSKRVDFCGKGYQLMSFPQSAPHGVVFLNVTYVPAQEKNFTTAPAICNDGKAHFPREGVFVSNGTNWFVTQRNFYEPQIITTDNTFVSGNCDVVIGIVNNTVYDPLQPELDSFKEELDKYFKNHTSPDVDLGDISGINASVVNIQKEIDRLNEVAKNLNESLIDLQELGKYEQYIK

SEQ ID NO: 1889 - protein, 1211 aa, Artificial Sequence
  SARS-CoV-2/Australia/VIC01/2020__EPI_ISL_406844 spike protein (1-1211)(K986P_V987P_ H1048Q_H1064N_ H1083N_H1101N)
MFVFLVLLPLVSSQCVNLTTRTQLPPAYTNSFTRGVYYPDKVFRSSVLHSTQDLFLPFFSNVTWFHAIHVSGTNGTKRFDNPVLPFNDGVYFASTEKSNIIRGWIFGTTLDSKTQSLLIVNNATNVVIKVCEFQFCNDPFLGVYYHKNNKSWMESEFRVYSSANNCTFEYVSQPFLMDLEGKQGNFKNLREFVFKNIDGYFKIYSKHTPINLVRDLPQGFSALEPLVDLPIGINITRFQTLLALHRRYLTPGDSSSGWTAGAAAYYVGYLQPRTFLLKYNENGTITDAVDCALDPLSETKCTLKSFTVEKGIYQTSNFRVQPTESIVRFPNITNLCPFGEVFNATRFASVYAWNRKRISNCVADYSVLYNSASFSTFKCYGVSPTKLNDLCFTNVYADSFVIRGDEVRQIAPGQTGKIADYNYKLPDDFTGCVIAWNSNNLDSKVGGNYNYLYRLFRKSNLKPFERDISTEIYQAGSTPCNGVEGFNCYFPLQSYGFQPTNGVGYQPYRVVVLSFELLHAPATVCGPKKSTNLVKNKCVNFNFNGLTGTGVLTESNKKFLPFQQFGRDIADTTDAVRDPQTLEILDITPCSFGGVSVITPGTNTSNQVAVLYQDVNCTEVPVAIHADQLTPTWRVYSTGSNVFQTRAGCLIGAEHVNNSYECDIPIGAGICASYQTQTNSPRRARSVASQSIIAYTMSLGAENSVAYSNNSIAIPTNFTISVTTEILPVSMTKTSVDCTMYICGDSTECSNLLLQYGSFCTQLNRALTGIAVEQDKNTQEVFAQVKQIYKTPPIKDFGGFNFSQILPDPSKPSKRSFIEDLLFNKVTLADAGFIKQYGDCLGDIAARDLICAQKFNGLTVLPPLLTDEMIAQYTSALLAGTITSGWTFGAGAALQIPFAMQMAYRFNGIGVTQNVLYENQKLIANQFNSAIGKIQDSLSSTASALGKLQDVVNQNAQALNTLVKQLSSNFGAISSVLNDILSRLDPPEAEVQIDRLITGRLQSLQTYVTQQLIRAAEIRASANLAATKMSECVLGQSKRVDFCGKGYQLMSFPQSAPHGVVFLNVTYVPAQEKNFTTAPAICNDGKAHFPREGVFVSNGTNWFVTQRNFYEPQIITTDNTFVSGNCDVVIGIVNNTVYDPLQPELDSFKEELDKYFKNHTSPDVDLGDISGINASVVNIQKEIDRLNEVAKNLNESLIDLQELGKYEQYIK

SEQ ID NO: 1890 - protein, 1211 aa, Artificial Sequence
  SARS-CoV-2/Germany/BavPat1/2020__EPI_ISL_406862 spike protein (1-1211)(K986P_V987P_ H1048Q_H1064N_ H1083N_H1101N)
MFVFLVLLPLVSSQCVNLTTRTQLPPAYTNSFTRGVYYPDKVFRSSVLHSTQDLFLPFFSNVTWFHAIHVSGTNGTKRFDNPVLPFNDGVYFASTEKSNIIRGWIFGTTLDSKTQSLLIVNNATNVVIKVCEFQFCNDPFLGVYYHKNNKSWMESEFRVYSSANNCTFEYVSQPFLMDLEGKQGNFKNLREFVFKNIDGYFKIYSKHTPINLVRDLPQGFSALEPLVDLPIGINITRFQTLLALHRSYLTPGDSSSGWTAGAAAYYVGYLQPRTFLLKYNENGTITDAVDCALDPLSETKCTLKSFTVEKGIYQTSNFRVQPTESIVRFPNITNLCPFGEVFNATRFASVYAWNRKRISNCVADYSVLYNSASFSTFKCYGVSPTKLNDLCFTNVYADSFVIRGDEVRQIAPGQTGKIADYNYKLPDDFTGCVIAWNSNNLDSKVGGNYNYLYRLFRKSNLKPFERDISTEIYQAGSTPCNGVEGFNCYFPLQSYGFQPTNGVGYQPYRVVVLSFELLHAPATVCGPKKSTNLVKNKCVNFNFNGLTGTGVLTESNKKFLPFQQFGRDIADTTDAVRDPQTLEILDITPCSFGGVSVITPGTNTSNQVAVLYQGVNCTEVPVAIHADQLTPTWRVYSTGSNVFQTRAGCLIGAEHVNNSYECDIPIGAGICASYQTQTNSPRRARSVASQSIIAYTMSLGAENSVAYSNNSIAIPTNFTISVTTEILPVSMTKTSVDCTMYICGDSTECSNLLLQYGSFCTQLNRALTGIAVEQDKNTQEVFAQVKQIYKTPPIKDFGGFNFSQILPDPSKPSKRSFIEDLLFNKVTLADAGFIKQYGDCLGDIAARDLICAQKFNGLTVLPPLLTDEMIAQYTSALLAGTITSGWTFGAGAALQIPFAMQMAYRFNGIGVTQNVLYENQKLIANQFNSAIGKIQDSLSSTASALGKLQDVVNQNAQALNTLVKQLSSNFGAISSVLNDILSRLDPPEAEVQIDRLITGRLQSLQTYVTQQLIRAAEIRASANLAATKMSECVLGQSKRVDFCGKGYQLMSFPQSAPHGVVFLNVTYVPAQEKNFTTAPAICNDGKAHFPREGVFVSNGTNWFVTQRNFYEPQIITTDNTFVSGNCDVVIGIVNNTVYDPLQPELDSFKEELDKYFKNHTSPDVDLGDISGINASVVNIQKEIDRLNEVAKNLNESLIDLQELGKYEQYIK

SEQ ID NO: 1891 - protein, 1211 aa, Artificial Sequence
  SARS-CoV-2/Wuhan/HBCDC-HB-02/2020__EPI_ISL_412978 spike protein (1-1211)(K986P_V987P_ H1048Q_H1064N_ H1083N_H1101N)
MFVFLVLLPLVSSQCVNLTTRTQLPPAYTNSFTRGVYYPDKVFRSSVLHSTQDLFLPFFSNVTWFHAIHVSGTNGTKRFDNPVLPFNDGVYFASTEKSNIIRGWIFGTTLDSKTQSLLIVNNATNVVIKVCEFQFCNDPFLGVYYHKNNKSWMESEFRVYSSANNCTFEYVSQPFLMDLEGKQGNFKNLREFVFKNIDGYFKIYSKHTPINLVRDLPQGFSALEPLVDLPIGINITRFQTLLALHRSYLTPGDSSSGWTAGAAAYYVGYLQPRTFLLKYNENGTITDAVDCALDPLSETKCTLKSFTVEKGIYQTSNFRVQPTESIVRFPNITNLCPFGEVFNATRFASVYAWNRKRISNCVADYSVLYNSASFSTFKCYGVSPTKLNDLCFTNVYADSFVIRGDEVRQIAPGQTGKIADYNYKLPDDFTGCVIAWNSNNLDSKVGGNYNYLYRLFRKSNLKPFERDISTEIYQAGSTPCNGVEGFNCYFPLQSYGFQPTNGVGYQPYRVVVLSFELLHAPATVCGPKKSTNLVKNKCVNFNFNGLTGTGVLTESNKKFLPFQQFGRDIADTTDAVRDPQTLEILDITPCSFGGVSVITPGTNTSNQVAVLYQDVNCTEVPVAIHADQLTPTWRVYSTGSNVFQTRAGCLIGAEHVNNSYECDIPIGAGICASYQTQTNSPRRARSVASQSIIAYTMSLGAENSVAYSNNSIAIPTNFTISVTTEILPVSMTKTSVDCTMYICGDSTECSNFLLQYGSFCTQLNRALTGIAVEQDKNTQEVFAQVKQIYKTPPIKDFGGFNFSQILPDPSKPSKRSFIEDLLFNKVTLADAGFIKQYGDCLGDIAARDLICAQKFNGLTVLPPLLTDEMIAQYTSALLAGTITSGWTFGAGAALQIPFAMQMAYRFNGIGVTQNVLYENQKLIANQFNSAIGKIQDSLSSTASALGKLQDVVNQNAQALNTLVKQLSSNFGAISSVLNDILSRLDPPEAEVQIDRLITGRLQSLQTYVTQQLIRAAEIRASANLAATKMSECVLGQSKRVDFCGKGYQLMSFPQSAPHGVVFLNVTYVPAQEKNFTTAPAICNDGKAHFPREGVFVSNGTNWFVTQRNFYEPQIITTDNTFVSGNCDVVIGIVNNTVYDPLQPELDSFKEELDKYFKNHTSPDVDLGDISGINASVVNIQKEIDRLNEVAKNLNESLIDLQELGKYEQYIK

SEQ ID NO: 1892 - protein, 1211 aa, Artificial Sequence
  SARS-CoV-2/Australia/QLD02/2020__EPI_ISL_407896 spike protein (1-1211)(K986P_V987P_ H1048Q_H1064N_ H1083N_H1101N)
MFVFLVLLPLVSSQCVNLTTRTQLPPAYTNSFTRGVYYPDKVFRSSVLHSTQDLFLPFFSNVTWFHAIHVSGTNGTKRFDNPVLPFNDGVYFASTEKSNIIRGWIFGTTLDSKTQSLLIVNNATNVVIKVCEFQFCNDPFLGVYYHKNNKSWMESEFRVYSSANNCTFEYVSQPFLMDLEGKQGNFKNLREFVFKNIDGYFKIYSKHTPINLVRDLPQGFSALEPLVDLPIGINITRFQTLLALHRSYLTPGDSSSGWTAGAAAYYVGYLQPRTFLLKYNENGTITDAVDCALDPLSETKCTLKSFTVEKGIYQTSNFRVQPTESIVRFPNITNLCPFGEVFNATRFASVYAWNRKRISNCVADYSVLYNSASFSTFKCYGVSPTKLNDLCFTNVYADSFVIRGDEVRQIAPGQTGKIADYNYKLPDDFTGCVIAWNSNNLDSKVGGNYNYLYRLFRKSNLKPFERDISTEIYQAGSTPCNGVEGFNCYFPLQSYGFQPTNGVGYQPYRVVVLSFELLHAPATVCGPKKSTNLVKNKCVNFNFNGLTGTGVLTESNKKFLPFQQFGRDIADTTDAVRDPQTLEILDITPCSFGGVSVITPGTNTSNQVAVLYQDVNCTEVPVAIHADQLTPTWRVYSTGSNVFQTRAGCLIGAEHVNNSYECDIPIGAGICASYQTQTNSPRRARSVASQSIIAYTMSLGAENSVAYSNNSIAIPTNFTISVTTEILPVSMTKTSVDCTMYICGDSTECSNLLLQYGSFCTQLNRALTGIAVEQDKNTQEVFAQVKQIYKTPPIKDFGGFNFSQILPDPSKPSKRSFIEDLLFNKVTLADAGFIKQYGDCLGDIAARDLICAQKFNGLTVLPPLLTDEMIAQYTSALLAGTITSGWTFGAGAALQIPFAMQMAYRFNGIGVTQNVLYENQKLIANQFNSAIGKIQDSLSSTASALGKLQDVVNQNAQALNTLVKQLSSNFGAISSVLNDILSRLDPPEAEVQIDRLITGRLQSLQTYVTQQLIRAAEIRASANLAATKMSECVLGQSKRVDFCGKGYQLMSFPQSAPHGVVFLNVTYVPAQEKNFTTAPAICNDGKAHFPREGVFVSNGTNWFVTQRNFYEPQIITTDNTFVSGNCDVVIGIVNNTVYDPLQLELDSFKEELDKYFKNHTSPDVDLGDISGINASVVNIQKEIDRLNEVAKNLNESLIDLQELGKYEQYIK

SEQ ID NO: 1893 - protein, 1211 aa, Artificial Sequence
  SARS-CoV-2/India/1-31/2020__EPI_ISL_413523 spike protein (1-1211)(K986P_V987P_ H1048Q_H1064N_ H1083N_H1101N)
MFVFLVLLPLVSSQCVNLTTRTQLPPAYTNSFTRGVYYPDKVFRSSVLHSTQDLFLPFFSNVTWFHAIHVSGTNGTKRFDNPVLPFNDGVYFASTEKSNIIRGWIFGTTLDSKTQSLLIVNNATNVVIKVCEFQFCNDPFLGVYYHKNNKSWMESEFRVYSSANNCTFEYVSQPFLMDLEGKQGNFKNLREFVFKNIDGYFKIYSKHTPINLVRDLPQGFSALEPLVDLPIGINITRFQTLLALHRSYLTPGDSSSGWTAGAAAYYVGYLQPRTFLLKYNENGTITDAVDCALDPLSETKCTLKSFTVEKGIYQTSNFRVQPTESIVRFPNITNLCPFGEVFNATRFASVYAWNRKRISNCVADYSVLYNSASFSTFKCYGVSPTKLNDLCFTNVYADSFVIRGDEVRQIAPGQTGKIADYNYKLPDDFTGCVIAWNSNNLDSKVGGNYNYLYRLFRKSNLKPFERDISTEIYQAGSTPCNGVEGFNCYFPLQSYGFQPTNGVGYQPYRVVVLSFELLHAPATVCGPKKSTNLVKNKCVNFNFNGLTGTGVLTESNKKFLPFQQFGRDIADTTDAVRDPQTLEILDITPCSFGGVSVITPGTNTSNQVAVLYQDVNCTEVPVAIHADQLTPTWRVYSTGSNVFQTRAGCLIGAEHVNNSYECDIPIGAGICASYQTQTNSPRRARSVASQSIIAYTMSLGAENSVAYSNNSIAIPTNFTISVTTEILPVSMTKTSVDCTMYICGDSTECSNLLLQYGSFCTQLNRALTGIAVEQDKNTQEVFAQVKQIYKTPPIKDFGGFNFSQILPDPSKPSKRSFIEDLLFNKVTLADAGFIKQYGDCLGDIAARDLICAQKFNGLTVLPPLLTDEMIAQYTSALLAGTITSGWTFGAGAALQIPFAMQMAYRFNGIGVTQNVLYENQKLIANQFNSVIGKIQDSLSSTASALGKLQDVVNQNAQALNTLVKQLSSNFGAISSVLNDILSRLDPPEAEVQIDRLITGRLQSLQTYVTQQLIRAAEIRASANLAATKMSECVLGQSKRVDFCGKGYQLMSFPQSAPHGVVFLNVTYVPAQEKNFTTAPAICNDGKAHFPREGVFVSNGTNWFVTQRNFYEPQIITTDNTFVSGNCDVVIGIVNNTVYDPLQPELDSFKEELDKYFKNHTSPDVDLGDISGINASVVNIQKEIDRLNEVAKNLNESLIDLQELGKYEQYIK

SEQ ID NO: 1894 - protein, 1211 aa, Artificial Sequence
  SARS-CoV-2/Guangdong/GD2020087-P0008/2020__EPI_ISL_413863 spike protein (1-1211)(K986P_V987P_ H1048Q_H1064N_ H1083N_H1101N)
MFVFLVLLPLVSSQCVNLTTRTQLPPAYTNSFTRGVYYPDKVFRSSVLHSTQDLFLPFFSNVTWFHAIHVSGTNGTKRFDNPVLPFNDGVYFASTEKSNIIRGWIFGTTLDSKTQSLLIVNNATNVVIKVCEFQFCNDPFLGVYYHKNNKSWMESEFRVYSSANNCTFEYVSQPFLMDLEGKQGNFKNLREFVFKNIDGYFKIYSKHTPINLVRDLPQGFSALEPLVDLPIGINITRFQTLLALHRSYLTPGDSSSGWTAGAAAYYVGYLQPRTFLLKYNENGTITDAVDCALDPLSETKCTLKSFTVEKGIYQTSNFRVQPTESIVRFPNITNLCPFGEVFNATRFASVYAWNRKRISNCVADYSVLYNSASFSTFKCYGVSPTKLNDLCFTNVYADSFVIRGDEVREIAPGQTGKIADYNYKLPDDFTGCVIAWNSNNLDSKVGGNYNYLYRLFRKSNLKPFERDISTEIYQAGSTPCNGVEGFNCYFPLQSYGFQPTNGVGYQPYRVVVLSFELLHAPATVCGPKKSTNLVKNKCVNFNFNGLTGTGVLTESNKKFLPFQQFGRDIADTTDAVRDPQTLEILDITPCSFGGVSVITPGTNTSNQVAVLYQDVNCTEVPVAIHADQLTPTWRVYSTGSNVFQTRAGCLIGAEHVNNSYECDIPIGAGICASYQTQTNSPRRARSVASQSIIAYTMSLGAENSVAYSNNSIAIPTNFTISVTTEILPVSMTKTSVDCTMYICGDSTECSNLLLQYGSFCTQLNRALTGIAVEQDKNTQEVFAQVKQIYKTPPIKDFGGFNFSQILPDPSKPSKRSFIEDLLFNKVTLADAGFIKQYGDCLGDIAARDLICAQKFNGLTVLPPLLTDEMIAQYTSALLAGTITSGWTFGAGAALQIPFAMQMAYRFNGIGVTQNVLYENQKLIANQFNSAIGKIQDSLSSTASALGKLQDVVNQNAQALNTLVKQLSSNFGAISSVLNDILSRLDPPEAEVQIDRLITGRLQSLQTYVTQQLIRAAEIRASANLAATKMSECVLGQSKRVDFCGKGYQLMSFPQSAPHGVVFLNVTYVPAQEKNFTTAPAICNDGKAHFPREGVFVSNGTNWFVTQRNFYEPQIITTDNTFVSGNCDVVIGIVNNTVYDPLQPELDSFKEELDKYFKNHTSPDVDLGDISGINASVVNIQKEIDRLNEVAKNLNESLIDLQELGKYEQYIK

SEQ ID NO: 1895 - protein, 1211 aa, Artificial Sequence
  SARS-CoV-2/Sweden/01/2020__EPI_ISL_411951 spike protein (1-1211)(K986P_V987P_ H1048Q_H1064N_ H1083N_H1101N)
MFVFLVLLPLVSSQCVNLTTRTQLPPAYTNSFTRGVYYPDKVFRSSVLHSTQDLFLPFFSNVTWFHAIHVSGTNGTKRFDNPVLPFNDGVYFASTEKSNIIRGWIFGTTLDSKTQSLLIVNNATNVVIKVCEFQFCNDPFLGVYYHKNNKSWMESEFRVYSSANNCTFEYVSQPFLMDLEGKQGNFKNLREFVFKNIDGYFKIYSKHTPINLVRDLPQGFSALEPLVDLPIGINITRFQTLLALHRSYLTPGDSSSGWTAGAAAYYVGYLQPRTFLLKYNENGTITDAVDCALDPLSETKCTLKSFTVEKGIYQTSNFRVQPTESIVRFPNITNLCPFGEVFNATRFASVYAWNRKRISNCVADYSVLYNSASFSTFKCYGVSPTKLNDLCFTNVYADSFVIRGDEVRQIAPGQTGKIADYNYKLPDDFTGCVIAWNSNNLDSKVGGNYNYLYRLFRKSNLKPFERDISTEIYQAGSTPCNGVEGFNCYFPLQSYGFQPTNGVGYQPYRVVVLSFELLHAPATVCGPKKSTNLVKNKCVNFNFNGLTGTGVLTESNKKFLPFQQFGRDIADTTDAVRDPQTLEILDITPCSFGGVSVITPGTNTSNQVAVLYQDVNCTEVPVAIHADQLTPTWRVYSTGSNVFQTRAGCLIGAEHVNNSYECDIPIGAGICASYQTQTNSPRRARSVASQSIIAYTMSLGAENSVAYSNNSIAIPTNFTISVTTEILPVSMTKTSVDCTMYICGDSTECSNLLLQYGSFCTQLNRALTGIAVEQDKNTQEVFAQVKQIYKTPPIKDCGGFNFSQILPDPSKPSKRSFIEDLLFNKVTLADAGFIKQYGDCLGDIAARDLICAQKFNGLTVLPPLLTDEMIAQYTSALLAGTITSGWTFGAGAALQIPFAMQMAYRFNGIGVTQNVLYENQKLIANQFNSAIGKIQDSLSSTASALGKLQDVVNQNAQALNTLVKQLSSNFGAISSVLNDILSRLDPPEAEVQIDRLITGRLQSLQTYVTQQLIRAAEIRASANLAATKMSECVLGQSKRVDFCGKGYQLMSFPQSAPHGVVFLNVTYVPAQEKNFTTAPAICNDGKAHFPREGVFVSNGTNWFVTQRNFYEPQIITTDNTFVSGNCDVVIGIVNNTVYDPLQPELDSFKEELDKYFKNHTSPDVDLGDISGINASVVNIQKEIDRLNEVAKNLNESLIDLQELGKYEQYIK

SEQ ID NO: 1896 - protein, 1211 aa, Artificial Sequence
  SARS-CoV-2/Tianmen/HBCDC-HB-07/2020__EPI_ISL_412983 spike protein (1-1211)(K986P_V987P_ H1048Q_H1064N_ H1083N_H1101N)
MFVFLVLLPLVSSQCVNLTTRTQLPPAYTNSFTRGVYYPDKVFRSSVLHSTQDLFLPFFSNVTWFHAIHVSGTNGTKRFDNPVLPFNDGVYFASTEKSNIIRGWIFGTTLDSKTQSLLIVNNATNVVIKVCEFQFCNDPFLGVYYHKNNKSWMESEFRVYSSANNCTFEYVSQPFLMDLEGKQGNFKNLREFVFKNIDGYFKIYSKHTPINLVRDLPQGFSALEPLVDLPIGINITRFQTLLALHRSYLTPGDSSSGWTAGAAAYYVGYLQPRTFLLKYNENGTITDAVDCALDPLSETKCTLKSFTVEKGIYQTSNFRVQPTESIVRFPNITNLCPFGEVFNATRFASVYAWNRKRISNCVADYSVLYNSASFSTFKCYGVSPTKLNDLCFTNVYADSFVIRGDEVRQIAPGQTGKIADYNYKLPDDFTGCVIAWNSNNLDSKVGGNYNYLYRLFRKSNLKPFERDISTEIYQAGSTPCNGVEGFNCYFPLQSYGFQPTNGVGYQPYRVVVLSFELLHAPATVCGPKKSTNLVKNKCVNFNFNGLTGTGVLTESNKKFLPFQQFGRDIADTTDAVRDPQTLEILDITPCSFGGVSVITPGTNTSNQVAVLYQDLNCTEVPVAIHADQLTPTWRVYSTGSNVFQTRAGCLIGAEHVNNSYECDIPIGAGICASYQTQTNSPRRARSVASQSIIAYTMSLGAENSVAYSNNSIAIPTNFTISVTTEILPVSMTKTSVDCTMYICGDSTECSNLLLQYGSFCTQLNRALTGIAVEQDKNTQEVFAQVKQIYKTPPIKDFGGFNFSQILPDPSKPSKRSFIEDLLFNKVTLADAGFIKQYGDCLGDIAARDLICAQKFNGLTVLPPLLTDEMIAQYTSALLAGTITSGWTFGAGAALQIPFAMQMAYRFNGIGVTQNVLYENQKLIANQFNSAIGKIQDSLSSTASALGKLQDVVNQNAQALNTLVKQLSSNFGAISSVLNDILSRLDPPEAEVQIDRLITGRLQSLQTYVTQQLIRAAEIRASANLAATKMSECVLGQSKRVDFCGKGYQLMSFPQSAPHGVVFLNVTYVPAQEKNFTTAPAICNDGKAHFPREGVFVSNGTNWFVTQRNFYEPQIITTDNTFVSGNCDVVIGIVNNTVYDPLQPELDSFKEELDKYFKNHTSPDVDLGDISGINASVVNIQKEIDRLNEVAKNLNESLIDLQELGKYEQYIK

SEQ ID NO: 1897 - protein, 1211 aa, Artificial Sequence
  SARS-CoV-2/Hong Kong/case42_VM20002493/2020__EPI_ISL_414527 spike protein (1-1211)(K986P_V987P_ H1048Q_H1064N_ H1083N_H1101N)
MFVFLVLLPLVSSQCVNLTTRTQLPPAYTNSFTRGVYYPDKVFRSSVLHSTQDLFLPFFSNVTWFHAIHVSGTNGTKRFDNPVLPFNDGVYFASTEKSNIIRGWIFGTTLDSKTQSLLIVNNATNVVIKVCEFQFCNDPFLGVYYHKNNKSWMESEFRVYSSANNCTFEYVSQPFLMDLEGKQGNFKNLREFVFKNIDGYFKIYSKHTPINLVRDLPQGFSALEPLVDLPIGINITRFQTLLALHRSYLTPGDSSSGWTAGAAAYYVGYLQPRTFLLKYNENGTITDAVDCALDPLSETKCTLKSFTVEKGIYQTSNFRVQPTESIVRFPNITNLCPFGEVFNATRFASVYAWNRKRISNCVADYSVLYNSASFSTFKCYGVSPTKLNDLCFTNVYADSFVIRGDEVRQIAPGQTGKIADYNYKLPDDFTGCVIAWNSNNLDSKVGGNYNYLYRLFRKSNLKPFERDISTEIYQAGSTPCNGVEGFNCYFPLQSYGFQPTNGVGYQPYRVVVLSFELLHAPATVCGPKKSTNLVKNKCVNFNFNGLTGTGVLTESNKKFLPFQQFGRDIADTTDAVRDPQTLEILDITPCSFGGVSVITPGTNTSNQVAVLYQDVNCTEVPVAIHADQLTPTWRVYSTGSNVFQTRAGCLIGAEHVNNSYECDIPIGAGICASYQTQTNSPRRARSVASQSIIAYTMSLGAENSVAYSNNSIAIPTNFAISVTTEILPVSMTKTSVDCTMYICGDSTECSNLLLQYGSFCTQLNRALTGIAVEQDKNTQEVFAQVKQIYKTPPIKDFGGFNFSQILPDPSKPSKRSFIEDLLFNKVTLADAGFIKQYGDCLGDIAARDLICAQKFNGLTVLPPLLTDEMIAQYTSALLAGTITSGWTFGAGAALQIPFAMQMAYRFNGIGVTQNVLYENQKLIANQFNSAIGKIQDSLSSTASALGKLQDVVNQNAQALNTLVKQLSSNFGAISSVLNDILSRLDPPEAEVQIDRLITGRLQSLQTYVTQQLIRAAEIRASANLAATKMSECVLGQSKRVDFCGKGYQLMSFPQSAPHGVVFLNVTYVPAQEKNFTTAPAICNDGKAHFPREGVFVSNGTNWFVTQRNFYEPQIITTDNTFVSGNCDVVIGIVNNTVYDPLQPELDSFKEELDKYFKNHTSPDVDLGDISGINASVVNIQKEIDRLNEVAKNLNESLIDLQELGKYEQYIK

SEQ ID NO: 1898 - protein, 1211 aa, Artificial Sequence
  SARS-CoV-2/USA/CruiseA-23/2020__EPI_ISL_414482 spike protein (1-1211)(K986P_V987P_ H1048Q_H1064N_ H1083N_H1101N)
MFVFLVLLPLVSSQCVNLTTRTQLPPAYTNSFTRGVYYPDKVFRSSVLHSTQDLFLPFFSNVTWFHAIHVSGTNGTKRFDNPVLPFNDGVYFASTEKSNIIRGWIFGTTLDSKTQSLLIVNNATNVVIKVCEFQFCNDPFLGVYYHKNNKSWMESEFRVYSSANNCTFEYVSQPFLMDLEVKQGNFKNLREFVFKNIDGYFKIYSKHTPINLVRDLPQGFSALEPLVDLPIGINITRFQTLLALHRSYLTPGDSSSGWTAGAAAYYVGYLQPRTFLLKYNENGTITDAVDCALDPLSETKCTLKSFTVEKGIYQTSNFRVQPTESIVRFPNITNLCPFGEVFNATRFASVYAWNRKRISNCVADYSVLYNSASFSTFKCYGVSPTKLNDLCFTNVYADSFVIRGDEVRQIAPGQTGKIADYNYKLPDDFTGCVIAWNSNNLDSKVGGNYNYLYRLFRKSNLKPFERDISTEIYQAGSTPCNGVEGFNCYFPLQSYGFQPTNGVGYQPYRVVVLSFELLHAPATVCGPKKSTNLVKNKCVNFNFNGLTGTGVLTESNKKFLPFQQFGRDIADTTDAVRDPQTLEILDITPCSFGGVSVITPGTNTSNQVAVLYQDVNCTEVPVAIHADQLTPTWRVYSTGSNVFQTRAGCLIGAEHVNNSYECDIPIGAGICASYQTQTNSPRRARSVASQSIIAYTMSLGAENSVAYSNNSIAIPTNFTISVTTEILPVSMTKTSVDCTMYICGDSTECSNLLLQYGSFCTQLNRALTGIAVEQDKNTQEVFAQVKQIYKTPPIKDFGGFNFSQILPDPSKPSKRSFIEDLLFNKVTLADAGFIKQYGDCLGDIAARDLICAQKFNGLTVLPPLLTDEMIAQYTSALLAGTITSGWTFGAGAALQIPFAMQMAYRFNGIGVTQNVLYENQKLIANQFNSAIGKIQDSLSSTASALGKLQDVVNQNAQALNTLVKQLSSNFGAISSVLNDILSRLDPPEAEVQIDRLITGRLQSLQTYVTQQLIRAAEIRASANLAATKMSECVLGQSKRVDFCGKGYQLMSFPQSAPHGVVFLNVTYVPAQEKNFTTAPAICNDGKAHFPREGVFVSNGTNWFVTQRNFYEPQIITTDNTFVSGNCDVVIGIVNNTVYDPLQPELDSFKEELDKYFKNHTSPDVDLGDISGINASVVNIQKEIDRLNEVAKNLNESLIDLQELGKYEQYIK

SEQ ID NO: 1899 - protein, 1211 aa, Artificial Sequence
  SARS-CoV-2/Hong Kong/case85_VM20002868/2020__EPI_ISL_414519 spike protein (1-1211)(K986P_V987P_ H1048Q_H1064N_ H1083N_H1101N)
MFVFLVLVPLVSSQCVNLTTRTQLPPAYTNSFTRGVYYPDKVFRSSVLHSTQDLFLPFFSNVTWFHAIHVSGTNGTKRFDNPVLPFNDGVYFASTEKSNIIRGWIFGTTLDSKTQSLLIVNNATNVVIKVCEFQFCNDPFLGVYYHKNNKSWMESEFRVYSSANNCTFEYVSQPFLMDLEGKQGNFKNLREFVFKNIDGYFKIYSKHTPINLVRDLPQGFSALEPLVDLPIGINITRFQTLLALHRSYLTPGDSSSGWTAGAAAYYVGYLQPRTFLLKYNENGTITDAVDCALDPLSETKCTLKSFTVEKGIYQTSNFRVQPTESIVRFPNITNLCPFGEVFNATRFASVYAWNRKRISNCVADYSVLYNSASFSTFKCYGVSPTKLNDLCFTNVYADSFVIRGDEVRQIAPGQTGKIADYNYKLPDDFTGCVIAWNSNNLDSKVGGNYNYLYRLFRKSNLKPFERDISTEIYQAGSTPCNGVEGFNCYFPLQSYGFQPTNGVGYQPYRVVVLSFELLHAPATVCGPKKSTNLVKNKCVNFNFNGLTGTGVLTESNKKFLPFQQFGRDIADTTDAVRDPQTLEILDITPCSFGGVSVITPGTNTSNQVAVLYQDVNCTEVPVAIHADQLTPTWRVYSTGSNVFQTRAGCLIGAEHVNNSYECDIPIGAGICASYQTQTNSPRRARSVASQSIIAYTMSLGAENSVAYSNNSIAIPTNFTISVTTEILPVSMTKTSVDCTMYICGDSTECSNLLLQYGSFCTQLNRALTGIAVEQDKNTQEVFAQVKQIYKTPPIKDFGGFNFSQILPDPSKPSKRSFIEDLLFNKVTLADAGFIKQYGDCLGDIAARDLICAQKFNGLTVLPPLLTDEMIAQYTSALLAGTITSGWTFGAGAALQIPFAMQMAYRFNGIGVTQNVLYENQKLIANQFNSAIGKIQDSLSSTASALGKLQDVVNQNAQALNTLVKQLSSNFGAISSVLNDILSRLDPPEAEVQIDRLITGRLQSLQTYVTQQLIRAAEIRASANLAATKMSECVLGQSKRVDFCGKGYQLMSFPQSAPHGVVFLNVTYVPAQEKNFTTAPAICNDGKAHFPREGVFVSNGTNWFVTQRNFYEPQIITTDNTFVSGNCDVVIGIVNNTVYDPLQPELDSFKEELDKYFKNHTSPDVDLGDISGINASVVNIQKEIDRLNEVAKNLNESLIDLQELGKYEQYIK

SEQ ID NO: 1900 - protein, 1211 aa, Artificial Sequence; identical to SEQ ID NO: 1890
  SARS-CoV-2/England/200990660/2020__EPI_ISL_414523 spike protein (1-1211)(K986P_V987P_ H1048Q_H1064N_ H1083N_H1101N)

SEQ ID NO: 1901 - protein, 1211 aa, Artificial Sequence
  SARS-CoV-2/Australia/NSW09/2020__EPI_ISL_413595 spike protein (1-1211)(K986P_V987P_ H1048Q_H1064N_ H1083N_H1101N)
MFVFLVLLPLVSSQCVNLTTRTQLPPAYTNSFTRGVYYPDKVFRSSVLHSTQDLFLPFFSNVTWFHAIHVSGTNGTKRFDNPVLPFNDGVYFASTEKSNIIRGWIFGTTLDSKTQSLLIVNNATNVVIKVCEFQFCNDPFLGVYYHKNNKSWMESEFRVYSSANNCTFEYVSQPFLMDLEGKQGNFKNLREFVFKNIDGYFKIYSKHTPINLVRDLPQGFSALEPLVDLPIGINITRFQTLLALHRSYLTPGDSSSGWTAGAAAYYVGYLQPRTFLLKYNENGTITDAVDCALDPLSETKCTLKSFTVEKGIYQTSNFRVQPTESIVRFPNITNLCPFGEVFNATRFASVYAWNRKRISNCVADYSVLYNSASFSTFKCYGVSPTKLNDLCFTNVYADSFVIRGDEVRQIAPGQTGKIADYNYKLPDDFTGCVIAWNSNNLDSKVGGNYNYLYRLFRKSNLKPFERDISTEIYQAGSTPCNGVEGFNCYFPLQSYGFQPTNGVGYQPYRVVVLSFELLHAPATVCGPKKSTNLVKNKCVNFNFNGLTGTGVLTESNKKFLPFQQFGRDIADTTDAVRDPQTLEILDITPCSFGGVSVITPGTNTSNQVAVLYQDVNCTEVPVAIHADQLTPTWRVYSTGSNVFQTRAGCLIGAEHVNNSYECDIPIGAGICASYQTQTNSPRRARSVASQSIIAYTMSLGAENSVAYSNNSIAIPTNFTISVTTEILPVSMTKTSVDCTMYICGDSTECSNLLLQYGSFCTQLNRALTGIAVEQDKNTQEVFAQVKQIYKTPPIKDFGGFNFSQILPDPSKPSKRSFIEDLLFNKVTLADAGFIKQYGDCLGDIAARDLICAQKFNGLTVLPPLLTDEMIAQYTSALLAGTITSGWTFGAGAALQIPFAMQMAYRFNGIGVTQNVLYENQKLIANQFNSAIGKIQDSLSFTASALGKLQDVVNQNAQALNTLVKQLSSNFGAISSVLNDILSRLDPPEAEVQIDRLITGRLQSLQTYVTQQLIRAAEIRASANLAATKMSECVLGQSKRVDFCGKGYQLMSFPQSAPHGVVFLNVTYVPAQEKNFTTAPAICNDGKAHFPREGVFVSNGTNWFVTQRNFYEPQIITTDNTFVSGNCDVVIGIVNNTVYDPLQPELDSFKEELDKYFKNHTSPDVDLGDISGINASVVNIQKEIDRLNEVAKNLNESLIDLQELGKYEQYIK

SEQ ID NO: 1902 - protein, 1211 aa, Artificial Sequence; identical to SEQ ID NO: 1882
  SARS-CoV-2/Australia/NSW10/2020__EPI_ISL_413596 spike protein (1-1211)(K986P_V987P_ H1048Q_H1064N_ H1083N_H1101N)

SEQ ID NO: 1903 - protein, 1211 aa, Artificial Sequence
  SARS-CoV-2/Switzerland/1000477797/2020__EPI_ISL_413023 spike protein (1-1211)(K986P_V987P_ H1048Q_H1064N_ H1083N_H1101N)
MFVFLVLLPLVSSQCVNLTTRTQLPPAYTNSFTRGVYYPDKVFRSSVLHSTQDLFLPFFSNVTWFHAIHVSGTNGTKRFDNPVLPFNDGVYFASTEKSNIIRGWIFGTTLDSKTQSLLIVNNATNVVIKVCEFQFCNDPFLGVYYHKNNKSWMESEFRVYSSANNCTFEYVSQPFLMDLEGKQGNFKNLREFVFKNIDGYFNIYSKHTPINLVRDLPQGFSALEPLVDLPIGINITRFQTLLALHRSYLTPGDSSSGWTAGAAAYYVGYLQPRTFLLKYNENGTITDAVDCALDPLSETKCTLKSFTVEKGIYQTSNFRVQPTESIVRFPNITNLCPFGEVFNATRFASVYAWNRKRISNCVADYSVLYNSASFSTFKCYGVSPTKLNDLCFTNVYADSFVIRGDEVRQIAPGQTGKIADYNYKLPDDFTGCVIAWNSNNLDSKVGGNYNYLYRLFRKSNLKPFERDISTEIYQAGSTPCNGVEGFNCYFPLQSYGFQPTNGVGYQPYRVVVLSFELLHAPATVCGPKKSTNLVKNKCVNFNFNGLTGTGVLTESNKKFLPFQQFGRDIADTTDAVRDPQTLEILDITPCSFGGVSVITPGTNTSNQVAVLYQGVNCTEVPVAIHADQLTPTWRVYSTGSNVFQTRAGCLIGAEHVNNSYECDIPIGAGICASYQTQTNSPRRARSVASQSIIAYTMSLGAENSVAYSNNSIAIPTNFTISVTTEILPVSMTKTSVDCTMYICGDSTECSNLLLQYGSFCTQLNRALTGIAVEQDKNTQEVFAQVKQIYKTPPIKDFGGFNFSQILPDPSKPSKRSFIEDLLFNKVTLADAGFIKQYGDCLGDIAARDLICAQKFNGLTVLPPLLTDEMIAQYTSALLAGTITSGWTFGAGAALQIPFAMQMAYRFNGIGVTQNVLYENQKLIANQFNSAIGKIQDSLSSTASALGKLQDVVNQNAQALNTLVKQLSSNFGAISSVLNDILSRLDPPEAEVQIDRLITGRLQSLQTYVTQQLIRAAEIRASANLAATKMSECVLGQSKRVDFCGKGYQLMSFPQSAPHGVVFLNVTYVPAQEKNFTTAPAICNDGKAHFPREGVFVSNGTNWFVTQRNFYEPQIITTDNTFVSGNCDVVIGIVNNTVYDPLQPELDSFKEELDKYFKNHTSPDVDLGDISGINASVVNIQKEIDRLNEVAKNLNESLIDLQELGKYEQYIK

SEQ ID NO: 1904 - protein, 1211 aa, Artificial Sequence
  SARS-CoV-2/Belgium/BA-02291/2020__EPI_ISL_415159 spike protein (1-1211)(K986P_V987P_ H1048Q_H1064N_ H1083N_H1101N)
MFVFLVLLPLVSSQCVNLTTRTQLPPAYTNSFTRGVYYPDKVFRSSVLHSTQDLFLPFFSNVTWFHAIHVSGTNGTKRFDNPVLPFNDGVYFASTEKSNIIRGWIFGTTLDSKTQSLLIVNNATNVVIKVCEFQFCNDPFLGVYYHKNNKSWMESEFRVYSSANNCTFEYVSQPFLMDLEGKQGNFKNLREFVFKNIDGYFKIYSKHTPINLVRDLPQGFSALEPLVDLPIGINITRFQTLLALHRSYLTPGDSSSGWTAGAAAYYVGYLQPRTFLLKYNENGTITDAVDCALDPLSETKCTLKSFTVEKGIYQTSNFRVQPTESIVRFPNITNLCPFGEVFNATRFASVYAWNRKRISNCVADYSVLYNSASFSTFKCYGVSPTKLNDLCFTNVYADSFVIRGDEVRQIAPGQTGKIADYNYKLPDDFTGCVIAWNSNNLDSKVGGNYNYLYRLFRRSNLKPFERDISTEIYQAGSTPCNGVEGFNCYFPLQSYGFQPTNGVGYQPYRVVVLSFELLPAPATVCGPKKSTNLVKNKCVNFNFNGLTGTGVLTESNKKFLPFQQFGRDIADTTDAVRDPQTLEILDITPCSFGGVSVITPGTNTSNQVAVLYQGVNCTEVPVAIHADQLTPTWRVYSTGSNVFQTRAGCLIGAEHVNNSYECDIPIGAGICASYQTQTNSPRRARSVASQSIIAYTMSLGAENSVAYSNNSIAIPTNFTISVTTEILPVSMTKTSVDCTMYICGDSTECSNLLLQYGSFCTQLNRALTGIAVEQDKNTQEVFAQVKQIYKTPPIKDFGGFNFSQILPDPSKPSKRSFIEDLLFNKVTLADAGFIKQYGDCLGDIAARDLICAQKFNGLTVLPPLLTDEMIAQYTSALLAGTITSGWTFGAGAALQIPFAMQMAYRFNGIGVTQNVLYENQKLIANQFNSAIGKIQDSLSSAAPALGKLQDVVNQNAQALNTLVKQLSSNFGAISSVLNDILSRLDPPEAEVQIDRLITGRLQSLQTYVTQQLIRAAEIRASANLAATKMSECVLGQSKRVDFCGKGYQLMSFPQSAPHGVVFLNVTYVPAQEKNFTTAPAICNDGKAHFPREGVFVSNGTNWFVTQRNFYEPQIITTDNTFVSGNCDVVIGIVNNTVYDPLQPELDSFKEELDKYFKNHTSPDVDLGDISGINASVVNIQKEIDRLNEVAKNLNESLIDLQELGKYEQYIK

SEQ ID NO: 1905 - protein, 1211 aa, Artificial Sequence
  SARS-CoV-2/USA/WA8-UW5/2020__EPI_ISL_413486 spike protein (1-1211)(K986P_V987P_ H1048Q_H1064N_ H1083N_H1101N)
MFVFLVLLPLVSSQCVNLTTRTQLPPAYTNSFTRGVYYPDKVFRSSVLHSTQDLFLPFFSNVTWFHAIHVSGTNGTKRFDNPVLPFNDGVYFASTEKSNIIRGWIFGTTLDSKTQSLLIVNNATNVVIKVCEFQFCNDPFLGVYYHKNNKSWMESEFRVYSSANNCTFEYVSQPFLMDLEGKQGNFKNLREFVFKNIDGYFKIYSKHTPINLVRDLPQGFSALEPLVDLPIGINITRFQTLLALHRSYLTPGDSSSGWTAGAAAYYVGYLQPRTFLLKYNENGTITDAVDCALDPLSETKCTLKSFTVEKGIYQTSNFRVQPTESIVRFPNITNLCPFGEVFNATRFASVYAWNRKRISNCVADYSVLYNSASFSTFKCYGVSPTKLNDLCFTNVYADSFVIRGDEVRQIAPGQTGKIADYNYKLPDDFTGCVIAWNSNNLDSKVGGNYNYLYRLFRKSNLKPFERDISTEIYQAGSTPCNGVEGFNCYFPLQSYGFQPTNGVGYQPYRVVVLSFELLHAPATVCGPKKSTNLVKNKCVNFNFNGLTGTGVLTESNKKFLPFQQFGRDIADTTDAVRDPQTLEILDITPCSFGGVSVITPGTNTSNQVAVLYQDVNCTEVPVAIHADQLTPTWRVYSTGSNVFQTRAGCLIGAEYVNNSYECDIPIGAGICASYQTQTNSPRRARSVASQSIIAYTMSLGAENSVAYSNNSIAIPTNFTISVTTEILPVSMTKTSVDCTMYICGDSTECSNLLLQYGSFCTQLNRALTGIAVEQDKNTQEVFAQVKQIYKTPPIKDFGGFNFSQILPDPSKPSKRSFIEDLLFNKVTLADAGFIKQYGDCLGDIAARDLICAQKFNGLTVLPPLLTDEMIAQYTSALLAGTITSGWTFGAGAALQIPFAMQMAYRFNGIGVTQNVLYENQKLIANQFNSAIGKIQDSLSSTASALGKLQDVVNQNAQALNTLVKQLSSNFGAISSVLNDILSRLDPPEAEVQIDRLITGRLQSLQTYVTQQLIRAAEIRASANLAATKMSECVLGQSKRVDFCGKGYQLMSFPQSAPHGVVFLNVTYVPAQEKNFTTAPAICNDGKAHFPREGVFVSNGTNWFVTQRNFYEPQIITTDNTFVSGNCDVVIGIVNNTVYDPLQPELDSFKEELDKYFKNHTSPDVDLGDISGINASVVNIQKEIDRLNEVAKNLNESLIDLQELGKYEQYIK

SEQ ID NO: 1906 - protein, 1211 aa, Artificial Sequence
  SARS-CoV-2/England/20102000506/2020__EPI_ISL_415147 spike protein (1-1211)(K986P_V987P_ H1048Q_H1064N_ H1083N_H1101N)
MFVFLVLLPLVSSQCVNLTTRTQLPPAYTNSFTRGVYYPDKVFRSSVLHSTQDLFLPFFSNVTWFHAIHVSGTNGTKRFDNPVLPFNDGVYFASTEKSNIIRGWIFGTTLDSKTQSLLIVNNATNVVIKVCEFQFCNDPFLGVYYHKNNKSWMESEFRVYSSANNCTFEYVSQPFLMDLEGKQGNFKNLREFVFKNIDGYFKIYSKHTPINLVRDLPQGFSALEPLVDLPIGINITRFQTLLALHRSYLTPGDSSSGWTAGAAAYYVGYLQPRTFLLKYNENGTITDAVDCALDPLSETKCTLKSFTVEKGIYQTSNFRVQPTESIVRFPNITNLCPFGEVFNATRFASVYAWNRKRISNCVADYSVLYNSASFSTFKCYGVSPTKLNDLCFTNVYADSFVIRGDEVRQIAPGQTGKIADYNYKLPDDFTGCVIAWNSNNLDSKVGGNYNYLYRLFRKSNLKPFERDISTEIYQAGSTPCNGVEGFNCYFPLQSYGFQPTNGVGYQPYRVVVLSFELLHAPATVCGPKKSTNLVKNKCVNFNFNGLTGTGVLTESNKKFLPFQQFGRDIADTTDAVRDPQTLEILDITPCSFGGVSVITPGTNTSNQVAVLYQGVNCTEVPVAIHADQLTPTWRVYSTGSNVFQTRAGCLIGAEHVNNSYECDIPIGAGICASYQTQTNSPRRARSVASQSIIAYTMSLGAENSVAYSNNSIAIPTNFTISVTTEILPVSMTKTSVDCTMYICGDSTECSNLLLQYGSFCTQLNRALTGIAVEQDKNTQEVFAQVKQIYKTPPIKDFGGFNFSQILPDPSKPSKRSFIEDLLFNKVTLADAGFIKQYGYCLGDIAARDLICAQKFNGLTVLPPLLTDEMIAQYTSALLAGTITSGWTFGAGAALQIPFAMQMAYRFNGIGVTQNVLYENQKLIANQFNSAIGKIQDSLSSTASALGKLQDVVNQNAQALNTLVKQLSSNFGAISSVLNDILSRLDPPEAEVQIDRLITGRLQSLQTYVTQQLIRAAEIRASANLAATKMSECVLGQSKRVDFCGKGYQLMSFPQSAPHGVVFLNVTYVPAQEKNFTTAPAICNDGKAHFPREGVFVSNGTNWFVTQRNFYEPQIITTDNTFVSGNCDVVIGIVNNTVYDPLQPELDSFKEELDKYFKNHTSPDVDLGDISGINASVVNIQKEIDRLNEVAKNLNESLIDLQELGKYEQYIK

SEQ ID NO: 1907 - protein, 1211 aa, Artificial Sequence
  SARS-CoV-2/Belgium/VAG-03013/2020__EPI_ISL_415155 spike protein (1-1211)(K986P_V987P_ H1048Q_H1064N_ H1083N_H1101N)
MFVFLVLLPLVSSQCVNLTTRTQLPPAYTNSFTRGVYYPDKVFRSSVLHSTQDLFLPFFSNVTWFHAIHVSGTNGTKRFDNPVLPFNDGVYFASTEKSNIIRGWIFGTTLDSKTQSLLIVNNATNVVIKVCEFQFCNDPFLGVYYHKNNKSWMESEFRVYSSANNCTFEYVSQPFLMDLEGKQGNFKNLREFVFKNIDGYFKIYSKHTPINLVRDLPQGFSALEPLVDLPIGINITRFQTLLALHRSYLTPGDSSSGWTAGAAAYYVGYLQPRTFLLKYNENGTITDAVDCALDPLSETKCTLKSFTVEKGIYQTSNFRVQPTESIVRFPNITNLCPFGEVFNATRFASVYAWNRKRISNCVADYSVLYNSASFSTFKCYGVSPTKLNDLCFTNVYADSFVIRGDEVRQIAPGQTGKIADYNYKLPDDFTGCVIAWNSNNLDSKVGGNYNYLYRLFRKSNLKPFERDISTEIYQAGSTPCNGVEGFNCYFPLQSYGFQPTNGVGYQPYRVVVLSFELLHAPATVCGPKKSTNLVKNKCVNFNFNGLTGTGVLTESNKKFLPFQQFGRDIADTTDAVRDPQTLEILDITPCSFGGVSVITPGTNTSNQVAVLYQGVNCTEVPVAIHADQLTPTWRVYSTGSNVFQTRAGCLIGAEHVNNSYECDIPIGAGICASYQTQTNSPRRARSVASQSIIAYTMSLGAENSVAYSNNSIAIPTNFTISVTTEILPVSMTKTSVDCTMYICGDSTECSNLLLQYGSFCTQLNRALTGIAVEQDKNTQEVFAQVKQIYKTPPIKDFGGFNFSQILPDPSKPSKRSFIEDLLFNKVTLADAGFIKQYGDCLGDIAARDLICAQKFNGLTVLPPLLTDEMIAQYTSALLAGTITSGWTFGAGAALQIPFAMQMAYRFNGIGVTQNVLYENQKLIANQFNSAIGKIQDSLSSTATALGKLQDVVNQNAQALNTLVKQLSSNFGAISSVLNDILSRLDPPEAEVQIDRLITGRLQSLQTYVTQQLIRAAEIRASANLAATKMSECVLGQSKRVDFCGKGYQLMSFPQSAPHGVVFLNVTYVPAQEKNFTTAPAICNDGKAHFPREGVFVSNGTNWFVTQRNFYEPQIITTDNTFVSGNCDVVIGIVNNTVYDPLQPELDSFKEELDKYFKNHTSPDVDLGDISGINASVVNIQKEIDRLNEVAKNLNESLIDLQELGKYEQYIK

SEQ ID NO: 1908 - protein, 1211 aa, Artificial Sequence
  SARS-CoV-2/Belgium/BC-03016/2020__EPI_ISL_415157 spike protein (1-1211)(K986P_V987P_ H1048Q_H1064N_ H1083N_H1101N)
MFVFLVLLPLVSSQCVNLTTRTQLPPAYTNSFTRGVYYPDKVFRSSVLHSTQDLFLPFFSNVTWFHAIHVSGTNGTKRFDNPVLPFNDGVYFASTEKSNIIRGWIFGTTLDSKTQSLLIVNNATNVVIKVCEFQFCNDPFLGVYYHKNNKSWMESEFRVYSSANNCTFEYVSQPFLMDLEGKQGNFKNLREFVFKNIDGYFKIYSKHTPINLVRDLPQGFSALEPLVDLPIGINITRFQTLLALHRSYLTPGDSSSGWTAGAAAYYVGYLQPRTFLLKYNENGTITDAVDCALDPLSETKCTLKSFTVEKGIYQTSNFRVQPTESIVRFPNITNLCPFGEVFNATRFASVYAWNRKRISNCVADYSVLYNSASFSTFKCYGVSPTKLNDLCFTNVYADSFVIRGDEVRQIAPGQTGKIADYNYKLPDDFTGCVIAWNSNNLDSKVGGNYNYLYRLFRKSNLKPFERDISTEIYQAGSTPCNGVEGFNCYFPLQSYGFQPTNGVGYQPYRVVVLSFELLHAPATVCGPKKSTNLVKNKCVNFNFNGLTGTGVLTESNKKFLPFQQFGRDIADTTDAVRDPQTLEILDITPCSFGGVSVITPGTNTSNQVAVLYQGVNCTEVPVAIHADQLTPTWRVYSTGSNVFQTRAGCLIGAEHVNNSYECDIPIGAGICASYQTQTNSPRRARSVASQSIIAYTMSLGAENSVAYSNNSIAIPTNFTISVTTEILPVSMTKTSVDCTMYICGDSTECSNLLLQYGSFCTQLNRALTGIAVEQDKNTQEVFAQVKQIYKTPPIKDFGGFNFSQILPDPSKPSKRSFIEDLLFNKVTLADAGFIKQYGDCLGDIAARDLICAQKFNGLTVLPPLLTDEMIAQYTSALLAGTITSGWTFGAGAALQIPFAMQMAYRFNGIGVTQNVLYENQKLIANQFNSAIGKIQDSLSSTAPALGKLQDVVNQNAQALNTLVKQLSSNFGAISSVLNDILSRLDPPEAEVQIDRLITGRLQSLQTYVTQQLIRAAEIRASANLAATKMSECVLGQSKRVDFCGKGYQLMSFPQSAPHGVVFLNVTYVPAQEKNFTTAPAICNDGKAHFPREGVFVSNGTNWFVTQRNFYEPQIITTDNTFVSGNCDVVIGIVNNTVYDPLQPELDSFKEELDKYFKNHTSPDVDLGDISGINASVVNIQKEIDRLNEVAKNLNESLIDLQELGKYEQYIK

SEQ ID NO: 1909 - protein, 1211 aa, Artificial Sequence
  SARS-CoV-2/Germany/BavPat3/2020__EPI_ISL_414521 spike protein (1-1211)(K986P_V987P_ H1048Q_H1064N_ H1083N_H1101N)
MFVFLVLLPLVSSQCVNLTTRTQLPPAYTNSFTRGVYYPDKVFRSSVLHSTQDLFLPFFSNVTWFHAIHVSGTNGTKRFDNPVLPFNDGVYFASTEKSNIIRGWIFGTTLDSKTQSLLIVNNATNVVIKVCEFQFCNDPFLGVYYHKNNKSWMESEFRVYSSANNCTFEYVSQPFLMDLEGKQGNFKNLREFVFKNIDGYFKIYSKHTPINLVRDLPQGFSALEPLVDLPIGINITRFQTLLALHRSYLTPGDSSSGWTAGAAAYYVGYLQPRTFLLKYNENGTITDAVDCALDPLSETKCTLKSFTVEKGIYQTSNFRVQPTESIVRFPNITNLCPFGEVFNATRFASVYAWNRKRISNCVADYSVLYNSASFSTFKCYGVSPTKLNDLCFTNVYADSFVIRGDEVRQIAPGQTGKIADYNYKLPDDFTGCVIAWNSNNLDSKVGGNYNYLYRLFRKSNLKPFERDISTEIYQAGSTPCNGVEGFNCYFPLQSYGFQPTNGVGYQPYRVVVLSFELLHAPATVCGPKKSTNLVKNKCVNFNFNGLTGTGVLTESNKKFLPFQQFGRDIADTTDAVRDPQTLEILDITPCSFGGVSVITPGTNTSNQVAVLYQDVNCTEVPVAIHADQLTPTWRVYSTGSNVFQTRAGCLIGAEHVNNSYECDIPIGAGICASYQTQTNSPRRARSVASQSIIAYTMSLGAENSVAYSNNSIAIPTNFTISVTTEILPVSMTKTSVDCTMYICGDSTECSNLLLQYGSFCTQLNRALTGIAVEQDKNTQQVFAQVKQIYKTPPIKDFGGFNFSQILPDPSKPSKRSFIEDLLFNKVTLADAGFIKQYGDCLGDIAARDLICAQKFNGLTVLPPLLTDEMIAQYTSALLAGTITSGWTFGAGAALQIPFAMQMAYRFNGIGVTQNVLYENQKLIANQFNSAIGKIQDSLSSTASALGKLQDVVNQNAQALNTLVKQLSSNFGAISSVLNDILSRLDPPEAEVQIDRLITGRLQSLQTYVTQQLIRAAEIRASANLAATKMSECVLGQSKRVDFCGKGYQLMSFPQSAPHGVVFLNVTYVPAQEKNFTTAPAICNDGKAHFPREGVFVSNGTNWFVTQRNFYEPQIITTDNTFVSGNCDVVIGIVNNTVYDPLQPELDSFKEELDKYFKNHTSPDVDLGDISGINASVVNIQKEIDRLNEVAKNLNESLIDLQELGKYEQYIK

SEQ ID NO: 1910 - protein, 1211 aa, Artificial Sequence
  SARS-CoV-2/France/HF1805/2020__EPI_ISL_414628 spike protein (1-1211)(K986P_V987P_ H1048Q_H1064N_ H1083N_H1101N)
MFVFLVLLPLVSSQCVNLTTRTQLPPAYTNSFTRGVYYPDKVFRSSVLHSTQDLFLPFFSNVTWFHAIHVSGTNGTKRFDNPVLPFNDGVYFASTEKSNIIRGWIFGTTLDSKTQSLLIVNNATNVVIKVCEFQFCNDPFLGVYYHKNNKSWMESEFRVYSSANNCTFEYVSQPFLMDLEGKQGNFKNLREFVFKNIDGYFKIYSKHTPINLVRDLPQGFSALEPLVDLPIGINITRFQTLLALHRSYLTPGDSSSGWTAGAAAYYVGYLQPRTFLLKYNENGTITDAVDCALDPLSETKCTLKSFTVEKGIYQTSNFRVQPTESIVRFPNITNLCPFGEVFNATRFASVYAWNRKRISNCVADYSVLYNSASFSTFKCYGVSPTKLNDLCFTNVYADSFVIRGDEVRQIAPGQTGKIADYNYKLPDDFTGCVIAWNSNNLDSKVGGNYNYLYRLFRKSNLKPFERDISTEIYQAGSTPCNGVEGFNCYFPLQSYGFQPTNGVGYQPYRVVVLSFELLHAPATVCGPKKSTNLVKNKCVNFNFNGLTGTGVLTESNKKFLPFQQFGRDIADTTDAVRDPQTLEILDITPCSFGGVSVITPGTNTSNQVAVLYQGVNCTEVPVAIHADQLTPTWRVYSTGSNVFQTRAGCLIGAEHVNNSYECDIPIGAGICASYQTQTNSPRRARSVASQSIIAYTMSLGAENSVAYSNNSIAIPTNFTISVTTEILPVSMTKTSVDCTMYICGDSTECSNLLLQYGSFCTQLNRALTGIAVEQDKNTQEVFAQVKQIYKTPPIKDFGGFNFSQILPDPSKPSKRSFIEDLLFNKVTLADAGFIKQYGDCLGDIAARDLICAQKFNGLTVLPPLLTDEMIAQYTSALLAGTITSGWTFGAGAALQIPFAMQMAYRFNGIGVTQNVLYENQKLIANQFNSAIGKIQDSLSSTASALGKLQDVVNQNAQALNTLVKQLSSNFGAISSVLNDILSRLDPPEAEVQIDRLITGRLQSLQTYVTQQLIRAAEIRASANLAATKMSECVLGQSKRVDFCGKGYQLMSFPQSAPHGVVFLNVTYVPAQEKNFTTAPAICNDGKAHFPREGVFVSNGTNWFVTQRNFYEPQIITTDNTFVSGNCDVVIGVVNNTVYDPLQPELDSFKEELDKYFKNHTSPDVDLGDISGINASVVNIQKEIDRLNEVAKNLNESLIDLQELGKYEQYIK

SEQ ID NO: 1911 - protein, 1211 aa, Artificial Sequence
  SARS-CoV-2/Netherlands/ZuidHolland_9/2020__EPI_ISL_414445 spike protein (1-1211)(K986P_V987P_ H1048Q_H1064N_ H1083N_H1101N)
MFVFLVLLPLVSSQCVNLTTRTQLPPAYTNSFTRGVYYPDKVFRSSVLHSTQDLFLPFFSNVTWFHAIHVSGTNGTKRFDNPVLPFNDGVYFASTEKSNIIRGWIFGTTLDSKTQSLLIVNNATNVVIKVCEFQFCNDPFLGVYYHKNNKSWMESEFRVYSSANNCTFEYVSQPFLMDLEGKQGNFKNLREFVFKNIDGYFKIYSKHTPINLVRDLPQGFSALEPLVDLPIGINITRFQTLLALHRSYLTPGDSSSGWTAGAAAYYVGYLQPRTFLLKYNENGTITDAVDCALDPLSETKCTLKSFTVEKGIYQTSNFRVQPTESIVRFPNITNLCPFGEVFNATRFASVYAWNRKRISNCVADYSVLYNSASFSTFKCYGVSPTKLNDLCFTNVYADSFVIRGDEVRQIAPGQTGKIADYNYKLPDDFTGCVIAWNSNNLDSKVGGNYNYLYRLFRKSNLKPFERDISTEIYQAGSTPCNGVEGFNCYFPLQSYGFQPTNGVGYQPYRVVVLSFELLHAPATVCGPKKSTNLVKNKCVNFNFNGLTGTGVLTESNKKFLPFQQFGRDIADTTDAVRDPQTLEILDITPCSFGGVSVITPGTNTSNQVAVLYQGVNCTEVPVAIHADQLTPTWRVYSTGSNVFQTRAGCLIGAEHVNNSYECDIPIGAGICASYQTQTNSPRRARSVASQSIIAYTMSLGAENSVAYSNNSIAIPTNFTISVTTEILPVSMTKTSVDCTMYICGDSTECSNLLLQYGSFCTQLNRALTGIAVEQDKNTQEVFAQVKQIYKTPPIKDFGGFNFSQILPDPSKPSKRSFIEDLLFNKVTLADAGFIKQYGDCLGDIAARDLICVQKFNGLTVLPPLLTDEMIAQYTSALLAGTITSGWTFGAGAALQIPFAMQMAYRFNGIGVTQNVLYENQKLIANQFNSAIGKIQDSLSSTASALGKLQDVVNQNAQALNTLVKQLSSNFGAISSVLNDILSRLDPPEAEVQIDRLITGRLQSLQTYVTQQLIRAAEIRASANLAATKMSECVLGQSKRVDFCGKGYQLMSFPQSAPHGVVFLNVTYVPAQEKNFTTAPAICNDGKAHFPREGVFVSNGTNWFVTQRNFYEPQIITTDNTFVSGNCDVVIGIVNNTVYDPLQPELDSFKEELDKYFKNHTSPDVDLGDISGINASVVNIQKEIDRLNEVAKNLNESLIDLQELGKYEQYIK

SEQ ID NO: 1912 - protein, 1211 aa, Artificial Sequence
  SARS-CoV-2/Finland/FIN03032020A/2020__EPI_ISL_413602 spike protein (1-1211)(K986P_V987P_ H1048Q_H1064N_ H1083N_H1101N)
MFVFLVLLPLVSSQCVNLTTRTQLPPAYTNSFTRGVYYPDKVFRSSVLHSTQDLFLPFFSNVTWFHAIHVSGTNGTKRFDNPVLPFNDGVYFASTEKSNIIRGWIFGTTLDSKTQSLLIVNNATNVVIKVCEFQFCNDPFLGVYYHKNNKSWMESEFRVYSSANNCTFEYVSQPFLMDLEGKQGNFKNLREFVFKNIDGYFKIYSKHTPINLVRDLPQGFSALEPLVDLPIGINITRFQTLLALHRSYLTPGDSSSGWTAGAAAYYVGYLQPRTFLLKYNENGTITDAVDCALDPLSETKCTLKSFTVEKGIYQTSNFRVQPTESIVRFPNITNLCPFGEVFNATRFASVYAWNRKRISNCVADYSVLYNSASFSTFKCYGVSPTKLNDLCFTNVYADSFVIRGDEVRQIAPGQTGKIADYNYKLPDDFTGCVISWNSNNLDSKVGGNYNYLYRLFRKSNLKPFERDISTEIYQAGSTPCNGVEGFNCYFPLQSYGFQPTNGVGYQPYRVVVLSFELLHAPATVCGPKKSTNLVKNKCVNFNFNGLTGTGVLTESNKKFLPFQQFGRDIADTTDAVRDPQTLEILDITPCSFGGVSVITPGTNTSNQVAVLYQGVNCTEVPVAIHADQLTPTWRVYSTGSNVFQTRAGCLIGAEHVNNSYECDIPIGAGICASYQTQTNSPRRARSVASQSIIAYTMSLGAENSVAYSNNSIAIPTNFTISVTTEILPVSMTKTSVDCTMYICGDSTECSNLLLQYGSFCTQLNRALTGIAVEQDKNTQEVFAQVKQIYKTPPIKDFGGFNFSQILPDPSKPSKRSFIEDLLFNKVTLADAGFIKQYGDCLGDIAARDLICAQKFNGLTVLPPLLTDEMIAQYTSALLAGTITSGWTFGAGAALQIPFAMQMAYRFNGIGVTQNVLYENQKLIANQFNSAIGKIQDSLSSTASALGKLQDVVNQNAQALNTLVKQLSSNFGAISSVLNDILSRLDPPEAEVQIDRLITGRLQSLQTYVTQQLIRAAEIRASANLAATKMSECVLGQSKRVDFCGKGYQLMSFPQSAPHGVVFLNVTYVPAQEKNFTTAPAICNDGKAHFPREGVFVSNGTNWFVTQRNFYEPQIITTDNTFVSGNCDVVIGIVNNTVYDPLQPELDSFKEELDKYFKNHTSPDVDLGDISGINASVVNIQKEIDRLNEVAKNLNESLIDLQELGKYEQYIK

SEQ ID NO: 1913 - protein, 1211 aa, Artificial Sequence
  SARS-CoV-2/France/GE1977/2020__EPI_ISL_414632 spike protein (1-1211)(K986P_V987P_ H1048Q_H1064N_ H1083N_H1101N)
MFVFLVLLPLVSSQCVNLTTRTQLPPAYTNSFTRGVYYPDKVFRSSVLHSTQDLFLPFFSNVTWFHAIHVSGTNGTKRFDNPVLPFNDGVYFASTEKSNIIRGWIFGTTLDSKTQSLLIVNNATNVVIKVCEFQFCNDPFLGVYYHKNNKSWMESEFRVYSSANNCTFEYVSQPFLMDLEGKQGNFKNLREFVFKNIDGYFKIYSKHTPINLVRDLPQGFSALEPLVDLPIGINITRFQTLLALHRSYLTPGDSSSGWTAGAAAYYVGYLQPRTFLLKYNENGTITDAVDCALDPLSETKCTLKSFTVEKGIYQTSNFRVQPTESIVRFPNITNLCPFGEVFNATRFASVYAWNRKRISNCVADYSVLYNSASFSTFKCYGVSPTKLNDLCFTNVYADSFVIRGDEVRQIAPGQTGKIADYNYKLPDDFTGCVIAWNSNNLDSKVGGNYNYLYRLFRKSNLKPFERDISTEIYQAGSTPCNGVEGFNCYFPLQSYGFQPTNGVGYQPYRVVVLSFELLHAPATVCGPKKSTNLVKNKCVNFNFNGLTGTGVLTESNKKFLPFQQFGRDIADTTDAVRDPQTLEILDITPCSFGGVSVITPGTNTSNQVAVLYQGVNCTEVPVAIHADQLTPTWRVYSTGSNVFQTRAGCLIGAEHVNNSYECDIPIGAGICASYQTQTNSPRRARSVASQSIIAYTMSLGAENSVAYSNNSIAIPTNFTISVTTEILPVSMTKTSVDCTMYICGDSTECSNLLLQYGSFCTQLNRALTGIAVEQDKNTQEVFAQVKQIYKTPPIKDFGGFNFSQILPDPSKPSKRSFIEDLLFNKVTLADAGFIKQYGDCLGDIAARDLICAQKFNGLTVLPPLLTDEMIAQYTSALLAGTITSGWTFGAGAALQIPFAMQMAYRFNGIGVTQNVLYENQKLIANQFNSAIGKIQDSLFSTASALGKLQDVVNQNAQALNTLVKQLSSNFGAISSVLNDILSRLDPPEAEVQIDRLITGRLQSLQTYVTQQLIRAAEIRASANLAATKMSECVLGQSKRVDFCGKGYQLMSFPQSAPHGVVFLNVTYVPAQEKNFTTAPAICNDGKAHFPREGVFVSNGTNWFVTQRNFYEPQIITTDNTFVSGNCDVVIGIVNNTVYDPLQPELDSFKEELDKYFKNHTSPDVDLGDISGINASVVNIQKEIDRLNEVAKNLNESLIDLQELGKYEQYIK

SEQ ID NO: 1914 - protein, 1211 aa, Artificial Sequence
  SARS-CoV-2/Finland/FIN-313/2020__EPI_ISL_414641 spike protein (1-1211)(K986P_V987P_ H1048Q_H1064N_ H1083N_H1101N)
MFVFLVLLPLVSSQCVNLTTRTQLPPAYTNSFTRGVYYPDKVFRSSVLHSTQDLFLPFFSNVTWFHAIHVSGTNGTKRFDNPVLPFNDGVYFASTEKSNIIRGWIFGTTLDSKTQSLLIVNNATNVVIKVCEFQFCNDPFLGVYYHKNNKSWMESEFRVYSSANNCTFEYVSQPFLMDLEGKQGNFKNLREFVFKNIDGYFKIYSKHTPINLVRDLPQGFSALEPLVDLPIGINITRFKTLLALHRSYLTPGDSSSGWTAGAAAYYVGYLQPRTFLLKYNENGTITDAVDCALDPLSETKCTLKSFTVEKGIYQTSNFRVQPTESIVRFPNITNLCPFGEVFNATRFASVYAWNRKRISNCVADYSVLYNSASFSTFKCYGVSPTKLNDLCFTNVYADSFVIRGDEVRQIAPGQTGKIADYNYKLPDDFTGCVIAWNSNNLDSKVGGNYNYLYRLFRKSNLKPFERDISTEIYQAGSTPCNGVEGFNCYFPLQSYGFQPTNGVGYQPYRVVVLSFELLHAPATVCGPKKSTNLVKNKCVNFNFNGLTGTGVLTESNKKFLPFQQFGRDIADTTDAVRDPQTLEILDITPCSFGGVSVITPGTNTSNQVAVLYQGVNCTEVPVAIHADQLTPTWRVYSTGSNVFQTRAGCLIGAEHVNNSYECDIPIGAGICASYQTQTNSPRRARSVASQSIIAYTMSLGAENSVAYSNNSIAIPTNFTISVTTEILPVSMTKTSVDCTMYICGDSTECSNLLLQYGSFCTQLNRALTGIAVEQDKNTQEVFAQVKQIYKTPPIKDFGGFNFSQILPDPSKPSKRSFIEDLLFNKVTLADAGFIKQYGDCLGDIAARDLICAQKFNGLTVLPPLLTDEMIAQYTSALLAGTITSGWTFGAGAALQIPFAMQMAYRFNGIGVTQNVLYENQKLIANQFNSAIGKIQDSLSSTASALGKLQDVVNQNAQALNTLVKQLSSNFGAISSVLNDILSRLDPPEAEVQIDRLITGRLQSLQTYVTQQLIRAAEIRASANLAATKMSECVLGQSKRVDFCGKGYQLMSFPQSAPHGVVFLNVTYVPAQEKNFTTAPAICNDGKAHFPREGVFVSNGTNWFVTQRNFYEPQIITTDNTFVSGNCDVVIGIVNNTVYDPLQPELDSFKEELDKYFKNHTSPDVDLGDISGINASVVNIQKEIDRLNEVAKNLNESLIDLQELGKYEQYIK

SEQ ID NO: 1915 - protein, 1211 aa, Artificial Sequence
  SARS-CoV-2/Netherlands/ZuidHolland_2/2020__EPI_ISL_414556 spike protein (1-1211)(K986P_V987P_ H1048Q_H1064N_ H1083N_H1101N)
MFVFLVLLPLVSSQCVNLTTRTQLPPAYTNSFTRGVYYPDKVFRSSVLHSTQDLFLPFFSNVTWFHAIHVSGTNGTKRFDNPVLPFNDGVYFASTEKSNIIRGWIFGTTLDSKTQSLLIVNNATNVVIKVCEFQFCNDPFLGVYYHKNNKSWMESEFRVYSSANNCTFEYVSQPFLMDLEGKQGNFKNLREFVFKNIDGYFKIYSKHTPINLVRDLPQGFSALEPLVDLPIGINITRFQTLLALHRSYLTPGDSSSGWTAGAAAYYVGYLQPRTFLLKYNENGTITDAVDCALDPLSETKCTLKSFTVEKGIYQTSNFRVQPTESIVRFPNITNLCPFGEVFNATRFASVYAWNRKRISNCVADYSVLYNSASFSTFKCYGVSPTKLNDLCFTNVYADSFVIRGDEVRQIAPGQTGKIADYNYKLPDDFTGCVIAWNSNNLDSKVGGNYNYLYRLFRKSNLKPFERDISTEIYQAGSTPCNGVEGFNCYFPLQSYGFQPTNGVGYQPYRVVVLSFELLHAPATVCGPKKSTNLVKNKCVNFNFNGLTGTGVLTESNKKFLPFQQFGRDIADTTDAVRDPQTLEILDITPCSFGGVSVITPGTNTSNQVAVLYQGVNCTEVPVAIHADQLTPTWRVYSTGSNVFQTRAGCLIGAEHVNNSYECDIPIGAGICASYQTQTNSPRRARSVASQSIIAYTMSLGAENSVAYSNNSIAIPTNFTISVTTEILPVSMTKTSVDCTMYICGDSTECSNLLLQYGSFCTQLNRALTGIALEQDKNTQEVFAQVKQIYKTPPIKDFGGFNFSQILPDPSKPSKRSFIEDLLFNKVTLADAGFIKQYGDCLGDIAARDLICAQKFNGLTVLPPLLTDEMIAQYTSALLAGTITSGWTFGAGAALQIPFAMQMAYRFNGIGVTQNVLYENQKLIANQFNSAIGKIQDSLSSTASALGKLQDVVNQNAQALNTLVKQLSSNFGAISSVLNDILSRLDPPEAEVQIDRLITGRLQSLQTYVTQQLIRAAEIRASANLAATKMSECVLGQSKRVDFCGKGYQLMSFPQSAPHGVVFLNVTYVPAQEKNFTTAPAICNDGKAHFPREGVFVSNGTNWFVTQRNFYEPQIITTDNTFVSGNCDVVIGIVNNTVYDPLQPELDSFKEELDKYFKNHTSPDVDLGDISGINASVVNIQKEIDRLNEVAKNLNESLIDLQELGKYEQYIK

SEQ ID NO: 1916 - protein, 1211 aa, Artificial Sequence
  SARS-CoV-2/USA/WA-UW31/2020__EPI_ISL_414618 spike protein (1-1211)(K986P_V987P_ H1048Q_H1064N_ H1083N_H1101N)
MFVFLVLLPLVSSQCVNLTTRTQLPPAYTNSFTRGVYYPDKVFRSSVLHSTQDLFLPFFSNVTWFHAIHVSGTNGTKRFDNPVLPFNDGVYFASTEKSNIIRGWIFGTTLDSKTQSLLIVNNATNVVIKVCEFQFCNDPFLGVYYHKNNKSWMESEFRVYSSANNCTFEYVSQPFLMDLEGKQGNFKNLREFVFKNIDGYFKIYSKHTPINLVRDLPQGFSALEPLVDLPIGINITRFQTLLALHRSYLTPGDSSSGWTAGAAAYYVGYLQPRTFLLKYNENGTITDAVDCALDPLSETKCTLKSFTVEKGIYQTSNFRVQPTESIVRFPNITNLCPFGEVFNATRFASVYAWNRKRISNCVADYSVLYNSASFSTFKCYGVSPTKLNDLCFTNVYADSFVIRGDEVRQIAPGQTGKIADYNYKLPDDFTGCVIAWNSNNLDSKVGGNYNYLYRLFRKSNLKPFERDISTEIYQAGSTPCNGAEGFNCYFPLQSYGFQPTNGVGYQPYRVVVLSFELLHAPATVCGPKKSTNLVKNKCVNFNFNGLTGTGVLTESNKKFLPFQQFGRDIADTTDAVRDPQTLEILDITPCSFGGVSVITPGTNTSNQVAVLYQDVNCTEVPVAIHADQLTPTWRVYSTGSNVFQTRAGCLIGAEHVNNSYECDIPIGAGICASYQTQTNSPRRARSVASQSIIAYTMSLGAENSVAYSNNSIAIPTNFTISVTTEILPVSMTKTSVDCTMYICGDSTECSNLLLQYGSFCTQLNRALTGIAVEQDKNTQEVFAQVKQIYKTPPIKDFGGFNFSQILPDPSKPSKRSFIEDLLFNKVTLADAGFIKQYGDCLGDIAARDLICAQKFNGLTVLPPLLTDEMIAQYTSALLAGTITSGWTFGAGAALQIPFAMQMAYRFNGIGVTQNVLYENQKLIANQFNSAIGKIQDSLSSTASALGKLQDVVNQNAQALNTLVKQLSSNFGAISSVLNDILSRLDPPEAEVQIDRLITGRLQSLQTYVTQQLIRAAEIRASANLAATKMSECVLGQSKRVDFCGKGYQLMSFPQSAPHGVVFLNVTYVPAQEKNFTTAPAICNDGKAHFPREGVFVSNGTNWFVTQRNFYEPQIITTDNTFVSGNCDVVIGIVNNTVYDPLQPELDSFKEELDKYFKNHTSPDVDLGDISGINASVVNIQKEIDRLNEVAKNLNESLIDLQELGKYEQYIK

SEQ ID NO: 1917 - protein, 1211 aa, Artificial Sequence
  SARS-CoV-2/South Korea/SNU01/2020__EPI_ISL_411929 spike protein (1-1211)(K986P_V987P_ H1048Q_H1064N_ H1083N_H1101N)
MFVFLVLLPLVSSQCVNLTTRTQLPPAYTNSFTRGVYYPDKVFRSSVLHSTQDLFLPFFSNVTWFHAIHVSGTNGTKRFDNPVLPFNDGVYFASTEKSNIIRGWIFGTTLDSKTQSLLIVNNATNVVIKVCEFQFCNDPFLGVYYHKNNKSWMESEFRVYSSANNCTFEYVSQPFLMDLEGKQGNFKNLREFVFKNIDGYFKIYSKHTPINLVRDLPQGFWALEPLVDLPIGINITRFQTLLALHRSYLTPGDSSSGWTAGAAAYYVGYLQPRTFLLKYNENGTITDAVDCALDPLSETKCTLKSFTVEKGIYQTSNFRVQPTESIVRFPNITNLCPFGEVFNATRFASVYAWNRKRISNCVADYSVLYNSASFSTFKCYGVSPTKLNDLCFTNVYADSFVIRGDEVRQIAPGQTGKIADYNYKLPDDFTGCVIAWNSNNLDSKVGGNYNYLYRLFRKSNLKPFERDISTEIYQAGSTPCNGVEGFNCYFPLQSYGFQPTNGVGYQPYRVVVLSFELLHAPATVCGPKKSTNLVKNKCVNFNFNGLTGTGVLTESNKKFLPFQQFGRDIADTTDAVRDPQTLEILDITPCSFGGVSVITPGTNTSNQVAVLYQDVNCTEVPVAIHADQLTPTWRVYSTGSNVFQTRAGCLIGAEHVNNSYECDIPIGAGICASYQTQTNSPRRARSVASQSIIAYTMSLGAENSVAYSNNSIAIPTNFTISVTTEILPVSMTKTSVDCTMYICGDSTECSNLLLQYGSFCTQLNRALTGIAVEQDKNTQEVFAQVKQIYKTPPIKDFGGFNFSQILPDPSKPSKRSFIEDLLFNKVTLADAGFIKQYGDCLGDIAARDLICAQKFNGLTVLPPLLTDEMIAQYTSALLAGTITSGWTFGAGAALQIPFAMQMAYRFNGIGVTQNVLYENQKLIANQFNSAIGKIQDSLSSTASALGKLQDVVNQNAQALNTLVKQLSSNFGAISSVLNDILSRLDPPEAEVQIDRLITGRLQSLQTYVTQQLIRAAEIRASANLAATKMSECVLGQSKRVDFCGKGYQLMSFPQSAPHGVVFLNVTYVPAQEKNFTTAPAICNDGKAHFPREGVFVSNGTNWFVTQRNFYEPQIITTDNTFVSGNCDVVIGIVNNTVYDPLQPELDSFKEELDKYFKNHTSPDVDLGDISGINASVVNIQKEIDRLNEVAKNLNESLIDLQELGKYEQYIK

SEQ ID NO: 1918 - protein, 1211 aa, Artificial Sequence
  SARS-CoV-2/China/WF0004/2020__EPI_ISL_413694 spike protein (1-1211)(K986P_V987P_ H1048Q_H1064N_ H1083N_H1101N)
MFVFLVLLPLVSSQCVNLTTRTQLPPAYTNSFTRGVYYPDKVFRSSVLHSTQDLFLPFFSNVTWFHAIHVSGTNGTKRFDNPVLPFNDGVYFASTEKSNIIRGWIFGTTLDSKTQSLLIVNNATNVVIKVCEFQFCNDPFLGVYYHKNNKSWTESEFRVYSSANNCTFEYVSQPFLMDLEGKQGNFKNLREFVFKNIDGYFKIYSKHTPINLVRDLPQGFSALEPLVDLPIGINITRFQTLLALHRSYLTPGDSSSGWTAGAAAYYVGYLQPRTFLLKYNENGTITDAVDCALDPLSETKCTLKSFTVEKGIYQTSNFRVQPTESIVRFPNITNLCPFGEVFNATRFASVYAWNRKRISNCVADYSVLYNSASFSTFKCYGVSPTKLNDLCFTNVYADSFVIRGDEVRQIAPGQTGKIADYNYKLPDDFTGCVIAWNSNNLDSKVGGNYNYLYRLFRKSNLKPFERDISTEIYQAGSTPCNGVEGFNCYFPLQSYGFQPTNGVGYQPYRVVVLSFELLHAPATVCGPKKSTNLVKNKCVNFNFNGLTGTGVLTESNKKFLPFQQFGRDIADTTDAVRDPQTLEILDITPCSFGGVSVITPGTNTSNQVAVLYQDVNCTEVPVAIHADQLTPTWRVYSTGSNVFQTRAGCLIGAEHVNNSYECDIPIGAGICASYQTQTNSPRRARSVASQSIIAYTMSLGAENSVAYSNNSIAIPTNFTISVTTEILPVSMTKTSVDCTMYICGDSTECSNLLLQYGSFCTQLNRALTGIAVEQDKNTQEVFAQVKQIYKTPPIKDFGGFNFSQILPDPSKPSKRSFIEDLLFNKVTLADAGFIKQYGDCLGDIAARDLICAQKFNGLTVLPPLLTDEMIAQYTSALLAGTITSGWTFGAGAALQIPFAMQMAYRFNGIGVTQNVLYENQKLIANQFNSAIGKIQDSLSSTASALGKLQDVVNQNAQALNTLVKQLSSNFGAISSVLNDILSRLDPPEAEVQIDRLITGRLQSLQTYVTQQLIRAAEIRASANLAATKMSECVLGQSKRFDFCGKGYQLMSFPQSAPHGVVFLNVTYVPAQEKNFTTAPAICNDGKAHFPREGVFVSNGTNWFVTQRNFYEPQIITTDNTFVSGNCDVVIGIVNNTVYDPLQPELDSFKEELDKYFKNHTSPDVDLGDISGINASVVNIQKEIDRLNEVAKNLNESLIDLQELGKYEQYIK

SEQ ID NO: 1919 - protein, 1211 aa, Artificial Sequence
  SARS-CoV-2/China/WF0028/2020__EPI_ISL_413791 spike protein (1-1211)(K986P_V987P_ H1048Q_H1064N_ H1083N_H1101N)
MFVFLVLLPLVSSQCVNLTTRTQLPPAYTNSFTRGVYYPDKVFRSSVLHSTQDLFLPFFSNVTWFHAIHVSGTNGTKRFDNPVLPFNDGVYFASTEKSNIIRGWIFGTTLDSKTQSLLIVNNATNVVIKVCEFQFCNDPFLGVYYHKNNKSWMESEFRVYSSANNCTFEYVSQPFLMDLEGKQGNFKNLREFVFKNIDGYFKIYSKHTPINLVRDLPQGFSALEPLVDLPIGINITRFQTLLALHRSYLTPGDSSSGWTAGAAAYYVGYLQPRTFLLKYNENGTITDAVDCALDPLSETKCTLKSFTVEKGIYQTSNFRVQPTESIVRFPNITNLCPFGEVFNATRFASVYAWNRKRISNCVADYSVLYNSASFSTFKCYGVSPTKLNDLCFTNVYADSFVIRGDEVRQIAPGQTGKIADYNYKLPDDFTGCVIAWNSNNLDSKVGGNYNYLYRLFRKSNLKPFERDISTEIYQAGSTPCNGVEGFNCYFPLQSYGFQPTNGVGYQPYRVVVLSFELLHAPATVCGPKKSTNLVKNKCVNFNFNGLTGTGVLTESNKKFLPFQQFGRDIADTTDAVRDPQTLEILDITPCSFGGVSVITPGTNTSNQVAVLYQDVNCTEVPVAIHADQLTPTWRVYSTGSNVFQTRAGCLIGAEHVNNSYECDIPIGAGICASYQTQTNSPRRARSVASQSIIAYTMSLGAENSVAYSNNSIAIPTNFTISVTTEILPVSMTKTSVDCTMYICGDSTECSNLLLQYGSFCTQLNRALTGIAVEQDKNTQEVFAQVKQIYKTPPIKDFGGFNFSQILPDPSKPSKRSFIEDLLFNKVTLADAGFIKQYGDCLGDIAARDLICAQKFNGLTVLPPLLTDEMIAQYTSALLAGTITSGWTFGAGAALQIPFAMQMAYRFNGIGVTQNVLYENQKLIANQFNSAIGKIQDSLSSTASALGKLQDVVNQNAQALNTLVKQLSSNFGAISSVLNDILSRLDPPEAEVQIDRLITGRLQSLQTYVTQQLIRAAEIRASANLAATKMSECVLGQSKRVDFCGKGYQLMSFPQSAPHGVVFLNVTYVPAQEKNFTTAPAICNDGKAHFPREGVFVSNGTNWFVTQRNFYEPQIITTDNTFVSGNCDVVIGIVNNTVYDPLQPELESFKEELDKYFKNHTSPDVDLGDISGINASVVNIQKEIDRLNEVAKNLNESLIDLQELGKYEQYIK

SEQ ID NO: 1920 - protein, 1211 aa, Artificial Sequence
  SARS-CoV-2/2019-nCoV/USA-CruiseA-18/2020__MT159716.1 spike protein (1-1211)(K986P_V987P_ H1048Q_H1064N_ H1083N_H1101N)
MFVFLVLLPLVSSQCVNLTTRTQLPPAYTNSFTRGVYYPDKVFRSSVLHSTQDLFLPFFSNVTWFHAIHVSGTNGTKRFDNPVLPFNDGVYFASTEKSNIIRGWIFGTTLDSKTQSLLIVNNATNVVIKVCEFQFCNDPFLGVYYHKNNKSWMESELRVYSSANNCTFEYVSQPFLMDLEGKQGNFKNLREFVFKNIDGYFKIYSKHTPINLVRDLPQGFSALEPLVDLPIGINITRFQTLLALHRSYLTPGDSSSGWTAGAAAYYVGYLQPRTFLLKYNENGTITDAVDCALDPLSETKCTLKSFTVEKGIYQTSNFRVQPTESIVRFPNITNLCPFGEVFNATRFASVYAWNRKRISNCVADYSVLYNSASFSTFKCYGVSPTKLNDLCFTNVYADSFVIRGDEVRQIAPGQTGKIADYNYKLPDDFTGCVIAWNSNNLDSKVGGNYNYLYRLFRKSNLKPFERDISTEIYQAGSTPCNGVEGFNCYFPLQSYGFQPTNGVGYQPYRVVVLSFELLHAPATVCGPKKSTNLVKNKCVNFNFNGLTGTGVLTESNKKFLPFQQFGRDIADTTDAVRDPQTLEILDITPCSFGGVSVITPGTNTSNQVAVLYQDVNCTEVPVAIHADQLTPTWRVYSTGSNVFQTRAGCLIGAEHVNNSYECDIPIGAGICASYQTQTNSPRRARSVASQSIIAYTMSLGAENSVAYSNNSIAIPTNFTISVTTEILPVSMTKTSVDCTMYICGDSTECSNLLLQYGSFCTQLNRALTGIAVEQDKNTQEVFAQVKQIYKTPPIKDFGGFNFSQILPDPSKPSKRSFIEDLLFNKVTLADAGFIKQYGDCLGDIAARDLICAQKFNGLTVLPPLLTDEMIAQYTSALLAGTITSGWTFGAGAALQIPFAMQMAYRFNGIGVTQNVLYENQKLIANQFNSAIGKIQDSLSSTASALGKLQDVVNQNAQALNTLVKQLSSNFGAISSVLNDILSRLDPPEAEVQIDRLITGRLQSLQTYVTQQLIRAAEIRASANLAATKMSECVLGQSKRVDFCGKGYQLMSFPQSAPHGVVFLNVTYVPAQEKNFTTAPAICNDGKAHFPREGVFVSNGTNWFVTQRNFYEPQIITTDNTFVSGNCDVVIGIVNNTVYDPLQPELDSFKEELDKYFKNHTSPDVDLGDISGINASVVNIQKEIDRLNEVAKNLNESLIDLQELGKYEQYIK

SEQ ID NO: 1921 - protein, 1211 aa, Artificial Sequence
  SARS-CoV-2/SARS-CoV-2/Yunnan-01/human/2020/CHN__MT049951.1 spike protein (1-1211)(K986P_V987P_ H1048Q_H1064N_ H1083N_H1101N)
MFVFLVLLPLVSSQCVNLTTRTQLPPANTNSFTRGVYYPDKVFRSSVLHSTQDLFLPFFSNVTWFHAIHVSGTNGTKRFDNPVLPFNDGVYFASTEKSNIIRGWIFGTTLDSKTQSLLIVNNATNVVIKVCEFQFCNDPFLGVYYHKNNKSWMESEFRVYSSANNCTFEYVSQPFLMDLEGKQGNFKNLREFVFKNIDGYFKIYSKHTPINLVRDLPQGFSALEPLVDLPIGINITRFQTLLALHRSYLTPGDSSSGWTAGAAAYYVGYLQPRTFLLKYNENGTITDAVDCALDPLSETKCTLKSFTVEKGIYQTSNFRVQPTESIVRFPNITNLCPFGEVFNATRFASVYAWNRKRISNCVADYSVLYNSASFSTFKCYGVSPTKLNDLCFTNVYADSFVIRGDEVRQIAPGQTGKIADYNYKLPDDFTGCVIAWNSNNLDSKVGGNYNYLYRLFRKSNLKPFERDISTEIYQAGSTPCNGVEGFNCYFPLQSYGFQPTNGVGYQPYRVVVLSFELLHAPATVCGPKKSTNLVKNKCVNFNFNGLTGTGVLTESNKKFLPFQQFGRDIADTTDAVRDPQTLEILDITPCSFGGVSVITPGTNTSNQVAVLYQDVNCTEVPVAIHADQLTPTWRVYSTGSNVFQTRAGCLIGAEHVNNSYECDIPIGAGICASYQTQTNSPRRARSVASQSIIAYTMSLGAENSVAYSNNSIAIPTNFTISVTTEILPVSMTKTSVDCTMYICGDSTECSNLLLQYGSFCTQLNRALTGIAVEQDKNTQEVFAQVKQIYKTPPIKDFGGFNFSQILPDPSKPSKRSFIEDLLFNKVTLADAGFIKQYGDCLGDIAARDLICAQKFNGLTVLPPLLTDEMIAQYTSALLAGTITSGWTFGAGAALQIPFAMQMAYRFNGIGVTQNVLYENQKLIANQFNSAIGKIQDSLSSTASALGKLQDVVNQNAQALNTLVKQLSSNFGAISSVLNDILSRLDPPEAEVQIDRLITGRLQSLQTYVTQQLIRAAEIRASANLAATKMSECVLGQSKRVDFCGKGYQLMSFPQSAPHGVVFLNVTYVPAQEKNFTTAPAICNDGKAHFPREGVFVSNGTNWFVTQRNFYEPQIITTDNTFVSGNCDVVIGIVNNTVYDPLQPELDSFKEELDKYFKNHTSPDVDLGDISGINASVVNIQKEIDRLNEVAKNLNESLIDLQELGKYEQYIK

SEQ ID NO: 1922 - protein, 1211 aa, Artificial Sequence
  SARS-CoV-2/USA/WA-UW292/2020__EPI_ISL_418077 spike protein (1-1211)(K986P_V987P_ H1048Q_H1064N_ H1083N_H1101N)
MFVFLVLLPLVSSQCVNLTTRTQLPPAYTNSFTRGVYYPDKVFRSSVLHSTQDLFLPFFSNVTWFHAIHVSGTNGTKRFDNPVLPFNDGVYFASTEKSNIIRGWIFGTTLDSKTQSLLIVNNATNVVIKVCEFQFCNDPFLGVYYHKNNKSWMESEFRVYSSANNCTFEYVSQPFLMDLEGKQGNFKNLREFVFKNIDGYFKIYSKHTPINLVRDLPQGFSALEPLVDLPIGINITRFQTLLALHRSYLTPGDSSSGWTAGAAAYYVGYLQPRTFLLKYNENGTITDAVDCALDPLSETKCTLKSFTVEKGIYQTSNFRVQPTESIVRFPNITNLCPFGEVFNATRFASVYAWNRKRISNCVADYSVLYNSASFSTFKCYGVSPTKLNDLCFTNVYADSFVIRGDEVRQIAPGQTGKIADYNYKLPDDFTGCVIAWNSNNLDSKVGGNYNYLYRLFRKSNLKPFERDISTEIYQASSTPCNGVEGFNCYFPLQSYGFQPTNGVGYQPYRVVVLSFELLHAPATVCGPKKSTNLVKNKCVNFNFNGLTGTGVLTESNKKFLPFQQFGRDIADTTDAVRDPQTLEILDITPCSFGGVSVITPGTNTSNQVAVLYQDVNCTEVPVAIHADQLTPTWRVYSTGSNVFQTRAGCLIGAEHVNNSYECDIPIGAGICASYQTQTNSPRRARSVASQSIIAYTMSLGAENSVAYSNNSIAIPTNFTISVTTEILPVSMTKTSVDCTMYICGDSTECSNLLLQYGSFCTQLNRALTGIAVEQDKNTQEVFAQVKQIYKTPPIKDFGGFNFSQILPDPSKPSKRSFIEDLLFNKVTLADAGFIKQYGDCLGDIAARDLICAQKFNGLTVLPPLLTDEMIAQYTSALLAGTITSGWTFGAGAALQIPFAMQMAYRFNGIGVTQNVLYENQKLIANQFNSAIGKIQDSLSSTASALGKLQDVVNQNAQALNTLVKQLSSNFGAISSVLNDILSRLDPPEAEVQIDRLITGRLQSLQTYVTQQLIRAAEIRASANLAATKMSECVLGQSKRVDFCGKGYQLMSFPQSAPHGVVFLNVTYVPAQEKNFTTAPAICNDGKAHFPREGVFVSNGTNWFVTQRNFYEPQIITTDNTFVSGNCDVVIGIVNNTVYDPLQPELDSFKEELDKYFKNHTSPDVDLGDISGINASVVNIQKEIDRLNEVAKNLNESLIDLQELGKYEQYIK

SEQ ID NO: 1923 - protein, 1211 aa, Artificial Sequence
  SARS-CoV-2/Iceland/192/2020__EPI_ISL_417819 spike protein (1-1211)(K986P_V987P_ H1048Q_H1064N_ H1083N_H1101N)
MFVFFVLLPLVSSQCVNLTTRTQLPPAYTNSFTRGVYYPDKVFRSSVLHSTQDLFLPFFSNVTWFHAIHVSGTNGTKRFDNPVLPFNDGVYFASTEKSNIIRGWIFGTTLDSKTQSLLIVNNATNVVIKVCEFQFCNDPFLGVYYHKNNKSWMESEFRVYSSANNCTFEYVSQPFLMDLEGKQGNFKNLREFVFKNIDGYFKIYSKHTPINLVRDLPQGFSALEPLVDLPIGINITRFQTLLALHRSYLTPGDSSSGWTAGAAAYYVGYLQPRTFLLKYNENGTITDAVDCALDPLSETKCTLKSFTVEKGIYQTSNFRVQPTESIVRFPNITNLCPFGEVFNATRFASVYAWNRKRISNCVADYSVLYNSASFSTFKCYGVSPTKLNDLCFTNVYADSFVIRGDEVRQIAPGQTGKIADYNYKLPDDFTGCVIAWNSNNLDSKVGGNYNYLYRLFRKSNLKPFERDISTEIYQAGSTPCNGVEGFNCYFPLQSYGFQPTNGVGYQPYRVVVLSFELLHAPATVCGPKKSTNLVKNKCVNFNFNGLTGTGVLTESNKKFLPFQQFGRDIADTTDAVRDPQTLEILDITPCSFGGVSVITPGTNTSNQVAVLYQGVNCTEVPVAIHADQLTPTWRVYSTGSNVFQTRAGCLIGAEHVNNSYECDIPIGAGICASYQTQTNSPRRARSVASQSIIAYTMSLGAENSVAYSNNSIAIPTNFTISVTTEILPVSMTKTSVDCTMYICGDSTECSNLLLQYGSFCTQLNRALTGIAVEQDKNTQEVFAQVKQIYKTPPIKDFGGFNFSQILPDPSKPSKRSFIEDLLFNKVTLADAGFIKQYGDCLGDIAARDLICAQKFNGLTVLPPLLTDEMIAQYTSALLAGTITSGWTFGAGAALQIPFAMQMAYRFNGIGVTQNVLYENQKLIANQFNSAIGKIQDSLSSTASALGKLQDVVNQNAQALNTLVKQLSSNFGAISSVLNDILSRLDPPEAEVQIDRLITGRLQSLQTYVTQQLIRAAEIRASANLAATKMSECVLGQSKRVDFCGKGYQLMSFPQSAPHGVVFLNVTYVPAQEKNFTTAPAICNDGKAHFPREGVFVSNGTNWFVTQRNFYEPQIITTDNTFVSGNCDVVIGIVNNTVYDPLQPELDSFKEELDKYFKNHTSPDVDLGDISGINASVVNIQKEIDRLNEVAKNLNESLIDLQELGKYEQYIK

SEQ ID NO: 1924 - protein, 1211 aa, Artificial Sequence
  SARS-CoV-2/Belgium/ULG-6939/2020__EPI_ISL_417020 spike protein (1-1211)(K986P_V987P_ H1048Q_H1064N_ H1083N_H1101N)
MFVFLVLLPLVSSQCVNLTTRTQLPPAYTNSFTRGVYYPDKVFRSSVLHSTQDLFLPFFSNVTWFHAIHVSGTNGTKRFDNPVLPFNDGVYFASTEKSNIIRGWIFGTTLDSKTQSLLIVNNATNVVIKVCEFQFCNDPFLGVYYHKNNKSWMESEFRVYSSANNCTFEYVSQPFLMDLEGKQGNFKNLREFVFKNIDGYFKIYSKHTPINLVRDLPQGFSALEPLVDLPIGINITRFQTLLALHRSYLTPGDSSSGWTAGAAAYYVGYLQPRTFLLKYNENGTITDAVDCALDPLSETKCTLKSFTVEKGIYQTSNFRVQPTESIVRFPNITNLCPFGEVFNATRFASVYAWNRKRISNCVADYSVLYNSASFSTFKCYGVSPTKLNDLCFTNVYADSFVIRGDEVRQIAPGQTGKIADYNYKLPDDFTGCVIAWNSNNLDSKVGGNYNYLYRLFRKSNLKPFERDISTEIYQAGSTPCNGVEGFNCYFPLQSYGFQPTNGVGYQPYRVVVLSFELLHAPATVCGPKKSTNLVKNKCVNFNFNGLTGTGVLTESNKKFLPFQQFGRDIADTTDAVRDPQTLEILDITPCSFGGVSVITPGTNTSNQVAVLYQGVNCTEVPVAIHADQLTPTWRVYSTGSNVFQTRAGCLIGAEHVNNSYECDIPIGAGICASYQTQTNSPRRARSVASQSIIAYTMSLGAENSVVYSNNSIAIPTNFTISVTTEILPVSMTKTSVDCTMYICGDSTECSNLLLQYGSFCTQLNRALTGIAVEQDKNTQEVFAQVKQIYKTPPIKDFGGFNFSQILPDPSKPSKRSFIEDLLFNKVTLADAGFIKQYGDCLGDIAARDLICAQKFNGLTVLPPLLTDEMIAQYTSALLAGTITSGWTFGAGAALQIPFAMQMAYRFNGIGVTQNVLYENQKLIANQFNSAIGKIQDSLSSTASALGKLQDVVNQNAQALNTLVKQLSSNFGAISSVLNDILSRLDPPEAEVQIDRLITGRLQSLQTYVTQQLIRAAEIRASANLAATKMSECVLGQSKRVDFCGKGYQLMSFPQSAPHGVVFLNVTYVPAQEKNFTTAPAICNDGKAHFPREGVFVSNGTNWFVTQRNFYEPQIITTDNTFVSGNCDVVIGIVNNTVYDPLQPELDSFKEELDKYFKNHTSPDVDLGDISGINASVVNIQKEIDRLNEVAKNLNESLIDLQELGKYEQYIK

SEQ ID NO: 1925 - protein, 1211 aa, Artificial Sequence
  SARS-CoV-2/France/HF2496/2020__EPI_ISL_418231 spike protein (1-1211)(K986P_V987P_ H1048Q_H1064N_ H1083N_H1101N)
MFVFLVLLPLVSSQCVNLTTRTQLPPAYTNSFTRGVYYPDKVFRSSVLHSTQDLFLPFFSNVTWFHAIHVSGTNGTKRFDNPVLPFNDGVYFASTEKSNIIRGWIFGTTLDSKTQSLLIVNNATNVVIKVCEFQFCNDPFLGVYYHKNNKSWMESEFRVYSSANNCTFEYVSQPFLMDLEGKQGNFKNLREFVFKNIDGYFKIYSKHTPINLVRDLPQGFSALEPLVDLPIGINITRFQTLLALHRSYLTPGDSSSGWTAGAAAYYVGYLQPRTFLLKYNENGTITDAVDCALDPLSETKCTLKSFTVEKGIYQTSNFRVQPTESIVRFPNITNLCPFGEVFNATRFASVYAWNRKRISNCVADYSVLYNSASFSTFKCYGVSPTKLNDLCFTNVYADSFVIRGDEVRQIAPGQTGKIADYNYKLPDDFTGCVIAWNSNNLDSKVGGNYNYLYRLFRKSNLKPFERDISTEIYQAGSTPCNGVEGFNCYFPLQSYGFQPTNGVGYQPYRVVVLSFELLHAPATVCGPKKSTNLVKNKCVNFNFNGLTGTGVLTESNKKFLPFQQFGRDIADTTDAVRDPQTLEILDITPCSFGGVSVITPGTNTSNQVAVLYQGVNCTEVPVAIHADQLTPTWRVYSTGSNVFQTRAGCLIGAEHVNNSYECDIPIGAGICASYQTQTNSPRRARSVASQSIIAYTMSLGAENSVAYSNNSIAIPTNFTISVTTEILPVSMTKTSVDCTMYICGDSTECSNLLLQYGSFCTQLNRALTGIAVEQDKNTQEVFAQVKQIYKTPPIKDFGGFNFSQILPDPSKPSKRSFIEDLLFNKVTLADAGFIKQYGDCLGDIVARDLICAQKFNGLTVLPPLLTDEMIAQYTSALLAGTITSGWTFGAGAALQIPFAMQMAYRFNGIGVTQNVLYENQKLIANQFNSAIGKIQDSLSSTASALGKLQDVVNQNAQALNTLVKQLSSNFGAISSVLNDILSRLDPPEAEVQIDRLITGRLQSLQTYVTQQLIRAAEIRASANLAATKMSECVLGQSKRVDFCGKGYQLMSFPQSAPHGVVFLNVTYVPAQEKNFTTAPAICNDGKAHFPREGVFVSNGTNWFVTQRNFYEPQIITTDNTFVSGNCDVVIGIVNNTVYDPLQPELDSFKEELDKYFKNHTSPDVDLGDISGINASVVNIQKEIDRLNEVAKNLNESLIDLQELGKYEQYIK

SEQ ID NO: 1926 - protein, 1211 aa, Artificial Sequence
  SARS-CoV-2/USA/WA-UW291/2020__EPI_ISL_418076 spike protein (1-1211)(K986P_V987P_ H1048Q_H1064N_ H1083N_H1101N)
MFVFLVLLPLVSSQCVNLTTRTQLPPAYTNSFTRGVYYPDKVFRSSVLHSTQDLFLPFFSNVTWFHAIHVSGTNGTKRFDNPVLPFNDGVYFASTEKSNIIRGWIFGTTLDSKTQSLLIVNNATNVVIKVCEFQFCNDPFLGVYYHKNNKSWMESEFRVYSSANNCTFEYVSQPFLMDLEGKQGNFKNLREFVFKNIDGYFKIYSKHTPINLVRDLPQGFSALEPLVDLPIGINITRFQTLLALHRSYLTPGDSSSGWTAGAAAYYVGYLQPRTFLLKYNENGTITDAVDCALDPLSETKCTLKSFTVEKGIYQTSNFRVQPTESIVRFPNITNLCPFGEVFNATRFASVYAWNRKRISNCVADYSVLYNSASFSTFKCYGVSPTKLNDLCFTNVYADSFVIRGDEVRQIAPGQTGKIADYNYKLPDDFTGCVIAWNSNNLDSKVGGNYNYLYRLFRKSNLKPFERDISTEIYQAGSTPCNGVEGFNCYFPLQSYGFQPTNGVGYQPYRVVVLSFELLHAPATVCGPKKSTNLVKNKCVNFNFNGLTGTGVLTESNKKFLPFQQFGRDIADTTDAVRDPQTLEILDITPCSFGGVSVITPGTNTSNQVAVLYQGVNCTEVPVAIHADQLTPTWRVYSTGSNVFQTRAGCLIGAEHVNNSYECDIPIGAGICASYQTQTNSPRRARSVASQSIIAYTMSLGAENSVAYSNNSIAIPTNFTISVTTEILPVSMTKTSVDCTMYICGDSTECSNLLLQYGSFCTQLNRALTGIAVEQDKNTQEVFAQVKQIYKTPPIKDFGGFNFSQILPDPSKPSKRSFIEDLLFNKVTLADAGFIKQYGDCLGDIAARDLICAQKFNGLTVLPPLLTDEMIAQYTSALLAGTITSGWTFGAGAALQIPFAMQMAYRFNGIGVTQNVLYENQKLIANQFNSAIGKIQYSLSSTASALGKLQDVVNQNAQALNTLVKQLSSNFGAISSVLNDILSRLDPPEAEVQIDRLITGRLQSLQTYVTQQLIRAAEIRASANLAATKMSECVLGQSKRVDFCGKGYQLMSFPQSAPHGVVFLNVTYVPAQEKNFTTAPAICNDGKAHFPREGVFVSNGTNWFVTQRNFYEPQIITTDNTFVSGNCDVVIGIVNNTVYDPLQPELDSFKEELDKYFKNHTSPDVDLGDISGINASVVNIQKEIDRLNEVAKNLNESLIDLQELGKYEQYIK

SEQ ID NO: 1927 - protein, 1211 aa, Artificial Sequence; identical to SEQ ID NO: 1890
  SARS-CoV-2/Portugal/PT0034/2020__EPI_ISL_418019 spike protein (1-1211)(K986P_V987P_ H1048Q_H1064N_ H1083N_H1101N)

SEQ ID NO: 1928 - protein, 1211 aa, Artificial Sequence
  SARS-CoV-2/Iceland/202/2020__EPI_ISL_417750 spike protein (1-1211)(K986P_V987P_ H1048Q_H1064N_ H1083N_H1101N)
MFVFLVLLPLVSSQCVNLTTRTQLPPAYTNSFTRGVYYPDKVFRSSVLHSTQDLFLPFFSNVTWFHAIHVSGTNGTKRFDNPVLPFNDGVYFASTEKSNIIRGWIFGTTLDSKTQSLLIVNNATNVVIKVCEFQFCNDPFLGVYYHKNNKSWMESEFRVYSSANNCTFEYVSQPFLMDLEGKQGNFKNLREFVFKNIDGYFKIYSKHTPINLVRDLPQGFSALEPLVDLPIGINITRFQTLLALHRSYLTPGDSSSGWTAGAAAYYVGYLQPRTFLLKYNENGTITDAVDCALDPLSETKCTLKSFTVEKGIYQTSNFRVQPTESIVRFPNITNLCPFGEVFNATRFASVYAWNRKRISNCVADYSVLYNSASFSTFKCYGVSPTKLNDLCFTNVYADSFVIRGDEVRQIAPGQTGKIADYNYKLPDDFTGCVIAWNSNNLDSKVGGNYNYLYRLFRKSNLKPFERDISTEIYQAGSTPCNGVEGFNCYFPLQSYGFQPTNGVGYQPYRVVVLSFELLHAPATVCGPKKSTNLVKNKCVNFNFNGLTGTGVLTESNKKFLPFQQFGRDIADTTDAVRDPQTLEILDITPCSFGGVSVITPGTNTSNQVAVLYQDVNCTEVPVAIHADQLTPTWRVYSTGSNVFQTRAGCLIGAEHVNNSYECDIPIGAGICASYQTQTNSPRRARSVASQSIIAYTMSLGAENSVAYSNNSIAIPTNFTISVTTEILPVSMTKTSVDCTMYICGDSTECSNLLLQYGSFCTQLNRALTGIAVEQDKNTQEVFAQVKQIYKTPPIKDFGGFNFSQILPDPSKPSKRSFIEDLLFNKVTLADAGFIKQYGDCLGDIAARDLICAQKFNGLTVLPPLLTDEMIAQYTSALLAGTITSGWTFGAGAALQIPFAMQMAYRFNGIGVTQNVLYENQKLIANQFNSAIGKIQDSLSSTASALGKLQDVVNQNAQALNTLVKQLSSNFGAISSVLNDILSRLDPPEAEVQIDRLITGRLQSLQTYVTQQLIRAAEIRASANLAATKMSECVLGQSKRVDFCGKGYQLMSFPQSAPHGVVFLNVTYVPAQEKNFTTAPAICNDGKAHFPREGVFVSNGTNWFVTQRNFYEPQIITTDNTFVSGNCDVVIGIVNNTVYDPLQPELDSFKEELDKYFKNHTSPDVDLGDIPGINASVVNIQKEIDRLNEVAKNLNESLIDLQELGKYEQYIK

SEQ ID NO: 1929 - protein, 1211 aa, Artificial Sequence
  SARS-CoV-2/USA/WA-UW261/2020__EPI_ISL_418046 spike protein (1-1211)(K986P_V987P_ H1048Q_H1064N_ H1083N_H1101N)
MFVFLVLLPLVSSQCVNLTTRTQLPPAYTNSFTRGVYYPDKVFRSSVLHSTQDLFLPFFSNVTWFHAIHVSGTNGTKRFDNPVLPFNDGVYFASTEKSNIIRGWIFGTTLDSKTQSLLIVNNATNVVIKVCEFQFCNDPFLGVYYHKNNKSWMESEFRVYSSANNCTFEYVSQPFLMDLEGKQGNFKNLREFVFKNIDGYFKIYSKHTPINLVRDLPQGFSALEPLVDLPIGINITRFQTLLALHRSYLTPGDSSSGWTAGAAAYYVGYLQPRTFLLKYNENGTITDAVDCALDPLSETKCTLKSFTVEKGIYQTSNFRVQPTESIVRFPNITNLCPFGEVFNATRFTSVYAWNRKRISNCVADYSVLYNSASFSTFKCYGVSPTKLNDLCFTNVYADSFVIRGDEVRQIAPGQTGKIADYNYKLPDDFTGCVIAWNSNNLDSKVGGNYNYLYRLFRKSNLKPFERDISTEIYQAGSTPCNGVEGFNCYFPLQSYGFQPTNGVGYQPYRVVVLSFELLHAPATVCGPKKSTNLVKNKCVNFNFNGLTGTGVLTESNKKFLPFQQFGRDIADTTDAVRDPQTLEILDITPCSFGGVSVITPGTNTSNQVAVLYQDVNCTEVPVAIHADQLTPTWRVYSTGSNVFQTRAGCLIGAEHVNNSYECDIPIGAGICASYQTQTNSPRRARSVASQSIIAYTMSLGAENSVAYSNNSIAIPTNFTISVTTEILPVSMTKTSVDCTMYICGDSTECSNLLLQYGSFCTQLNRALTGIAVEQDKNTQEVFAQVKQIYKTPPIKDFGGFNFSQILPDPSKPSKRSFIEDLLFNKVTLADAGFIKQYGDCLGDIAARDLICAQKFNGLTVLPPLLTDEMIAQYTSALLAGTITSGWTFGAGAALQIPFAMQMAYRFNGIGVTQNVLYENQKLIANQFNSAIGKIQDSLSSTASALGKLQDVVNQNAQALNTLVKQLSSNFGAISSVLNDILSRLDPPEAEVQIDRLITGRLQSLQTYVTQQLIRAAEIRASANLAATKMSECVLGQSKRVDFCGKGYQLMSFPQSAPHGVVFLNVTYVPAQEKNFTTAPAICNDGKAHFPREGVFVSNGTNWFVTQRNFYEPQIITTDNTFVSGNCDVVIGIVNNTVYDPLQPELDSFKEELDKYFKNHTSPDVDLGDISGINASVVNIQKEIDRLNEVAKNLNESLIDLQELGKYEQYIK

SEQ ID NO: 1930 - protein, 1211 aa, Artificial Sequence
  SARS-CoV-2/Portugal/PT0035/2020__EPI_ISL_418020 spike protein (1-1211)(K986P_V987P_ H1048Q_H1064N_ H1083N_H1101N)
MFVFLVLLPLVSSQCVNLTTRTQLPPAYTNSFTRGVYYPDKVFRSSVLHSTQDLFLPFFSNVTWFHAIHVSGTNGTKRFDNPVLPFNDGVYFASTEKSNIIRGWIFGTTLDSKTQSLLIVNNATNVVIKVCEFQFCNDPFLGVYYHKNNKSWMESEFRVYSSANNCTFEYVSQPFLMDLEGKQGNFKNLREFVFKNIDGYFKIYSKHTPINLVRDLPQGFSALEPLVDLPIGINITRFQTLLALHRSYLTPGDSSSGWTAGAAAYYVGYLQPRTFLLKYNENGTITDAVDCALDPLSETKCTLKSFTVEKGIYQTSNFRVQPTESIVRFPNITNLCPFGEVFNATRFASVYAWNRKRISNCVADYSVLYNSASFSTFKCYGVSPTKLNDLCFTNVYADSFVIRGDEVRQIAPGQTGKIADYNYKLPDDFTGCVIAWNSNNLDSKVGGNYNYLYRLFRKSNLKPFERDISTEIYQAGSTPCNGVEGFNCYFPLQSYGFQPTNGVGYQPYRVVVLSFELLHAPATVCGPKKSTNLVKNKCVNFNFNGLTGTGVLTESNKKFLPFQQFGRDIADTTDAVRDPQTLEILDITPCSFGGVSVITPGTNTSNQVAVLYQDVNCTEVPVAIHADQLTPTWRVYSTGSNVFQTRAGCLIGAEHVNNSYECDIPIGAGICASYQTQTNSPRRARSVASQSIIAYTMSLGAENSVAYSNNSIAIPTNFTISVTTEILPVSMTKTSVDCTMYICGDSTECSNLLLQYGSFCTQLNRALTGIAVEQDKNTQEVFAQVKQIYKTPPIKDFGGFNFSQILPDPSKPSKRSFIEDLLFNKVTLADAGFIKQYGDCLGDISARDLICAQKFNGLTVLPPLLTDEMIAQYTSALLAGTITSGWTFGAGAALQIPFAMQMAYRFNGIGVTQNVLYENQKLIANQFNSAIGKIQDSLSSTASALGKLQDVVNQNAQALNTLVKQLSSNFGAISSVLNDILSRLDPPEAEVQIDRLITGRLQSLQTYVTQQLIRAAEIRASANLAATKMSECVLGQSKRVDFCGKGYQLMSFPQSAPHGVVFLNVTYVPAQEKNFTTAPAICNDGKAHFPREGVFVSNGTNWFVTQRNFYEPQIITTDNTFVSGNCDVVIGIVNNTVYDPLQPELDSFKEELDKYFKNHTSPDVDLGDISGINASVVNIQKEIDRLNEVAKNLNESLIDLQELGKYEQYIK

SEQ ID NO: 1931 - protein, 1211 aa, Artificial Sequence
  SARS-CoV-2/USA/NY-NYUMC7/2020__EPI_ISL_418192 spike protein (1-1211)(K986P_V987P_ H1048Q_H1064N_ H1083N_H1101N)
MFVFLVLLPLVSSQCVNLTTRTQLPPAYTNSFTRGVYYPDKVFRSSVLHSTQDLFLPFFSNVTWFHAIHVSGTNGTKRFDNPVLPFNDGVYFASTEKSNIIRGWIFGTTLDSKTQSLLIVNNATNVVIKVCEFQFCNDPFLGVYHHKNNKSWMESEFRVYSSANNCTFEYVSQPFLMDLEGKQGNFKNLREFVFKNIDGYFKIYSKHTPINLVRDLPQGFSALEPLVDLPIGINITRFQTLLALHRSYLTPGDSSSGWTAGAAAYYVGYLQPRTFLLKYNENGTITDAVDCALDPLSETKCTLKSFTVEKGIYQTSNFRVQPTESIVRFPNITNLCPFGEVFNATRFASVYAWNRKRISNCVADYSVLYNSASFSTFKCYGVSPTKLNDLCFTNVYADSFVIRGDEVRQIAPGQTGKIADYNYKLPDDFTGCVIAWNSNNLDSKVGGNYNYLYRLFRKSNLKPFERDISTEIYQAGSTPCNGVEGFNCYFPLQSYGFQPTNGVGYQPYRVVVLSFELLHAPATVCGPKKSTNLVKNKCVNFNFNGLTGTGVLTESNKKFLPFQQFGRDIADTTDAVRDPQTLEILDITPCSFGGVSVITPGTNTSNQVAVLYQGVNCTEVPVAIHADQLTPTWRVYSTGSNVFQTRAGCLIGAEHVNNSYECDIPIGAGICASYQTQTNSPRRARSVASQSIIAYTMSLGAENSVAYSNNSIAIPTNFTISVTTEILPVSMTKTSVDCTMYICGDSTECSNLLLQYGSFCTQLNRALTGIAVEQDKNTQEVFAQVKQIYKTPPIKDFGGFNFSQILPDPSKPSKRSFIEDLLFNKVTLADAGFIKQYGDCLGDIAARDLICAQKFNGLTVLPPLLTDEMIAQYTSALLAGTITSGWTFGAGAALQIPFAMQMAYRFNGIGVTQNVLYENQKLIANQFNSAIGKIQDSLSSTASALGKLQDVVNQNAQALNTLVKQLSSNFGAISSVLNDILSRLDPPEAEVQIDRLITGRLQSLQTYVTQQLIRAAEIRASANLAATKMSECVLGQSKRVDFCGKGYQLMSFPQSAPHGVVFLNVTYVPAQEKNFTTAPAICNDGKAHFPREGVFVSNGTNWFVTQRNFYEPQIITTDNTFVSGNCDVVIGIVNNTVYDPLQPELDSFKEELDKYFKNHTSPDVDLGDISGINASVVNIQKEIDRLNEVAKNLNESLIDLQELGKYEQYIK

SEQ ID NO: 1932 - protein, 1211 aa, Artificial Sequence
  SARS-CoV-2/Iceland/189/2020__EPI_ISL_417709 spike protein (1-1211)(K986P_V987P_ H1048Q_H1064N_ H1083N_H1101N)
MFVFLVLLPLVSSQCVNLTTRTQLPPAYTNSFTRGVYYPDKVFRSSVLHSTQDLFLPFFSNVTWFHAIHVSGTNGTKRFDNPVLPFNDGVYFASTEKSNIIRGWIFGTTLDSKTQSLLIVNNATNVVIKVCEFQFCNDPFLGVYYHKNNKSWMESEFRVYSSANNCTFEYVSQPFLMDLEGKQGNFKNLREFVFKNIDGYFKIYSKHTPINLVRDLPQGFSALEPLVDLPIGINITRFQTLLALHRSYLTPGDSSSGWTAGAAAYYVGYLQPRTFLLKYNENGTITDAVDCALDPLSETKCTLKSFTVEKGIYQTSNFRVQPTESIVRFPNITNLCPFGEVFNATRFASVYAWNRKRISNCVADYSVLYNSASFSTFKCYGVSPTKLNDLCFTNVYADSFVIRGDEVRQIAPGQTGKIADYNYKLPDDFTGCVIAWNSNNLDSKVGGNYNYLYRLFRKSNLKPFERDISTEIYQAGSTPCNGVEGFNCYFPLQSYGFQPTNGVGYQPYRVVVLSFELLHAPATVCGPKKSTNLVKNKCVNFNFNGLTGTGVLTESNKKFLPFQQFGRDIADTTDAVRDPQTLEILDITPCSFGGVSVITPGTNTSNQVAVLYQGVNCTEVPVAIHADQLTPTWRVYSTGSNVFQTRAGCLIGAEHVNNSYECDIPIGAGICASYQTQTNSPRRARSVASQSIIAYTMSLGAENSVAYSNNSIAIPTNFTISVTTEILPVSMTKTSVDCTMYICGDSTECSNLLLQYGSFCTQLNRALTGIAVEQDKNTQEVFAQVKQIYKTPPIKDFGGFNFSQILPDPSKPSKRSFIEDLLFNKVTLADAGFTKQYGDCLGDIAARDLICAQKFNGLTVLPPLLTDEMIAQYTSALLAGTITSGWTFGAGAALQIPFAMQMAYRFNGIGVTQNVLYENQKLIANQFNSAIGKIQDSLSSTASALGKLQDVVNQNAQALNTLVKQLSSNFGAISSVLNDILSRLDPPEAEVQIDRLITGRLQSLQTYVTQQLIRAAEIRASANLAATKMSECVLGQSKRVDFCGKGYQLMSFPQSAPHGVVFLNVTYVPAQEKNFTTAPAICNDGKAHFPREGVFVSNGTNWFVTQRNFYEPQIITTDNTFVSGNCDVVIGIVNNTVYDPLQPELDSFKEELDKYFKNHTSPDVDLGDISGINASVVNIQKEIDRLNEVAKNLNESLIDLQELGKYEQYIK

SEQ ID NO: 1933 - protein, 1211 aa, Artificial Sequence
  SARS-CoV-2/Australia/NSW56/2020__EPI_ISL_417408 spike protein (1-1211)(K986P_V987P_ H1048Q_H1064N_ H1083N_H1101N)
MFVFLVLLPLVSSQCVNLTTRTQLPPAYTNSFTRGVYYPDKVFRSSVLHSTQDLFLPFFSNVTWFHAIHVSGTNGTKRFDNPVLPFNDGVYFASTEKSNIIRGWIFGTTLDSKTQSLLIVNNATNVVIKVCEFQFCNDPFLGVYYHKNNKSWMESEFRVYSSANNCTFEYVSQPFLMDLEGKQGNFKNLREFVFKNIDGYFKIYSKHTPINLVRDLPQGFSALEPLVDLPIGINITRFQTLLALHRSYLTPGDSSSGWTAGAAAYYVGYLQPRTFLLKYNENGTITDAVDCALDPLSETKCTLKSFTVEKGIYQTSNFRVQPTESIVRFPNITNLCPFGEVFNATRFASVYAWNRKRISNCVADYSVLYNSASFSTFKCYGVSPTKLNDLCFTNVYADSFVIRGDEVRQIAPGQTGKIADYNYKLPDDFTGCVIAWNSNNLDSKVGGNYNYLYRLFRKSNLKPFERDISTEIYQAGSTPCNGVEGFNCYFPLQSYGFQPTNGVGYQPYRVVVLSFELLHAPATVCGPKKSTNLVKNKCVNFNFNGLTGTGVLTESNKKFLPFQQFGRDIADTTDAVRDPQTLEILDITPCSFGGVSVITPGTNTSNQVAVLYQDVNCTEVPVAIHADQLTPTWRVYSTGSNVFQTRAGCLIGAEHVNNSYECDIPIGAGICASYQTQTNSPRRARSVASQSIIAYTMSLGAENSVAYSNNSIAIPTNFTISVTTEILPVSMTKTSVDCTMYICGDSTECSNLLLQYGSFCTQLNRALTGIAVEQDKNTQEVFAQVKQIYKTPPIKDFGGFNFSQILPDSSKPSKRSFIEDLLFNKVTLADAGFIKQYGDCLGDIAARDLICAQKFNGLTVLPPLLTDEMIAQYTSALLAGTITSGWTFGAGAALQIPFAMQMAYRFNGIGVTQNVLYENQKLIANQFNSAIGKIQDSLSSTASALGKLQDVVNQNAQALNTLVKQLSSNFGAISSVLNDILSRLDPPEAEVQIDRLITGRLQSLQTYVTQQLIRAAEIRASANLAATKMSECVLGQSKRVDFCGKGYQLMSFPQSAPHGVVFLNVTYVPAQEKNFTTAPAICNDGKAHFPREGVFVSNGTNWFVTQRNFYEPQIITTDNTFVSGNCDVVIGIVNNTVYDPLQPELDSFKEELDKYFKNHTSPDVDLGDISGINASVVNIQKEIDRLNEVAKNLNESLIDLQELGKYEQYIK

SEQ ID NO: 1934 - protein, 1211 aa, Artificial Sequence
  SARS-CoV-2/Iceland/280/2020__EPI_ISL_417608 spike protein (1-1211)(K986P_V987P_ H1048Q_H1064N_ H1083N_H1101N)
MFVFLVLLPLVSSQCVNLTTRTQLPPAYTNSFTRGVYYPDKVFRSSVLHSTQDLFLPFFSNVTWFHAIHVSGTNGTKRFDNPVLPFNDGVYFASTEKSNIIRGWIFGTTLDSKTQSLLIVNNATNVVIKVCEFQFCNDPFLGVYYHKNNKSWMESEFRVYSSANNCTFEYVSQPFLMDLEGKQGNFKNLREFVFKNIDGYFKIYSKHTPINLVRDLPQGFSALEPLVDLPIGINITRFQTLLALHRSYLTPGDSSSGWTAGAAAYYVGYLQPRTFLLKYNENGTITDAVDCALDPLSETKCTLKSFTVEKGIYQTSNFRVQPTESIVRFPNITNLCPFGEVFNATRFASVYAWNRKRISNCVADYSVLYNSASFSTFKCYGVSPTKLNDLCFTNVYADSFVIRGDEVRQIAPGQTGKIADYNYKLPDDFTGCVIAWNSNNLDSKVGGNYNYLYRLFRKSNLKPFERDISTEIYQAGSTPCNGVEGFNCYFPLQSYGFQPTNGVGYQPYRVVVLSFELLHAPATVCGPKKSTNLVKNKCVNFNFNGLTGTGVLTESNKKFLPFQQFGRDIADTTDAVRDPQTLEILDITPCSFGGVSVITPGTNTSNQVAVLYQGVNCTEVPVAIHADQLTPTWRVYSTGSNVFQTRAGCLIGAEHVNNSYECDIPIGAGICASYHTQTNSPRRARSVASQSIIAYTMSLGAENSVAYSNNSIAIPTNFTISVTTEILPVSMTKTSVDCTMYICGDSTECSNLLLQYGSFCTQLNRALTGIAVEQDKNTQEVFAQVKQIYKTPPIKDFGGFNFSQILPDPSKPSKRSFIEDLLFNKVTLADAGFIKQYGDCLGDIAARDLICAQKFNGLTVLPPLLTDEMIAQYTSALLAGTITSGWTFGAGAALQIPFAMQMAYRFNGIGVTQNVLYENQKLIANQFNSAIGKIQDSLSSTASALGKLQDVVNQNAQALNTLVKQLSSNFGAISSVLNDILSRLDPPEAEVQIDRLITGRLQSLQTYVTQQLIRAAEIRASANLAATKMSECVLGQSKRVDFCGKGYQLMSFPQSAPHGVVFLNVTYVPAQEKNFTTAPAICNDGKAHFPREGVFVSNGTNWFVTQRNFYEPQIITTDNTFVSGNCDVVIGIVNNTVYDPLQPELDSFKEELDKYFKNHTSPDVDLGDISGINASVVNIQKEIDRLNEVAKNLNESLIDLQELGKYEQYIK

SEQ ID NO: 1935 - protein, 1211 aa, Artificial Sequence; identical to SEQ ID NO: 1890
  SARS-CoV-2/Iceland/247/2020__EPI_ISL_417575 spike protein (1-1211)(K986P_V987P_ H1048Q_H1064N_ H1083N_H1101N)

SEQ ID NO: 1936 - protein, 1211 aa, Artificial Sequence
  SARS-CoV-2/Iceland/238/2020__EPI_ISL_417566 spike protein (1-1211)(K986P_V987P_ H1048Q_H1064N_ H1083N_H1101N)
MFVFLVLLPLVSSQCVNLTTRTQLPPAYTNSFTRGVYYPDKVFRSSVLHSTQDLFLPFFSNVTWFHAIHVSGTNGTKRFDNPVLPFNDGVYFASTEKSNIIRGWIFGTTLDSKTQSLLIVNNATNVVIKVCEFQFCNDPFLGVYYHKNNKSWMESEFRVYSSANNCTFEYVSQPFLMDLEGKQGNFKNLREFVFKNIDGYFKIYSKHTPINLVRDLPQGFSALEPLVDLPIGINITRFQTLLALHRSYLTPGDSSSGWTAGAAAYYVGYLQPRTFLLKYNENGTITDAVDCALDPLSETKCTLKSFTVEKGIYQTSNFRVQPTESIVRFPNITNLCPFGEVFNATRFASVYAWNRKRISNCVADYSVLYNSASFSTFKCYGVSPTKLNDLCFTNVYADSFVIRGDEVRQIAPGQTGKIADYNYKLPDDFTGCVIAWNSNNLDSKVGGNYNYLYRLFRKSNLKPFERDISTEIYQAGSTPCNGVEGFNCYFPLQSYGFQPTNGVGYQPYRVVVLSFELLHAPATVCGPKKSTNLVKNKCVNFNFNGLTGTGVLTESNKKFLPFQQFGRDIADTTDAVRDPQTLEILDITPCSFGGVSVITPGTNTSNQVAVLYQGVNCTEVPVAIHADQLTPTWRVYSTGSNVFQTRAGCLIGAEHVNNSYECDIPIGAGICASYQTQTNSPRRARSVASQSIIAYTMSLGAENSVAYSNNSIAIPTNFTISVTTEILPVSMTKTSVDCTMYICGDSTECSNLLLQYGSFCTQLNRALTGIAVEQDKNTQEVFAQVKQIYKTPPIKDFGGFNFSQILPDPSKPSKRSFIEDLLFNKVTLADVGFIKQYGDCLGDIAARDLICAQKFNGLTVLPPLLTDEMIAQYTSALLAGTITSGWTFGAGAALQIPFAMQMAYRFNGIGVTQNVLYENQKLIANQFNSAIGKIQDSLSSTASALGKLQDVVNQNAQALNTLVKQLSSNFGAISSVLNDILSRLDPPEAEVQIDRLITGRLQSLQTYVTQQLIRAAEIRASANLAATKMSECVLGQSKRVDFCGKGYQLMSFPQSAPHGVVFLNVTYVPAQEKNFTTAPAICNDGKAHFPREGVFVSNGTNWFVTQRNFYEPQIITTDNTFVSGNCDVVIGIVNNTVYDPLQPELDSFKEELDKYFKNHTSPDVDLGDISGINASVVNIQKEIDRLNEVAKNLNESLIDLQELGKYEQYIK

SEQ ID NO: 1937 - protein, 1211 aa, Artificial Sequence
  SARS-CoV-2/Greece/16/2020__EPI_ISL_418265 spike protein (1-1211)(K986P_V987P_ H1048Q_H1064N_ H1083N_H1101N)
MFVFLVLLPLVSSQCVNLTTRTQLPPAYTNSFTRGVYYPDKVFRSSVLHSTQDLFLPFFSNVTWFHAIHVSGTNGTKRFDNPVLPFNDGVYFASTEKSNIIRGWIFGTTLDSKTQSLLIVNNATNVVIKVCEFQFCNDPFLGVYYHKNNKSWMESEFRVYSSANNCTFEYVSQPFLMDLEGKQGNFKNLREFVFKNVDGYFKIYSKHTPINLVRDLPQGFSALEPLVDLPIGINITRFQTLLALHRSYLTPGDSSSGWTAGAAAYYVGYLQPRTFLLKYNENGTITDAVDCALDPLSETKCTLKSFTVEKGIYQTSNFRVQPTESIVRFPNITNLCPFGEVFNATRFASVYAWNRKRISNCVADYSVLYNSASFSTFKCYGVSPTKLNDLCFTNVYADSFVIRGDEVRQIAPGQTGKIADYNYKLPDDFTGCVIAWNSNNLDSKVGGNYNYLYRLFRKSNLKPFERDISTEIYQAGSTPCNGVEGFNCYFPLQSYGFQPTNGVGYQPYRVVVLSFELLHAPATVCGPKKSTNLVKNKCVNFNFNGLTGTGVLTESNKKFLPFQQFGRDIADTTDAVRDPQTLEILDITPCSFGGVSVITPGTNTSNQVAVLYQDVNCTEVPVAIHADQLTPTWRVYSTGSNVFQTRAGCLIGAEHVNNSYECDIPIGAGICASYQTQTNSPRRARSVASQSIIAYTMSLGAENSVAYSNNSIAIPTNFTISVTTEILPVSMTKTSVDCTMYICGDSTECSNLLLQYGSFCTQLNRALTGIAVEQDKNTQEVFAQVKQIYKTPPIKDFGGFNFSQILPDPSKPSKRSFIEDLLFNKVTLADAGFIKQYGDCLGDIAARDLICAQKFNGLTVLPPLLTDEMIAQYTSALLAGTITSGWTFGAGAALQIPFAMQMAYRFNGIGVTQNVLYENQKLIANQFNSAIGKIQDSLSSTASALGKLQDVVNQNAQALNTLVKQLSSNFGAISSVLNDILSRLDPPEAEVQIDRLITGRLQSLQTYVTQQLIRAAEIRASANLAATKMSECVLGQSKRVDFCGKGYQLMSFPQSAPHGVVFLNVTYVPAQEKNFTTAPAICNDGKAHFPREGVFVSNGTNWFVTQRNFYEPQIITTDNTFVSGNCDVVIGIVNNTVYDPLQPELDSFKEELDKYFKNHTSPDVDLGDISGINASVVNIQKEIDRLNEVAKNLNESLIDLQELGKYEQYIK

SEQ ID NO: 1938 - protein, 1211 aa, Artificial Sequence
  SARS-CoV-2/Iceland/319/2020__EPI_ISL_417648 spike protein (1-1211)(K986P_V987P_ H1048Q_H1064N_ H1083N_H1101N)
MFVFLVLLPLVSSQCVNLTTRTQLPPAYTNSFTRGVYYPDKVFRSSVLHSTQDLFLPFFSNVTWFHAIHVSGTNGTKRFDNPVLPFNDGVYFASTEKSNIIRGWIFGTTLDSKTQSLLIVNNATNVVIKVCEFQFCNDPFLGVYYHKNNKSWMESEFRVYSSANNCTFEYVSQPFLIDLEGKQGNFKNLREFVFKNIDGYFKIYSKHTPINLVRDLPQGFSALEPLVDLPIGINITRFQTLLALHRSYLTPGDSSSGWTAGAAAYYVGYLQPRTFLLKYNENGTITDAVDCALDPLSETKCTLKSFTVEKGIYQTSNFRVQPTESIVRFPNITNLCPFGEVFNATRFASVYAWNRKRISNCVADYSVLYNSASFSTFKCYGVSPTKLNDLCFTNVYADSFVIRGDEVRQIAPGQTGKIADYNYKLPDDFTGCVIAWNSNNLDSKVGGNYNYLYRLFRKSNLKPFERDISTEIYQAGSTPCNGVEGFNCYFPLQSYGFQPTNGVGYQPYRVVVLSFELLHAPATVCGPKKSTNLVKNKCVNFNFNGLTGTGVLTESNKKFLPFQQFGRDIADTTDAVRDPQTLEILDITPCSFGGVSVITPGTNTSNQVAVLYQGVNCTEVPVAIHADQLTPTWRVYSTGSNVFQTRAGCLIGAEHVNNSYECDIPIGAGICASYQTQTNSPRRARSVASQSIIAYTMSLGAENSVAYSNNSIAIPTNFTISVTTEILPVSMTKTSVDCTMYICGDSTECSNLLLQYGSFCTQLNRALTGIAVEQDKNTQEVFAQVKQIYKTPPIKDFGGFNFSQILPDPSKPSKRSFIEDLLFNKVTLADAGFIKQYGDCLGDIAARDLICAQKFNGLTVLPPLLTDEMIAQYTSALLAGTITSGWTFGAGAALQIPFAMQMAYRFNGIGVTQNVLYENQKLIANQFNSAIGKIQDSLSSTASALGKLQDVVNQNAQALNTLVKQLSSNFGAISSVLNDILSRLDPPEAEVQIDRLITGRLQSLQTYVTQQLIRAAEIRASANLAATKMSECVLGQSKRVDFCGKGYQLMSFPQSAPHGVVFLNVTYVPAQEKNFTTAPAICNDGKAHFPREGVFVSNGTNWFVTQRNFYEPQIITTDNTFVSGNCDVVIGIVNNTVYDPLQPELDSFKEELDKYFKNHTSPDVDLGDISGINASVVNIQKEIDRLNEVAKNLNESLIDLQELGKYEQYIK

SEQ ID NO: 1939 - protein, 1211 aa, Artificial Sequence
  SARS-CoV-2/Congo/94/2020__EPI_ISL_417947 spike protein (1-1211)(K986P_V987P_ H1048Q_H1064N_ H1083N_H1101N)
MFVFLVLLPLVSSQCVNLTTRTQLPPAYTNSFTRGVYYPDKVFRSSVLHSTQDLFLPFFSNVTWFHAIHVSGTNGTKRFDNPVLPFNDGVYFASTEKSNIIRGWIFGTTLDSKTQSLLIVNNATNVVIKVCEFQFCNDPFLGVYYHKNNKSWMESEFRVYSSANNCTFEYVSQPFLMDLEGKQGNFKNLREFVFKNIDGYFKIYSKHTPINLVRDLPQGFSALEPLVDLPIGINITRFQTLLALHRSYLTPGDSSSGWTAGAAAYYVGYLQPRTFLLKYNENGTITDAVDCALDPLSETKCTLKSFTVEKGIYQTSNFRVQPTESIVRFPNITNLCPFGEVFNATRFASVYAWNRKRISNCVADYSVLYNSASFSTFKCYGVSPTKLNDLCFTNVYADSFVIRGDEVRQIAPGQTGKIADYNYKLPDDFTGCVIAWNSNNLDSKVGGNYNYLYRLFRKSNLKPFERDISTEIYQAGSTPCNGVEGFNCYFPLQSYGFQPTNGVGYQPYRVVVLSFELLHAPATVCGPKKSTNLVKNKCVNFNFNGLTGTGVLTESNKKFLPFQQFGRDIADTTDAVRDPQTLEILDITPCSFGGVSVITPGTNTSNQVAVLYQGVNCTEVPVAIHADQLTPTWRVYSTGSNVFQTRAGCLIGAEHVNNSYECDIPIGAGICASYQTQTNSPRRARSVASQSIIAYTMSLGAENSVAYSNNSIAIPTNFTISVTTEILPVSMTKTSVDCTMYICGDSTECSNLLLQYGSFCTQLNRALTGIAVEQDKNTQEVFAQVKQIYKTPPIKDFGGFNFSQILPDPSKPSKRSFIEDILFNKVTLADAGFIKQYGDCLGDIAARDLICAQKFNGLTVLPPLLTDEMIAQYTSALLAGTITSGWTFGAGAALQIPFAMQMAYRFNGIGVTQNVLYENQKLIANQFNSAIGKIQDSLSSTASALGKLQDVVNQNAQALNTLVKQLSSNFGAISSVLNDILSRLDPPEAEVQIDRLITGRLQSLQTYVTQQLIRAAEIRASANLAATKMSECVLGQSKRVDFCGKGYQLMSFPQSAPHGVVFLNVTYVPAQEKNFTTAPAICNDGKAHFPREGVFVSNGTNWFVTQRNFYEPQIITTDNTFVSGNCDVVIGIVNNTVYDPLQPELDSFKEELDKYFKNHTSPDVDLGDISGINASVVNIQKEIDRLNEVAKNLNESLIDLQELGKYEQYIK

SEQ ID NO: 1940 - protein, 1211 aa, Artificial Sequence
  SARS-CoV-2/Congo/158/2020__EPI_ISL_417950 spike protein (1-1211)(K986P_V987P_ H1048Q_H1064N_ H1083N_H1101N)
MFVFLVLLPLVSSQCVNLTTRTQLPPAYTNSFTRGVYYPDKVFRSSVLHSTQDLFLPFFSNVTWFHAIHVSGTNGTKRFDNPVLPFNDGVYFASTEKSNIIRGWIFGTTLDSKTQSLLIVNNATNVVIKVCEFQFCNDPFLGVYYHKNNKSWMESEFRVYSSANNCTFEYVSQPFLMDLEGKQGNFKNLREFVFKNIDGYFKIYSKHTPINLVRDLPQGFSALEPLVDLPIGINITRFQTLLALHRSYLTPGDSSSGWTAGAAAYYVGYLQPRTFLLKYNENGTITDAVDCALDPLSETKCTLKSFTVEKGIYQTSNFRVQPTESIVRFPNITNLCPFGEVFNATRFASVYAWNRKRISNCVADYSVLYNSASFSTFKCYGVSPTKLNDLCFTNVYADSFVIRGDEVRQIAPGQTGKIADYNYKLPDDFTGCVIAWNSNNLDSKVGGNYNYLYRLFRKSNLKPFERDISTEIYQAGSTPCNGVEGFNCYFPLQSYGFQPTNGVGYQPYRVVVLSFELLHAPATVCGPKKSTNLVKNKCVNFNFNGLTGTGVLTESNKKFLPFQQFGRDIADTTDAVRDPQTLEILDITPCSFGGVSVITPGTNTSNQVAVLYQDVNCTEVPVAIHADQLTPTWRVYSTGSNVFQTRAGCLIGAEHVNNSYECDIPIGAGICASYQTQTNSPRRARSVASQSIIAYTMSLGAENSVAYSNNSIAIPTNFTISVTTEILPVSMTKTSVDCTMYICGDSTECSNLLLQYGSFCTQLNRALTGIAVEQDKNTQEVFAQVKQIYKTPPIKDFGGFNFSQILPDPSKPSKRSFIEDLLFNKVTLADAGFIKQYGDCLGDIAARDLICAQKFNGLTVLPPLLTDEMIAQYTSALLAGTITSGWTFGAGAALQIPFAMQMAYRFNGIGVTQNVLYENQKLIANQFNSAIGKIQDSLSSTASALGKLQDVVNQNAQALNTLVKQLSSNFGAISSVLNDILSRLDPPEAEVQIDRLITGRLQSLQTYVTQQLIRAAEIRASANLAATKMSECVLGQSKRVDFCGKGYQLMSFPQSAPHGVVFLNVTYVPAQEKNFTTAPAICNDGKAHFPREGVFVSNGTNWFVTQRNFYEPQIITTDNTFLSGNCDVVIGIVNNTVYDPLQPELDSFKEELDKYFKNHTSPDVDLGDISGINASVVNIQKEIDRLNEVAKNLNESLIDLQELGKYEQYIK

SEQ ID NO: 1941 - protein, 1211 aa, Artificial Sequence
  SARS-CoV-2/USA/UT-00034/2020__EPI_ISL_417977 spike protein (1-1211)(K986P_V987P_ H1048Q_H1064N_ H1083N_H1101N)
MFVFLVLLPLVSSQCVNLTTRTQLPPAYTNSFTRGVYYPDKVFRSSVLHSTQDLFLPFFSNVTWFHAIHVSGTNGTKRFDNPVLPFNDGVYFASTEKSNIIRGWIFGTTLDSKTQSLLIVNNATNVVIKVCEFQFCNDPFLGVYYYKNNKSWMESEFRVYSSANNCTFEYVSQPFLMDLEGKQGNFKNLREFVFKNIDGYFKIYSKHTPINLVRDLPQGFSALEPLVDLPIGINITRFQTLLALHRSYLTPGDSSSGWTAGAAAYYVGYLQPRTFLLKYNENGTITDAVDCALDPLSETKCTLKSFTVEKGIYQTSNFRVQPTESIVRFPNITNLCPFGEVFNATRFASVYAWNRKRISNCVADYSVLYNSASFSTFKCYGVSPTKLNDLCFTNVYADSFVIRGDEVRQIAPGQTGKIADYNYKLPDDFTGCVIAWNSNNLDSKVGGNYNYLYRLFRKSNLKPFERDISTEIYQAGSTPCNGVEGFNCYFPLQSYGFQPTNGVGYQPYRVVVLSFELLHAPATVCGPKKSTNLVKNKCVNFNFNGLTGTGVLTESNKKFLPFQQFGRDIADTTDAVRDPQTLEILDITPCSFGGVSVITPGTNTSNQVAVLYQGVNCTEVPVAIHADQLTPTWRVYSTGSNVFQTRAGCLIGAEHVNNSYECDIPIGAGICASYQTQTNSPRRARSVASQSIIAYTMSLGAENSVAYSNNSIAIPTNFTISVTTEILPVSMTKTSVDCTMYICGDSTECSNLLLQYGSFCTQLNRALTGIAVEQDKNTQEVFAQVKQIYKTPPIKDFGGFNFSQILPDPSKPSKRSFIEDLLFNKVTLADAGFIKQYGDCLGDIAARDLICAQKFNGLTVLPPLLTDEMIAQYTSALLAGTITSGWTFGAGAALQIPFAMQMAYRFNGIGVTQNVLYENQKLIANQFNSAIGKIQDSLSSTASALGKLQDVVNQNAQALNTLVKQLSSNFGAISSVLNDILSRLDPPEAEVQIDRLITGRLQSLQTYVTQQLIRAAEIRASANLAATKMSECVLGQSKRVDFCGKGYQLMSFPQSAPHGVVFLNVTYVPAQEKNFTTAPAICNDGKAHFPREGVFVSNGTNWFVTQRNFYEPQIITTDNTFVSGNCDVVIGIVNNTVYDPLQPELDSFKEELDKYFKNHTSPDVDLGDISGINASVVNIQKEIDRLNEVAKNLNESLIDLQELGKYEQYIK

SEQ ID NO: 1942 - protein, 1211 aa, Artificial Sequence
  SARS-CoV-2/USA/UT-00033/2020__EPI_ISL_417976 spike protein (1-1211)(K986P_V987P_ H1048Q_H1064N_ H1083N_H1101N)
MFVFLVLLPLVSSQCVNLTTRTQLPPAYTNSFTRGVYYPDKVFRSSVLHSTQDLFLPFFSNVTWFHAIHVSGTNGTKRFDNPVLPFNDGVYFASTEKSNIIRGWIFGTTLDSKTQSLLIVNNATNVVIKVCEFQFCNDPFLGVYYHKNNKSWMESEFRVYSSANNCTFEYVSQPFLMDLEGKQGNFKNLREFVFKNIDGYFKIYSKHTPINLVRDLPQGFSALEPLVDLPIGINITRFQTLLALHRSYLTPGDSSSGLTAGAAAYYVGYLQPRTFLLKYNENGTITDAVDCALDPLSETKCTLKSFTVEKGIYQTSNFRVQPTESIVRFPNITNLCPFGEVFNATRFASVYAWNRKRISNCVADYSVLYNSASFSTFKCYGVSPTKLNDLCFTNVYADSFVIRGDEVRQIAPGQTGKIADYNYKLPDDFTGCVIAWNSNNLDSKVGGNYNYLYRLFRKSNLKPFERDISTEIYQAGSTPCNGVEGFNCYFPLQSYGFQPTNGVGYQPYRVVVLSFELLHAPATVCGPKKSTNLVKNKCVNFNFNGLTGTGVLTESNKKFLPFQQFGRDIADTTDAVRDPQTLEILDITPCSFGGVSVITPGTNTSNQVAVLYQGVNCTEVPVAIHADQLTPTWRVYSTGSNVFQTRAGCLIGAEHVNNSYECDIPIGAGICASYQTQTNSPRRARSVASQSIIAYTMSLGAENSVAYSNNSIAIPTNFTISVTTEILPVSMTKTSVDCTMYICGDSTECSNLLLQYGSFCTQLNRALTGIAVEQDKNTQEVFAQVKQIYKTPPIKDFGGFNFSQILPDPSKPSKRSFIEDLLFNKVTLADAGFIKQYGDCLGDIAARDLICAQKFNGLTVLPPLLTDEMIAQYTSALLAGTITSGWTFGAGAALQIPFAMQMAYRFNGIGVTQNVLYENQKLIANQFNSAIGKIQDSLSSTASALGKLQDVVNQNAQALNTLVKQLSSNFGAISSVLNDILSRLDPPEAEVQIDRLITGRLQSLQTYVTQQLIRAAEIRASANLAATKMSECVLGQSKRVDFCGKGYQLMSFPQSAPHGVVFLNVTYVPAQEKNFTTAPAICNDGKAHFPREGVFVSNGTNWFVTQRNFYEPQIITTDNTFVSGNCDVVIGIVNNTVYDPLQPELDSFKEELDKYFKNHTSPDVDLGDISGINASVVNIQKEIDRLNEVAKNLNESLIDLQELGKYEQYIK

SEQ ID NO: 1943 - protein, 1211 aa, Artificial Sequence
  SARS-CoV-2/USA/WI-13/2020__EPI_ISL_417516 spike protein (1-1211)(K986P_V987P_ H1048Q_H1064N_ H1083N_H1101N)
MFVFLVLLPLVSSQCVNLTTRTQLPPAYTNSFTRGVYYPDKVFRSSVLHSTQDLFLPFFSNVTWFHAIHVSGTNGTKRFDNPVLPFNDGVYFASTEKSNIIRGWIFGTTLDSKTQSLLIVNNATNVVIKVCEFQFCNDPFLGVYYHKNNKSWMESEFRVYSSANNCTFEYVSQPFLMDLEGKQGNFKNLREFVFKNIDGYFKIYSKHTPINLVRDLPQGFSALEPLVDLPIGINITRFQTLLALHRSYLTPGDSSSGWTAGAAAYYVGYLQPRTFLLKYNENGTITDAVDCALDPLSETKCTLKSFTVEKGIYQTSNFRVLPTESIVRFPNITNLCPFGEVFNATRFASVYAWNRKRISNCVADYSVLYNSASFSTFKCYGVSPTKLNDLCFTNVYADSFVIRGDEVRQIAPGQTGKIADYNYKLPDDFTGCVIAWNSNNLDSKVGGNYNYLYRLFRKSNLKPFERDISTEIYQAGSTPCNGVEGFNCYFPLQSYGFQPTNGVGYQPYRVVVLSFELLHAPATVCGPKKSTNLVKNKCVNFNFNGLTGTGVLTESNKKFLPFQQFGRDIADTTDAVRDPQTLEILDITPCSFGGVSVITPGTNTSNQVAVLYQGVNCTEVPVAIHADQLTPTWRVYSTGSNVFQTRAGCLIGAEHVNNSYECDIPIGAGICASYQTQTNSPRRARSVASQSIIAYTMSLGAENSVAYSNNSIAIPTNFTISVTTEILPVSMTKTSVDCTMYICGDSTECSNLLLQYGSFCTQLNRALTGIAVEQDKNTQEVFAQVKQIYKTPPIKDFGGFNFSQILPDPSKPSKRSFIEDLLFNKVTLADAGFIKQYGDCLGDIAARDLICAQKFNGLTVLPPLLTDEMIAQYTSALLAGTITSGWTFGAGAALQIPFAMQMAYRFNGIGVTQNVLYENQKLIANQFNSAIGKIQDSLSSTASALGKLQDVVNQNAQALNTLVKQLSSNFGAISSVLNDILSRLDPPEAEVQIDRLITGRLQSLQTYVTQQLIRAAEIRASANLAATKMSECVLGQSKRVDFCGKGYQLMSFPQSAPHGVVFLNVTYVPAQEKNFTTAPAICNDGKAHFPREGVFVSNGTNWFVTQRNFYEPQIITTDNTFVSGNCDVVIGIVNNTVYDPLQPELDSFKEELDKYFKNHTSPDVDLGDISGINASVVNIQKEIDRLNEVAKNLNESLIDLQELGKYEQYIK

SEQ ID NO: 1944 - protein, 1210 aa, Artificial Sequence
  SARS-CoV-2/India/1-27/2020__EPI_ISL_413522 spike protein (1-1210)(K985P_V986P_ H1047Q_H1063N_ H1082N_H1100N)
MFVFLVLLPLVSSQCVNLTTRTQLPPAYTNSFTRGVYYPDKVFRSSVLHSTQDLFLPFFSNVTWFHAIHVSGTNGTKRFDNPVLPFNDGVYFASTEKSNIIRGWIFGTTLDSKTQSLLIVNNATNVVIKVCEFQFCNDPFLGVYHKNNKSWMESEFRVYSSANNCTFEYVSQPFLMDLEGKQGNFKNLREFVFKNIDGYFKIYSKHTPINLVRDLPQGFSALEPLVDLPIGINITRFQTLLALHRSYLTPGDSSSGWTAGAAAYYVGYLQPRTFLLKYNENGTITDAVDCALDPLSETKCTLKSFTVEKGIYQTSNFRVQPTESIVRFPNITNLCPFGEVFNATRFASVYAWNRKRISNCVADYSVLYNSASFSTFKCYGVSPTKLNDLCFTNVYADSFVIRGDEVIQIAPGQTGKIADYNYKLPDDFTGCVIAWNSNNLDSKVGGNYNYLYRLFRKSNLKPFERDISTEIYQAGSTPCNGVEGFNCYFPLQSYGFQPTNGVGYQPYRVVVLSFELLHAPATVCGPKKSTNLVKNKCVNFNFNGLTGTGVLTESNKKFLPFQQFGRDIADTTDAVRDPQTLEILDITPCSFGGVSVITPGTNTSNQVAVLYQDVNCTEVPVAIHADQLTPTWRVYSTGSNVFQTRAGCLIGAEHVNNSYECDIPIGAGICASYQTQTNSPRRARSVASQSIIAYTMSLGAENSVAYSNNSIAIPTNFTISVTTEILPVSMTKTSVDCTMYICGDSTECSNLLLQYGSFCTQLNRALTGIAVEQDKNTQEVFAQVKQIYKTPPIKDFGGFNFSQILPDPSKPSKRSFIEDLLFNKVTLADAGFIKQYGDCLGDIAARDLICAQKFNGLTVLPPLLTDEMIAQYTSALLAGTITSGWTFGAGAALQIPFAMQMAYRFNGIGVTQNVLYENQKLIANQFNSAIGKIQDSLSSTASALGKLQDVVNQNAQALNTLVKQLSSNFGAISSVLNDILSRLDPPEAEVQIDRLITGRLQSLQTYVTQQLIRAAEIRASANLAATKMSECVLGQSKRVDFCGKGYQLMSFPQSAPHGVVFLNVTYVPAQEKNFTTAPAICNDGKAHFPREGVFVSNGTNWFVTQRNFYEPQIITTDNTFVSGNCDVVIGIVNNTVYDPLQPELDSFKEELDKYFKNHTSPDVDLGDISGINASVVNIQKEIDRLNEVAKNLNESLIDLQELGKYEQYIK

SEQ ID NO: 1945 - protein, 1205 aa, Artificial Sequence
  SARS-CoV-2/pangolin/Guangxi/P4L/2017__EPI_ISL_410538 spike protein (1-1205)(K980P_V981P_ H1042Q_H1058N_ H1077N_H1095N)
MFVFLFVLPLVSSQCVNLTTRTGIPPGYTNSSTRGVYYPDKVFRSSILHLTQDLFLPFFSNVTWFNTINYQGGFKKFDNPVLPFNDGVYFASTEKSNIIRGWIFGTTLDARTQSLLIVNNATNVVIKVCEFQFCTDPFLGVYYHNNNKTWVENEFRVYSSANNCTFEYISQPFLMDLEGKQGNFKNLREFVFKNVDGYFKIYSKHTPIDLVRDLPRGFAALEPLVDLPIGINITRFQTLLALHRSYLTPGNLESGWTTGAAAYYVGYLQQRTFLLSYNQNGTITDAVDCSLDPLSETKCTLKSLTVEKGIYQTSNFRVQPTISIVRFPNITNLCPFGEVFNASKFASVYAWNRKRISNCVADYSVLYNSTSFSTFKCYGVSPTKLNDLCFTNVYADSFVVKGDEVRQIAPGQTGVIADYNYKLPDDFTGCVIAWNSVKQDALTGGNYGYLYRLFRKSKLKPFERDISTEIYQAGSTPCNGQVGLNCYYPLERYGFHPTTGVNYQPFRVVVLSFELLNGPATVCGPKLSTTLVKDKCVNFNFNGLTGTGVLTTSKKQFLPFQQFGRDISDTTDAVRDPQTLEILDITPCSFGGVSVITPGTNTSNQVAVLYQDVNCTEVPMAIHAEQLTPAWRVYSAGANVFQTRAGCLVGAEHVNNSYECDIPVGAGICASYHSMSSLRSVNQRSIIAYTMSLGAENSVAYSNNSIAIPTNFTISVTTEILPVSMTKTSVDCTMYICGDSIECSNLLLQYGSFCTQLNRALTGIAVEQDKNTQEVFAQVKQIYKTPPIKDFGGFNFSQILPDPSKPSKRSFIEDLLFNKVTLADAGFIKQYGDCLGDIAARDLICAQKFNGLTVLPPLLTDEMIAQYTSALLAGTITSGWTFGAGAALQIPFAMQMAYRFNGIGVTQNVLYENQKLIANQFNSAIGKIQDSLSSTASALGKLQDVVNQNAQALNTLVKQLSSNFGAISSVLNDILSRLDPPEAEVQIDRLITGRLQSLQTYVTQQLIRAAEIRASANLAATKMSECVLGQSKRVDFCGKGYQLMSFPQSAPHGVVFLNVTYVPAQEKNFTTAPAICNEGKAHFPREGVFVSNGTNWFITQRNFYEPQIITTDNTFVSGSCDVVIGIVNNTVYDPLQPELDSFKEELDKYFKNHTSPDVDLGDISGINASVVNIQKEIDRLNEVAKNLNESPIDLQELGKYEQYIK

SEQ ID NO: 1946 - protein, 1205 aa, Artificial Sequence
  SARS-CoV-2/pangolin/Guangxi/P5L/2017__EPI_ISL_410540 spike protein (1-1205)(K980P_V981P_ H1042Q_H1058N_ H1077N_H1095N)
MFVFLFVLPLVSSQCVNLTTRTGIPPGYTNSSTRGVYYPDKVFRSSILHLTQDLFLPFFSNVTWFNTINYQGGFKKFDNPVLPFNDGVYFASTEKSNIIRGWIFGTTLDARTQSLLIVNNATNVVIKVCEFQFCTDPFLGVYYHNNNKTWVENEFRVYSSANNCTFEYISQPFLMDLEGKQGNFKNLREFVFKNVDGYFKIYSKHTPIDLVRDLPRGFAALEPLVDLPIGINITRFQTLLALHRSYLTPGKLESGWTTGAAAYYVGYLQQRTFLLSYNQNGTITDAVDCSLDPLSETKCTLKSLTVEKGIYQTSNFRVQPTISIVRFPNITNLCPFGEVFNASKFASVYAWNRKRISNCVADYSVLYNSTSFSTFKCYGVSPTKLNDLCFTNVYADSFVVKGDEVRQIAPGQTGVIADYNYKLPDDFTGCVIAWNSVKQDALTGGNYGYLYRLFRKSKLKPFERDISTEIYQAGSTPCNGQVGLNCYYPLERYGFHPTTGVNYQPFRVVVLSFELLNGPATVCGPKLSTTLVKDKCVNFNFNGLTGTGVLTTSKKQFLPFQQFGRDISDTTDAVRDPQTLEILDITPCSFGGVSVITPGTNTSNQVAVLYQDVNCTEVPMAIHAEQLTPAWRVYSAGANVFQTRAGCLVGAEHVNNSYECDIPVGAGICASYHSMSSFRSVNQRSIIAYTMSLGAENSVAYSNNSIAIPTNFTISVTTEILPVSMTKTSVDCTMYICGDSIECSNLLLQYGSFCTQLNRALTGIAVEQDKNTQEVFAQVKQIYKTPPIKDFGGFNFSQILPDPSKPSKRSFIEDLLFNKVTLADAGFIKQYGDCLGDIAARDLICAQKFNGLTVLPPLLTDEMIAQYTSALLAGTITSGWTFGAGAALQIPFAMQMAYRFNGIGVTQNVLYENQKLIANQFNSAIGKIQDSLSSTASALGKLQDVVNQNAQALNTLVKQLSSNFGAISSVLNDILSRLDPPEAEVQIDRLITGRLQSLQTYVTQQLIRAAEIRASANLAATKMSECVLGQSKRVDFCGKGYQLMSFPQSAPHGVVFLNVTYVPAQEKNFTTAPAICNEGKAHFPREGVFVSNGTNWFITQRNFYEPQIITTDNTFVSGSCDVVIGIVNNTVYDPLQPELDSFKEELDKYFKNHTSPDVDLGDISGINASVVNIQKEIDRLNEVAKNLNESLIDLQELGKYEQYIK

SEQ ID NO: 1947 - protein, 1205 aa, Artificial Sequence
  SARS-CoV-2/pangolin/Guangxi/P5E/2017__EPI_ISL_410541 spike protein (1-1205)(K980P_V981P_ H1042Q_H1058N_ H1077N_H1095N)
MFVFLFVLPLVSSQCVNLTTRTGIPPGYTNSSTRGVYYPDKVFRSSILHLTQDLFLPFFSNVTWFNTITYQGGSKKFDNPVLPFNDGVYFASTEKSNIIRGWIFGTTLDARTQSLLIVNNATNVVIKVCEFQFCTDPFLGVYYHNNNKTWVENEFRVYSSANNCTFEYISQPFLMDLEGKQGNFKNLREFVFKNVDGYFKIYSKHTPIDLVRDLPRGFAALEPLVDLPIGINITRFQTLLALHRSYLTPGKLESGWTTGAAAYYVGYLQQRTFLLSYNQNGTITDAVDCSLDPLSETKCTLKSLTVEKGIYQTSNFRVQPTISIVRFPNITNLCPFGEVFNASKFASVYAWNRKRISNCVADYSVLYNSTSFSTFKCYGVSPTKLNDLCFTNVYADSFVVKGDEVRQIAPGQTGVIADYNYKLPDDFTGCVIAWNSVKQDALTGDNYGYLYRLFRKSKLKPFERDISTEIYQAGSTPCNGQVGLNCYYPLERYGFHPTTGVNYQPFRVVVLSFELLNGPATVCGPKLSTTLVKDKCVNFNFNGLTGTGVLTTSKKQFLPFQQFGRDISDTTDAVRDPQTLEILDITPCSFGGVSVITPGTNTSNQVAVLYQDVNCTEVPMAIHAEQLTPAWRVYSAGANVFQTRAGCLVGAEHVNNSYECDIPVGAGICASYHSMSSFRSVNQRSIIAYTMSLGAENSVAYSNNSIAIPTNFTISVTTEILPVSMTKTSVDCTMYICGDSIECSNLLLQYGSFCTQLNRALTGIAVEQDKNTQEVFAQVKQIYKTPPIKDFGGFNFSQILPDPSKPSKRSFIEDLLFNKVTLADAGFIKQYGDCLGDIAARDLICAQKFNGLTVLPPLLTDEMIAQYTSALLAGTITSGWTFGAGAALQIPFAMQMAYRFNGIGVTQNVLYENQKLIANQFNSAIGKIQDSLSSTASALGKLQDVVNQNAQALNTLVKQLSSNFGAISSVLNDILSRLDPPEAEVQIDRLITGRLQSLQTYVTQQLIRAAEIRASANLAATKMSECVLGQSKRVDFCGKGYQLMSFPQSAPHGVVFLNVTYVPAQEKNFTTAPAICNEGKAHFPREGVFVSNGTNWFITQRNFYEPQIITTDNTFVSGSCDVVIGIVNNTVYDPLQPELDSFKEELDKYFKNHTSPDVDLGDISGINASVVNIQKEIDRLNEVAKNLNESLIDLQELGKYEQYIK

SEQ ID NO: 1948 - protein, 1203 aa, Artificial Sequence
  SARS-CoV-2/pangolin/Guangxi/P1E/2017__EPI_ISL_410539 spike protein (1-1203)(K978P_V979P_ H1040Q_H1056N_ H1075N_H1093N)
MFVFLFVLPLVSSQCVNLTTRTGIQPGYTNSSTRGVYYPDKVFRSSILHLTQDLFLPFFSNVTWFNTINYQGGFKKFDNPVLPFNDGVYFASTEKSNIIRGWIFGTTLDARTQSLLIVNNATNVVIKVCEFQFCTDPFLGVYYHNNNKTWVENEFRVYSSANNCTFEYISQPFLMDLEGKQGNFKNLREFVFKNVDGYFKIYSKHTPIDLVRDLPRGFAALEPLVDLPIGINITRFQTLLALHRSYLTPGKLESGWTTGAAAYYVGYLQQRTFLLSYNQNGTITDAVDCSLDPLSETKCTLKSLTVEKGIYQTSNFRVQPTISIVRFPNITNLCPFGEVFNASKFASVYAWNRKRISNCVADYSVLYNSTSFSTFKCYGVSPTKLNDLCFTNVYADSFVVKGDEVRQIAPGQTGVIADYNYKLPDDFTGCVIAWNSVKQDALTGGNYLYRLFRKSKLKPFERDISTEIYQAGSTPCNGQVGLNCYYPLERYGFHPTTGVNYQPFRVVVLSFELLNGPATVCGPKLSTTLVKDKCVNFNFNGLTGTGVLTTSKKQFLPFQQFGRDISDTTDAVRDPQTLEILDITPCSFGGVSVITPGTNTSNQVAVLYQDVNCTEVPMAIHAEQLTPAWRVYSAGANVFQTRAGCLVGAEHVNNSYECDIPVGAGICASYHSMSSLRSVNQRSIIAYTMSLGAENSVAYSNNSIAIPTNFTISVTTEILPVSMTKTSVDCTMYICGDSIECSNLLLQYGSFCTQLNRALTGIAVEQDKNTQEVFAQVKQIYKTPPIKDFGGFNFSQILPDPSKPSKRSFIEDLLFNKVTLADAGFIKQYGDCLGDIAARDLICAQKFNGLTVLPPLLTDEMIAQYTSALLAGTITSGWTFGAGAALQIPFAMQMAYRFNGIGVTQNVLYENQKLIANQFNSAIGKIQDSLSSTASALGKLQDVVNQNAQALNTLVKQLSSNFGAISSVLNDILSRLDPPEAEVQIDRLITGRLQSLQTYVTQQLIRAAEIRASANLAATKMSECVLGQSKRVDFCGKGYQLMSFPQSAPHGVVFLNVTYVPAQEKNFTTAPAICNEGKAHFPREGVFVSNGTNWFITQRNFYEPQIITTDNTFVSGSCDVVIGIVNNTVYDPLQPELDSFKEELDKYFKNHTSPDVDLGDISGINASVVNIQKEIDRLNEVAKNLNESLIDLQELGKYEQYIK

SEQ ID NO: 1949 - protein, 1211 aa, Artificial Sequence
  SARS-CoV-2/Wuhan/WIV05/2019__EPI_ISL_402128 spike protein (1-1211)(I712C_T1077C)
MFVFLVLLPLVSSQCVNLTTRTQLPPAYTNSFTRGVYYPDKVFRSSVLHSTQDLFLPFFSNVTWFHAIHVSGTNGTKRFDNPVLPFNDGVYFASTEKSNIIRGWIFGTTLDSKTQSLLIVNNATNVVIKVCEFQFCNDPFLGVYYHKNNKSWMESEFRVYSSANNCTFEYVSQPFLMDLEGKQGNFKNLREFVFKNIDGYFKIYSKHTPINLVRDLPQGFSALEPLVDLPIGINITRFQTLLALHRSYLTPGDSSSGWTAGAAAYYVGYLQPRTFLLKYNENGTITDAVDCALDPLSETKCTLKSFTVEKGIYQTSNFRVQPTESIVRFPNITNLCPFGEVFNATRFASVYAWNRKRISNCVADYSVLYNSASFSTFKCYGVSPTKLNDLCFTNVYADSFVIRGDEVRQIAPGQTGKIADYNYKLPDDFTGCVIAWNSNNLDSKVGGNYNYLYRLFRKSNLKPFERDISTEIYQAGSTPCNGVEGFNCYFPLQSYGFQPTNGVGYQPYRVVVLSFELLHAPATVCGPKKSTNLVKNKCVNFNFNGLTGTGVLTESNKKFLPFQQFGRDIADTTDAVRDPQTLEILDITPCSFGGVSVITPGTNTSNQVAVLYQDVNCTEVPVAIHADQLTPTWRVYSTGSNVFQTRAGCLIGAEHVNNSYECDIPIGAGICASYQTQTNSPRRARSVASQSIIAYTMSLGAENSVAYSNNSCAIPTNFTISVTTEILPVSMTKTSVDCTMYICGDSTECSNLLLQYGSFCTQLNRALTGIAVEQDKNTQEVFAQVKQIYKTPPIKDFGGFNFSQILPDPSKPSKRSFIEDLLFNKVTLADAGFIKQYGDCLGDIAARDLICAQKFNGLTVLPPLLTDEMIAQYTSALLAGTITSGWTFGAGAALQIPFAMQMAYRFNGIGVTQNVLYENQKLIANQFNSAIGKIQDSLSSTASALGKLQDVVNQNAQALNTLVKQLSSNFGAISSVLNDILSRLDKVEAEVQIDRLITGRLQSLQTYVTQQLIRAAEIRASANLAATKMSECVLGQSKRVDFCGKGYHLMSFPQSAPHGVVFLHVTYVPAQEKNFTCAPAICHDGKAHFPREGVFVSNGTHWFVTQRNFYEPQIITTDNTFVSGNCDVVIGIVNNTVYDPLQPELDSFKEELDKYFKNHTSPDVDLGDISGINASVVNIQKEIDRLNEVAKNLNESLIDLQELGKYEQYIK

SEQ ID NO: 1950 - protein, 1207 aa, Artificial Sequence
  SARS-CoV-2/bat/Yunnan/RaTG13/2013__EPI_ISL_402131 spike protein (1-1207)(I708C_T1073C)
MFVFLVLLPLVSSQCVNLTTRTQLPPAYTNSSTRGVYYPDKVFRSSVLHLTQDLFLPFFSNVTWFHAIHVSGTNGIKRFDNPVLPFNDGVYFASTEKSNIIRGWIFGTTLDSKTQSLLIVNNATNVVIKVCEFQFCNDPFLGVYYHKNNKSWMESEFRVYSSANNCTFEYVSQPFLMDLEGKQGNFKNLREFVFKNIDGYFKIYSKHTPINLVRDLPPGFSALEPLVDLPIGINITRFQTLLALHRSYLTPGDSSSGWTAGAAAYYVGYLQPRTFLLKYNENGTITDAVDCALDPLSETKCTLKSFTVEKGIYQTSNFRVQPTDSIVRFPNITNLCPFGEVFNATTFASVYAWNRKRISNCVADYSVLYNSTSFSTFKCYGVSPTKLNDLCFTNVYADSFVITGDEVRQIAPGQTGKIADYNYKLPDDFTGCVIAWNSKHIDAKEGGNFNYLYRLFRKANLKPFERDISTEIYQAGSKPCNGQTGLNCYYPLYRYGFYPTDGVGHQPYRVVVLSFELLNAPATVCGPKKSTNLVKNKCVNFNFNGLTGTGVLTESNKKFLPFQQFGRDIADTTDAVRDPQTLEILDITPCSFGGVSVITPGTNASNQVAVLYQDVNCTEVPVAIHADQLTPTWRVYSTGSNVFQTRAGCLIGAEHVNNSYECDIPIGAGICASYQTQTNSRSVASQSIIAYTMSLGAENSVAYSNNSCAIPTNFTISVTTEILPVSMTKTSVDCTMYICGDSTECSNLLLQYGSFCTQLNRALTGIAVEQDKNTQEVFAQVKQIYKTPPIKDFGGFNFSQILPDPSKPSKRSFIEDLLFNKVTLADAGFIKQYGDCLGDIAARDLICAQKFNGLTVLPPLLTDEMIAQYTSALLAGTITSGWTFGAGAALQIPFAMQMAYRFNGIGVTQNVLYENQKLIANQFNSAIGKIQDSLSSTASALGKLQDVVNQNAQALNTLVKQLSSNFGAISSVLNDILSRLDKVEAEVQIDRLITGRLQSLQTYVTQQLIRAAEIRASANLAATKMSECVLGQSKRVDFCGKGYHLMSFPQSAPHGVVFLHVTYVPAQEKNFTCAPAICHDGKAHFPREGVFVSNGTHWFVTQRNFYEPQIITTDNTFVSGSCDVVIGIVNNTVYDPLQPELDSFKEELDKYFKNHTSPDVDLGDISGINASVVNIQKEIDRLNEVAKNLNESLIDLQELGKYEQYIK

SEQ ID NO: 1951 - protein, 1211 aa, Artificial Sequence
  SARS-CoV-2/Wuhan/HBCDC-HB-01/2019__EPI_ISL_402132 spike protein (1-1211)(I712C_T1077C)
MFVFLVLLPLVSSQCVNLTTRTQLPPAYTNSITRGVYYPDKVFRSSVLHSTQDLFLPFFSNVTWFHAIHVSGTNGTKRFDNPVLPFNDGVYFASTEKSNIIRGWIFGTTLDSKTQSLLIVNNATNVVIKVCEFQFCNDPFLGVYYHKNNKSWMESEFRVYSSANNCTFEYVSQPFLMDLEGKQGNFKNLREFVFKNIDGYFKIYSKHTPINLVRDLPQGFSALEPLVDLPIGINITRFQTLLALHRSYLTPGDSSSGWTAGAAAYYVGYLQPRTFLLKYNENGTITDAVDCALDPLSETKCTLKSFTVEKGIYQTSNFRVQPTESIVRFPNITNLCPFGEVFNATRFASVYAWNRKRISNCVADYSVLYNSASFSTFKCYGVSPTKLNDLCFTNVYADSFVIRGDEVRQIAPGQTGKIADYNYKLPDDFTGCVIAWNSNNLDSKVGGNYNYLYRLFRKSNLKPFERDISTEIYQAGSTPCNGVEGFNCYFPLQSYGFQPTNGVGYQPYRVVVLSFELLHAPATVCGPKKSTNLVKNKCVNFNFNGLTGTGVLTESNKKFLPFQQFGRDIADTTDAVRDPQTLEILDITPCSFGGVSVITPGTNTSNQVAVLYQDVNCTEVPVAIHADQLTPTWRVYSTGSNVFQTRAGCLIGAEHVNNSYECDIPIGAGICASYQTQTNSPRRARSVASQSIIAYTMSLGAENSVAYSNNSCAIPTNFTISVTTEILPVSMTKTSVDCTMYICGDSTECSNLLLQYGSFCTQLNRALTGIAVEQDKNTQEVFAQVKQIYKTPPIKDFGGFNFSQILPDPSKPSKRSFIEDLLFNKVTLADAGFIKQYGDCLGDIAARDLICAQKFNGLTVLPPLLTDEMIAQYTSALLAGTITSGWTFGAGAALQIPFAMQMAYRFNGIGVTQNVLYENQKLIANQFNSAIGKIQDSLSSTASALGKLQDVVNQNAQALNTLVKQLSSNFGAISSVLNDILSRLDKVEAEVQIDRLITGRLQSLQTYVTQQLIRAAEIRASANLAATKMSECVLGQSKRVDFCGKGYHLMSFPQSAPHGVVFLHVTYVPAQEKNFTCAPAICHDGKAHFPREGVFVSNGTHWFVTQRNFYEPQIITTDNTFVSGNCDVVIGIVNNTVYDPLQPELDSFKEELDKYFKNHTSPDVDLGDISGINASVVNIQKEIDRLNEVAKNLNESLIDLQELGKYEQYIK

SEQ ID NO: 1952 - protein, 1211 aa, Artificial Sequence
  SARS-CoV-2/Guangdong/20SF028/2020__EPI_ISL_403936 spike protein (1-1211)(I712C_T1077C)
MFVFLVLLPLVSSQCVNLTTRTQLPPAYTNSFTRGVYYPDKVFRSSVLYSTQDLFLPFFSNVTWFHAIHVSGTNGTKRFDNPVLPFNDGVYFASTEKSNIIRGWIFGTTLDSKTQSLLIVNNATNVVIKVCEFQFCNDPFLGVYYHKNNKSWMESEFRVYSSANNCTFEYVSQPFLMDLEGKQGNFKNLREFVFKNIDGYFKIYSKHTPINLVRDLPQGFSALEPLVDLPIGINITRFQTLLALHRSYLTPGDSSSGWTAGAAAYYVGYLQPRTFLLKYNENGTITDAVDCALDPLSETKCTLKSFTVEKGIYQTSNFRVQPTESIVRFPNITNLCPFGEVFNATRFASVYAWNRKRISNCVADYSVLYNSASFSTFKCYGVSPTKLNDLCFTNVYADSFVIRGDEVRQIAPGQTGKIADYNYKLPDDFTGCVIAWNSNNLDSKVGGNYNYLYRLFRKSNLKPFERDISTEIYQAGSTPCNGVEGFNCYFPLQSYGFQPTNGVGYQPYRVVVLSFELLHAPATVCGPKKSTNLVKNKCVNFNFNGLTGTGVLTESNKKFLPFQQFGRDIADTTDAVRDPQTLEILDITPCSFGGVSVITPGTNTSNQVAVLYQDVNCTEVPVAIHADQLTPTWRVYSTGSNVFQTRAGCLIGAEHVNNSYECDIPIGAGICASYQTQTNSPRRARSVASQSIIAYTMSLGAENSVAYSNNSCAIPTNFTISVTTEILPVSMTKTSVDCTMYICGDSTECSNLLLQYGSFCTQLNRALTGIAVEQDKNTQEVFAQVKQIYKTPPIKDFGGFNFSQILPDPSKPSKRSFIEDLLFNKVTLADAGFIKQYGDCLGDIAARDLICAQKFNGLTVLPPLLTDEMIAQYTSALLAGTITSGWTFGAGAALQIPFAMQMAYRFNGIGVTQNVLYENQKLIANQFNSAIGKIQDSLSSTASALGKLQDVVNQNAQALNTLVKQLSSNFGAISSVLNDILSRLDKVEAEVQIDRLITGRLQSLQTYVTQQLIRAAEIRASANLAATKMSECVLGQSKRVDFCGKGYHLMSFPQSAPHGVVFLHVTYVPAQEKNFTCAPAICHDGKAHFPREGVFVSNGTHWFVTQRNFYEPQIITTDNTFVSGNCDVVIGIVNNTVYDPLQPELDSFKEELDKYFKNHTSPDVDLGDISGINASVVNIQKEIDRLNEVAKNLNESLIDLQELGKYEQYIK

SEQ ID NO: 1953 - protein, 1211 aa, Artificial Sequence
  SARS-CoV-2/Shenzhen/SZTH-001/2020__EPI_ISL_406592 spike protein (1-1211)(I712C_T1077C)
MFVFLVLLPLVSSQCVNLTTRTQLPPAYTNSFTRGVYYPDKVFRSSVLHSTQDLFLPFFSNVTWFHAIHVSGTNGTKRFDNPVLPFNDGVYFASTEKSNIIRGWIFGTTLDSKTQSLLIVNNATNVVIKVCEFQFCNDPFLGVYYHKNNKSWMESEFRVYSSANNCTFEYVSQPFLMDLEGKQGNFKNLREFVFKNIDGYFKIYSKHTPINLVRDLPQGFSALEPLVDLPIGINITRFQTLLALHRSYLTPGDSSSGWTAGAAAYYVGYLQPRTFLLKYNENGTITDAVDCALDPLSETKCTLKSFTVEKGIYQTSNFRVQPTESIVRFPNITNLCPFGEVFNATRFASVYAWNRKRISNCVADYSVLYNSASFSTFKCYGVSPTKLNDLCFTNVYADSFVIRGDEVRQIAPGQTGKIADYNYKLPDDFTGCVIAWNSNNLDSKVGGNYNYLYRLFRKSNLKPFERDISTEIYQAGSTPCNGVEGFNCYFPLQSYGFQPTNGVGYQPYRVVVLSFELLHAPATVCGPKKSTNLVKNKCVNFNFNGLTGTGVLTESNKKFLPFQQFGRDIADTTDAVRDPQTLEILDITPCSFGGVSVITPGTNTSNQVAVLYQDVNCTEVPVAIHADQLTPTWRVYSTGSNVFQTRAGCLIGAEHVNNSYECDIPIGAGICASYQTQTNSPRRARSVASQSIIAYTMSLGAENSVAYSNNSCAIPTNFTISVTTEILPVSMTKTSVDCTMYICGDSTECSNLLLQYGSFCTQLNRALTGIAVEQDKNTQEVFAQVKQIYKTPPIKDFGGFNFSQILPDPSKPSKRSFIEDLLFNKVTLADAGFIKQYGDCLGDIAARDLICAQKFNGLTVLPPLLTDEMIAQYTSALLAGTITSGWTFGAGAALQIPFAMQMAYRFNGIGVTQNVLYENQKLIANQFNSAIGKIQDSLSSTASALGKLQDVVNQNAQALNTLVKQLSSNFGAISSVLNDILSRLDKVEAEVQIDRLITGRLQSLQTYVTQQLIRAAEIRASANLAATKMSECVLGQSKRVDFCGKGYHLMSFPQSAPHGVVFLHVTYVPAQEKNFTCAPAICHDGKAHFPREGVFVSNGTHWFVTQRNFYEPQIITTDNTFVSGNCDVLIGIVNNTVYDPLQPELDSFKEELDKYFKNHTSPDVDLGDISGINASVVNIQKEIDRLNEVAKNLNESLIDLQELGKYEQYIK

SEQ ID NO: 1954 - protein, 1211 aa, Artificial Sequence
  SARS-CoV-2/Shenzhen/SZTH-004/2020__EPI_ISL_406595 spike protein (1-1211)(I712C_T1077C)
MFVFLVLLPLVSSQCVNLTTRTQLPPAYTNSFTRGVYYPDKVFRSSVLHSTQDLFLPFFSNVTWFHAIHVSGTNGTKRFDNPVLPFNDGVYFASTEKSNIIRGWIFGTTLDSKTQSLLIVNNATNVVIKVCEFQFCNDPFLGVYYHKNNKSWMESEFRVYSSANNCTFEYVSQPFLMDLEGKQGNFKNLREFVFKNIDGYFKIYSKHTPINLVRDLPQGFSALEPLVDLPIGINITRFQTLLALHRSYLTPGDSSSGWTAGAAAYYVGYLQPRTFLLKYNENGTITDAVDCALDPLSETKCTLKSFTVEKGIYQTSNFRVQPTESIVRFPNITNLCPFGEVFNATRFASVYAWDRKRISNCVAYYSVLYNSASFSTFKCYGVSPTKLNDLCFTNVYADSFVIRGDEVRQIAPGQTGKIADYNYKLPDDFTGCVIAWNSNNLDSKVGGNYNYLYRLFRKSNLKPFERDISTEIYQAGSTPCNGVEGFNCYFPLQSYGFQPTNGVGYQPYRVVVLSFELLHAPATVCGPKKSTNLVKNKCVNFNFNGLTGTGVLTESNKKFLPFQQFGRDIADTTDAVRDPQTLEILDITPCSFGGVSVITPGTNTSNQVAVLYQDVNCTEVPVAIHADQLTPTWRVYSTGSNVFQTRAGCLIGAEHVNNSYECDIPIGAGICASYQTQTNSPRRARSVASQSIIAYTMSLGAENSVAYSNNSCAIPTNFTISVTTEILPVSMTKTSVDCTMYICGDSTECSNLLLQYGSFCTQLNRALTGIAVEQDKNTQEVFAQVKQIYKTPPIKDFGGFNFSQILPDPSKPSKRSFIEDLLFNKVTLADAGFIKQYGDCLGDIAARDLICAQKFNGLTVLPPLLTDEMIAQYTSALLAGTITSGWTFGAGAALQIPFAMQMAYRFNGIGVTQNVLYENQKLIANQFNSAIGKIQDSLSSTASALGKLQDVVNQNAQALNTLVKQLSSNFGAISSVLNDILSRLDKVEAEVQIDRLITGRLQSLQTYVTQQLIRAAEIRASANLAATKMSECVLGQSKRVDFCGKGYHLMSFPQSAPHGVVFLHVTYVPAQEKNFTCAPAICHDGKAHFPREGVFVSNGTHWFVTQRNFYEPQIITTDNTFVSGNCDVVIGIVNNTVYDPLQPELDSFKEELDKYFKNHTSPDVDLGDISGINASVVNIQKEIDRLNEVAKNLNESLIDLQELGKYEQYIK

SEQ ID NO: 1955 - protein, 1211 aa, Artificial Sequence
  SARS-CoV-2/France/IDF0372/2020__EPI_ISL_406596 spike protein (1-1211)(I712C_T1077C)
MFVFLVLLPLVSSQCVNLTTRTQLPPAYTNSFTRGVYYPDKVFRSSVLHSTQDLFLPFFSNVTWFHAIHVSGTNGTKRFDNPVLPFNDGVYFASTEKSNIIRGWIFGTTLDSKTQSLLIVNNATNVVIKVCEFQFCNDPFLGVYYHKNNKSWMESEFRVYSSANNCTFEYVSQPFLMDLEGKQGNFKNLREFVFKNIDGYFKIYSKHTPINLVRDLPQGFSALEPLVDLPIGINITRFQTLLALHRSYLTPGDSSSGWTAGAAAYYVGYLQPRTFLLKYNENGTITDAVDCALDPLSETKCTLKSFTVEKGIYQTSNFRVQPTESIVRFPNITNLCPFGEVFNATRFASVYAWNRKRISNCVADYSFLYNSASFSTFKCYGVSPTKLNDLCFTNVYADSFVIRGDEVRQIAPGQTGKIADYNYKLPDDFTGCVIAWNSNNLDSKVGGNYNYLYRLFRKSNLKPFERDISTEIYQAGSTPCNGVEGFNCYFPLQSYGFQPTNGVGYQPYRVVVLSFELLHAPATVCGPKKSTNLVKNKCVNFNFNGLTGTGVLTESNKKFLPFQQFGRDIADTTDAVRDPQTLEILDITPCSFGGVSVITPGTNTSNQVAVLYQDVNCTEVPVAIHADQLTPTWRVYSTGSNVFQTRAGCLIGAEHVNNSYECDIPIGAGICASYQTQTNSPRRARSVASQSIIAYTMSLGAENSVAYSNNSCAIPTNFTISVTTEILPVSMTKTSVDCTMYICGDSTECSNLLLQYGSFCTQLNRALTGIAVEQDKNTQEVFAQVKQIYKTPPIKDFGGFNFSQILPDPSKPSKRSFIEDLLFNKVTLADAGFIKQYGDCLGDIAARDLICAQKFNGLTVLPPLLTDEMIAQYTSALLAGTITSGWTFGAGAALQIPFAMQMAYRFNGIGVTQNVLYENQKLIANQFNSAIGKIQDSLSSTASALGKLQDVVNQNAQALNTLVKQLSSNFGAISSVLNDILSRLDKVEAEVQIDRLITGRLQSLQTYVTQQLIRAAEIRASANLAATKMSECVLGQSKRVDFCGKGYHLMSFPQSAPHGVVFLHVTYVPAQEKNFTCAPAICHDGKAHFPREGVFVSNGTHWFVTQRNFYEPQIITTDNTFVSGNCDVVIGIVNNTVYDPLQPELDSFKEELDKYFKNHTSPDVDLGDISGINASVVNIQKEIDRLNEVAKNLNESLIDLQELGKYEQYIK

SEQ ID NO: 1956 - protein, 1211 aa, Artificial Sequence
  SARS-CoV-2/Australia/VIC01/2020__EPI_ISL_406844 spike protein (1-1211)(I712C_T1077C)
MFVFLVLLPLVSSQCVNLTTRTQLPPAYTNSFTRGVYYPDKVFRSSVLHSTQDLFLPFFSNVTWFHAIHVSGTNGTKRFDNPVLPFNDGVYFASTEKSNIIRGWIFGTTLDSKTQSLLIVNNATNVVIKVCEFQFCNDPFLGVYYHKNNKSWMESEFRVYSSANNCTFEYVSQPFLMDLEGKQGNFKNLREFVFKNIDGYFKIYSKHTPINLVRDLPQGFSALEPLVDLPIGINITRFQTLLALHRRYLTPGDSSSGWTAGAAAYYVGYLQPRTFLLKYNENGTITDAVDCALDPLSETKCTLKSFTVEKGIYQTSNFRVQPTESIVRFPNITNLCPFGEVFNATRFASVYAWNRKRISNCVADYSVLYNSASFSTFKCYGVSPTKLNDLCFTNVYADSFVIRGDEVRQIAPGQTGKIADYNYKLPDDFTGCVIAWNSNNLDSKVGGNYNYLYRLFRKSNLKPFERDISTEIYQAGSTPCNGVEGFNCYFPLQSYGFQPTNGVGYQPYRVVVLSFELLHAPATVCGPKKSTNLVKNKCVNFNFNGLTGTGVLTESNKKFLPFQQFGRDIADTTDAVRDPQTLEILDITPCSFGGVSVITPGTNTSNQVAVLYQDVNCTEVPVAIHADQLTPTWRVYSTGSNVFQTRAGCLIGAEHVNNSYECDIPIGAGICASYQTQTNSPRRARSVASQSIIAYTMSLGAENSVAYSNNSCAIPTNFTISVTTEILPVSMTKTSVDCTMYICGDSTECSNLLLQYGSFCTQLNRALTGIAVEQDKNTQEVFAQVKQIYKTPPIKDFGGFNFSQILPDPSKPSKRSFIEDLLFNKVTLADAGFIKQYGDCLGDIAARDLICAQKFNGLTVLPPLLTDEMIAQYTSALLAGTITSGWTFGAGAALQIPFAMQMAYRFNGIGVTQNVLYENQKLIANQFNSAIGKIQDSLSSTASALGKLQDVVNQNAQALNTLVKQLSSNFGAISSVLNDILSRLDKVEAEVQIDRLITGRLQSLQTYVTQQLIRAAEIRASANLAATKMSECVLGQSKRVDFCGKGYHLMSFPQSAPHGVVFLHVTYVPAQEKNFTCAPAICHDGKAHFPREGVFVSNGTHWFVTQRNFYEPQIITTDNTFVSGNCDVVIGIVNNTVYDPLQPELDSFKEELDKYFKNHTSPDVDLGDISGINASVVNIQKEIDRLNEVAKNLNESLIDLQELGKYEQYIK

SEQ ID NO: 1957 - protein, 1211 aa, Artificial Sequence
  SARS-CoV-2/Germany/BavPat1/2020__EPI_ISL_406862 spike protein (1-1211)(I712C_T1077C)
MFVFLVLLPLVSSQCVNLTTRTQLPPAYTNSFTRGVYYPDKVFRSSVLHSTQDLFLPFFSNVTWFHAIHVSGTNGTKRFDNPVLPFNDGVYFASTEKSNIIRGWIFGTTLDSKTQSLLIVNNATNVVIKVCEFQFCNDPFLGVYYHKNNKSWMESEFRVYSSANNCTFEYVSQPFLMDLEGKQGNFKNLREFVFKNIDGYFKIYSKHTPINLVRDLPQGFSALEPLVDLPIGINITRFQTLLALHRSYLTPGDSSSGWTAGAAAYYVGYLQPRTFLLKYNENGTITDAVDCALDPLSETKCTLKSFTVEKGIYQTSNFRVQPTESIVRFPNITNLCPFGEVFNATRFASVYAWNRKRISNCVADYSVLYNSASFSTFKCYGVSPTKLNDLCFTNVYADSFVIRGDEVRQIAPGQTGKIADYNYKLPDDFTGCVIAWNSNNLDSKVGGNYNYLYRLFRKSNLKPFERDISTEIYQAGSTPCNGVEGFNCYFPLQSYGFQPTNGVGYQPYRVVVLSFELLHAPATVCGPKKSTNLVKNKCVNFNFNGLTGTGVLTESNKKFLPFQQFGRDIADTTDAVRDPQTLEILDITPCSFGGVSVITPGTNTSNQVAVLYQGVNCTEVPVAIHADQLTPTWRVYSTGSNVFQTRAGCLIGAEHVNNSYECDIPIGAGICASYQTQTNSPRRARSVASQSIIAYTMSLGAENSVAYSNNSCAIPTNFTISVTTEILPVSMTKTSVDCTMYICGDSTECSNLLLQYGSFCTQLNRALTGIAVEQDKNTQEVFAQVKQIYKTPPIKDFGGFNFSQILPDPSKPSKRSFIEDLLFNKVTLADAGFIKQYGDCLGDIAARDLICAQKFNGLTVLPPLLTDEMIAQYTSALLAGTITSGWTFGAGAALQIPFAMQMAYRFNGIGVTQNVLYENQKLIANQFNSAIGKIQDSLSSTASALGKLQDVVNQNAQALNTLVKQLSSNFGAISSVLNDILSRLDKVEAEVQIDRLITGRLQSLQTYVTQQLIRAAEIRASANLAATKMSECVLGQSKRVDFCGKGYHLMSFPQSAPHGVVFLHVTYVPAQEKNFTCAPAICHDGKAHFPREGVFVSNGTHWFVTQRNFYEPQIITTDNTFVSGNCDVVIGIVNNTVYDPLQPELDSFKEELDKYFKNHTSPDVDLGDISGINASVVNIQKEIDRLNEVAKNLNESLIDLQELGKYEQYIK

SEQ ID NO: 1958 - protein, 1211 aa, Artificial Sequence
  SARS-CoV-2/Wuhan/HBCDC-HB-02/2020__EPI_ISL_412978 spike protein (1-1211)(I712C_T1077C)
MFVFLVLLPLVSSQCVNLTTRTQLPPAYTNSFTRGVYYPDKVFRSSVLHSTQDLFLPFFSNVTWFHAIHVSGTNGTKRFDNPVLPFNDGVYFASTEKSNIIRGWIFGTTLDSKTQSLLIVNNATNVVIKVCEFQFCNDPFLGVYYHKNNKSWMESEFRVYSSANNCTFEYVSQPFLMDLEGKQGNFKNLREFVFKNIDGYFKIYSKHTPINLVRDLPQGFSALEPLVDLPIGINITRFQTLLALHRSYLTPGDSSSGWTAGAAAYYVGYLQPRTFLLKYNENGTITDAVDCALDPLSETKCTLKSFTVEKGIYQTSNFRVQPTESIVRFPNITNLCPFGEVFNATRFASVYAWNRKRISNCVADYSVLYNSASFSTFKCYGVSPTKLNDLCFTNVYADSFVIRGDEVRQIAPGQTGKIADYNYKLPDDFTGCVIAWNSNNLDSKVGGNYNYLYRLFRKSNLKPFERDISTEIYQAGSTPCNGVEGFNCYFPLQSYGFQPTNGVGYQPYRVVVLSFELLHAPATVCGPKKSTNLVKNKCVNFNFNGLTGTGVLTESNKKFLPFQQFGRDIADTTDAVRDPQTLEILDITPCSFGGVSVITPGTNTSNQVAVLYQDVNCTEVPVAIHADQLTPTWRVYSTGSNVFQTRAGCLIGAEHVNNSYECDIPIGAGICASYQTQTNSPRRARSVASQSIIAYTMSLGAENSVAYSNNSCAIPTNFTISVTTEILPVSMTKTSVDCTMYICGDSTECSNFLLQYGSFCTQLNRALTGIAVEQDKNTQEVFAQVKQIYKTPPIKDFGGFNFSQILPDPSKPSKRSFIEDLLFNKVTLADAGFIKQYGDCLGDIAARDLICAQKFNGLTVLPPLLTDEMIAQYTSALLAGTITSGWTFGAGAALQIPFAMQMAYRFNGIGVTQNVLYENQKLIANQFNSAIGKIQDSLSSTASALGKLQDVVNQNAQALNTLVKQLSSNFGAISSVLNDILSRLDKVEAEVQIDRLITGRLQSLQTYVTQQLIRAAEIRASANLAATKMSECVLGQSKRVDFCGKGYHLMSFPQSAPHGVVFLHVTYVPAQEKNFTCAPAICHDGKAHFPREGVFVSNGTHWFVTQRNFYEPQIITTDNTFVSGNCDVVIGIVNNTVYDPLQPELDSFKEELDKYFKNHTSPDVDLGDISGINASVVNIQKEIDRLNEVAKNLNESLIDLQELGKYEQYIK

SEQ ID NO: 1959 - protein, 1211 aa, Artificial Sequence
  SARS-CoV-2/Australia/QLD02/2020__EPI_ISL_407896 spike protein (1-1211)(I712C_T1077C)
MFVFLVLLPLVSSQCVNLTTRTQLPPAYTNSFTRGVYYPDKVFRSSVLHSTQDLFLPFFSNVTWFHAIHVSGTNGTKRFDNPVLPFNDGVYFASTEKSNIIRGWIFGTTLDSKTQSLLIVNNATNVVIKVCEFQFCNDPFLGVYYHKNNKSWMESEFRVYSSANNCTFEYVSQPFLMDLEGKQGNFKNLREFVFKNIDGYFKIYSKHTPINLVRDLPQGFSALEPLVDLPIGINITRFQTLLALHRSYLTPGDSSSGWTAGAAAYYVGYLQPRTFLLKYNENGTITDAVDCALDPLSETKCTLKSFTVEKGIYQTSNFRVQPTESIVRFPNITNLCPFGEVFNATRFASVYAWNRKRISNCVADYSVLYNSASFSTFKCYGVSPTKLNDLCFTNVYADSFVIRGDEVRQIAPGQTGKIADYNYKLPDDFTGCVIAWNSNNLDSKVGGNYNYLYRLFRKSNLKPFERDISTEIYQAGSTPCNGVEGFNCYFPLQSYGFQPTNGVGYQPYRVVVLSFELLHAPATVCGPKKSTNLVKNKCVNFNFNGLTGTGVLTESNKKFLPFQQFGRDIADTTDAVRDPQTLEILDITPCSFGGVSVITPGTNTSNQVAVLYQDVNCTEVPVAIHADQLTPTWRVYSTGSNVFQTRAGCLIGAEHVNNSYECDIPIGAGICASYQTQTNSPRRARSVASQSIIAYTMSLGAENSVAYSNNSCAIPTNFTISVTTEILPVSMTKTSVDCTMYICGDSTECSNLLLQYGSFCTQLNRALTGIAVEQDKNTQEVFAQVKQIYKTPPIKDFGGFNFSQILPDPSKPSKRSFIEDLLFNKVTLADAGFIKQYGDCLGDIAARDLICAQKFNGLTVLPPLLTDEMIAQYTSALLAGTITSGWTFGAGAALQIPFAMQMAYRFNGIGVTQNVLYENQKLIANQFNSAIGKIQDSLSSTASALGKLQDVVNQNAQALNTLVKQLSSNFGAISSVLNDILSRLDKVEAEVQIDRLITGRLQSLQTYVTQQLIRAAEIRASANLAATKMSECVLGQSKRVDFCGKGYHLMSFPQSAPHGVVFLHVTYVPAQEKNFTCAPAICHDGKAHFPREGVFVSNGTHWFVTQRNFYEPQIITTDNTFVSGNCDVVIGIVNNTVYDPLQLELDSFKEELDKYFKNHTSPDVDLGDISGINASVVNIQKEIDRLNEVAKNLNESLIDLQELGKYEQYIK

SEQ ID NO: 1960 - protein, 1211 aa, Artificial Sequence
  SARS-CoV-2/India/1-31/2020__EPI_ISL_413523 spike protein (1-1211)(I712C_T1077C)
MFVFLVLLPLVSSQCVNLTTRTQLPPAYTNSFTRGVYYPDKVFRSSVLHSTQDLFLPFFSNVTWFHAIHVSGTNGTKRFDNPVLPFNDGVYFASTEKSNIIRGWIFGTTLDSKTQSLLIVNNATNVVIKVCEFQFCNDPFLGVYYHKNNKSWMESEFRVYSSANNCTFEYVSQPFLMDLEGKQGNFKNLREFVFKNIDGYFKIYSKHTPINLVRDLPQGFSALEPLVDLPIGINITRFQTLLALHRSYLTPGDSSSGWTAGAAAYYVGYLQPRTFLLKYNENGTITDAVDCALDPLSETKCTLKSFTVEKGIYQTSNFRVQPTESIVRFPNITNLCPFGEVFNATRFASVYAWNRKRISNCVADYSVLYNSASFSTFKCYGVSPTKLNDLCFTNVYADSFVIRGDEVRQIAPGQTGKIADYNYKLPDDFTGCVIAWNSNNLDSKVGGNYNYLYRLFRKSNLKPFERDISTEIYQAGSTPCNGVEGFNCYFPLQSYGFQPTNGVGYQPYRVVVLSFELLHAPATVCGPKKSTNLVKNKCVNFNFNGLTGTGVLTESNKKFLPFQQFGRDIADTTDAVRDPQTLEILDITPCSFGGVSVITPGTNTSNQVAVLYQDVNCTEVPVAIHADQLTPTWRVYSTGSNVFQTRAGCLIGAEHVNNSYECDIPIGAGICASYQTQTNSPRRARSVASQSIIAYTMSLGAENSVAYSNNSCAIPTNFTISVTTEILPVSMTKTSVDCTMYICGDSTECSNLLLQYGSFCTQLNRALTGIAVEQDKNTQEVFAQVKQIYKTPPIKDFGGFNFSQILPDPSKPSKRSFIEDLLFNKVTLADAGFIKQYGDCLGDIAARDLICAQKFNGLTVLPPLLTDEMIAQYTSALLAGTITSGWTFGAGAALQIPFAMQMAYRFNGIGVTQNVLYENQKLIANQFNSVIGKIQDSLSSTASALGKLQDVVNQNAQALNTLVKQLSSNFGAISSVLNDILSRLDKVEAEVQIDRLITGRLQSLQTYVTQQLIRAAEIRASANLAATKMSECVLGQSKRVDFCGKGYHLMSFPQSAPHGVVFLHVTYVPAQEKNFTCAPAICHDGKAHFPREGVFVSNGTHWFVTQRNFYEPQIITTDNTFVSGNCDVVIGIVNNTVYDPLQPELDSFKEELDKYFKNHTSPDVDLGDISGINASVVNIQKEIDRLNEVAKNLNESLIDLQELGKYEQYIK

SEQ ID NO: 1961 - protein, 1211 aa, Artificial Sequence
  SARS-CoV-2/Guangdong/GD2020087-P0008/2020__EPI_ISL_413863 spike protein (1-1211)(I712C_T1077C)
MFVFLVLLPLVSSQCVNLTTRTQLPPAYTNSFTRGVYYPDKVFRSSVLHSTQDLFLPFFSNVTWFHAIHVSGTNGTKRFDNPVLPFNDGVYFASTEKSNIIRGWIFGTTLDSKTQSLLIVNNATNVVIKVCEFQFCNDPFLGVYYHKNNKSWMESEFRVYSSANNCTFEYVSQPFLMDLEGKQGNFKNLREFVFKNIDGYFKIYSKHTPINLVRDLPQGFSALEPLVDLPIGINITRFQTLLALHRSYLTPGDSSSGWTAGAAAYYVGYLQPRTFLLKYNENGTITDAVDCALDPLSETKCTLKSFTVEKGIYQTSNFRVQPTESIVRFPNITNLCPFGEVFNATRFASVYAWNRKRISNCVADYSVLYNSASFSTFKCYGVSPTKLNDLCFTNVYADSFVIRGDEVREIAPGQTGKIADYNYKLPDDFTGCVIAWNSNNLDSKVGGNYNYLYRLFRKSNLKPFERDISTEIYQAGSTPCNGVEGFNCYFPLQSYGFQPTNGVGYQPYRVVVLSFELLHAPATVCGPKKSTNLVKNKCVNFNFNGLTGTGVLTESNKKFLPFQQFGRDIADTTDAVRDPQTLEILDITPCSFGGVSVITPGTNTSNQVAVLYQDVNCTEVPVAIHADQLTPTWRVYSTGSNVFQTRAGCLIGAEHVNNSYECDIPIGAGICASYQTQTNSPRRARSVASQSIIAYTMSLGAENSVAYSNNSCAIPTNFTISVTTEILPVSMTKTSVDCTMYICGDSTECSNLLLQYGSFCTQLNRALTGIAVEQDKNTQEVFAQVKQIYKTPPIKDFGGFNFSQILPDPSKPSKRSFIEDLLFNKVTLADAGFIKQYGDCLGDIAARDLICAQKFNGLTVLPPLLTDEMIAQYTSALLAGTITSGWTFGAGAALQIPFAMQMAYRFNGIGVTQNVLYENQKLIANQFNSAIGKIQDSLSSTASALGKLQDVVNQNAQALNTLVKQLSSNFGAISSVLNDILSRLDKVEAEVQIDRLITGRLQSLQTYVTQQLIRAAEIRASANLAATKMSECVLGQSKRVDFCGKGYHLMSFPQSAPHGVVFLHVTYVPAQEKNFTCAPAICHDGKAHFPREGVFVSNGTHWFVTQRNFYEPQIITTDNTFVSGNCDVVIGIVNNTVYDPLQPELDSFKEELDKYFKNHTSPDVDLGDISGINASVVNIQKEIDRLNEVAKNLNESLIDLQELGKYEQYIK

SEQ ID NO: 1962 - protein, 1211 aa, Artificial Sequence
  SARS-CoV-2/Sweden/01/2020__EPI_ISL_411951 spike protein (1-1211)(I712C_T1077C)
MFVFLVLLPLVSSQCVNLTTRTQLPPAYTNSFTRGVYYPDKVFRSSVLHSTQDLFLPFFSNVTWFHAIHVSGTNGTKRFDNPVLPFNDGVYFASTEKSNIIRGWIFGTTLDSKTQSLLIVNNATNVVIKVCEFQFCNDPFLGVYYHKNNKSWMESEFRVYSSANNCTFEYVSQPFLMDLEGKQGNFKNLREFVFKNIDGYFKIYSKHTPINLVRDLPQGFSALEPLVDLPIGINITRFQTLLALHRSYLTPGDSSSGWTAGAAAYYVGYLQPRTFLLKYNENGTITDAVDCALDPLSETKCTLKSFTVEKGIYQTSNFRVQPTESIVRFPNITNLCPFGEVFNATRFASVYAWNRKRISNCVADYSVLYNSASFSTFKCYGVSPTKLNDLCFTNVYADSFVIRGDEVRQIAPGQTGKIADYNYKLPDDFTGCVIAWNSNNLDSKVGGNYNYLYRLFRKSNLKPFERDISTEIYQAGSTPCNGVEGFNCYFPLQSYGFQPTNGVGYQPYRVVVLSFELLHAPATVCGPKKSTNLVKNKCVNFNFNGLTGTGVLTESNKKFLPFQQFGRDIADTTDAVRDPQTLEILDITPCSFGGVSVITPGTNTSNQVAVLYQDVNCTEVPVAIHADQLTPTWRVYSTGSNVFQTRAGCLIGAEHVNNSYECDIPIGAGICASYQTQTNSPRRARSVASQSIIAYTMSLGAENSVAYSNNSCAIPTNFTISVTTEILPVSMTKTSVDCTMYICGDSTECSNLLLQYGSFCTQLNRALTGIAVEQDKNTQEVFAQVKQIYKTPPIKDCGGFNFSQILPDPSKPSKRSFIEDLLFNKVTLADAGFIKQYGDCLGDIAARDLICAQKFNGLTVLPPLLTDEMIAQYTSALLAGTITSGWTFGAGAALQIPFAMQMAYRFNGIGVTQNVLYENQKLIANQFNSAIGKIQDSLSSTASALGKLQDVVNQNAQALNTLVKQLSSNFGAISSVLNDILSRLDKVEAEVQIDRLITGRLQSLQTYVTQQLIRAAEIRASANLAATKMSECVLGQSKRVDFCGKGYHLMSFPQSAPHGVVFLHVTYVPAQEKNFTCAPAICHDGKAHFPREGVFVSNGTHWFVTQRNFYEPQIITTDNTFVSGNCDVVIGIVNNTVYDPLQPELDSFKEELDKYFKNHTSPDVDLGDISGINASVVNIQKEIDRLNEVAKNLNESLIDLQELGKYEQYIK

SEQ ID NO: 1963 - protein, 1211 aa, Artificial Sequence
  SARS-CoV-2/Tianmen/HBCDC-HB-07/2020__EPI_ISL_412983 spike protein (1-1211)(I712C_T1077C)
MFVFLVLLPLVSSQCVNLTTRTQLPPAYTNSFTRGVYYPDKVFRSSVLHSTQDLFLPFFSNVTWFHAIHVSGTNGTKRFDNPVLPFNDGVYFASTEKSNIIRGWIFGTTLDSKTQSLLIVNNATNVVIKVCEFQFCNDPFLGVYYHKNNKSWMESEFRVYSSANNCTFEYVSQPFLMDLEGKQGNFKNLREFVFKNIDGYFKIYSKHTPINLVRDLPQGFSALEPLVDLPIGINITRFQTLLALHRSYLTPGDSSSGWTAGAAAYYVGYLQPRTFLLKYNENGTITDAVDCALDPLSETKCTLKSFTVEKGIYQTSNFRVQPTESIVRFPNITNLCPFGEVFNATRFASVYAWNRKRISNCVADYSVLYNSASFSTFKCYGVSPTKLNDLCFTNVYADSFVIRGDEVRQIAPGQTGKIADYNYKLPDDFTGCVIAWNSNNLDSKVGGNYNYLYRLFRKSNLKPFERDISTEIYQAGSTPCNGVEGFNCYFPLQSYGFQPTNGVGYQPYRVVVLSFELLHAPATVCGPKKSTNLVKNKCVNFNFNGLTGTGVLTESNKKFLPFQQFGRDIADTTDAVRDPQTLEILDITPCSFGGVSVITPGTNTSNQVAVLYQDLNCTEVPVAIHADQLTPTWRVYSTGSNVFQTRAGCLIGAEHVNNSYECDIPIGAGICASYQTQTNSPRRARSVASQSIIAYTMSLGAENSVAYSNNSCAIPTNFTISVTTEILPVSMTKTSVDCTMYICGDSTECSNLLLQYGSFCTQLNRALTGIAVEQDKNTQEVFAQVKQIYKTPPIKDFGGFNFSQILPDPSKPSKRSFIEDLLFNKVTLADAGFIKQYGDCLGDIAARDLICAQKFNGLTVLPPLLTDEMIAQYTSALLAGTITSGWTFGAGAALQIPFAMQMAYRFNGIGVTQNVLYENQKLIANQFNSAIGKIQDSLSSTASALGKLQDVVNQNAQALNTLVKQLSSNFGAISSVLNDILSRLDKVEAEVQIDRLITGRLQSLQTYVTQQLIRAAEIRASANLAATKMSECVLGQSKRVDFCGKGYHLMSFPQSAPHGVVFLHVTYVPAQEKNFTCAPAICHDGKAHFPREGVFVSNGTHWFVTQRNFYEPQIITTDNTFVSGNCDVVIGIVNNTVYDPLQPELDSFKEELDKYFKNHTSPDVDLGDISGINASVVNIQKEIDRLNEVAKNLNESLIDLQELGKYEQYIK

SEQ ID NO: 1964 - protein, 1211 aa, Artificial Sequence
  SARS-CoV-2/Hong Kong/case42_VM20002493/2020__EPI_ISL_414527 spike protein (1-1211)(I712C_T1077C)
MFVFLVLLPLVSSQCVNLTTRTQLPPAYTNSFTRGVYYPDKVFRSSVLHSTQDLFLPFFSNVTWFHAIHVSGTNGTKRFDNPVLPFNDGVYFASTEKSNIIRGWIFGTTLDSKTQSLLIVNNATNVVIKVCEFQFCNDPFLGVYYHKNNKSWMESEFRVYSSANNCTFEYVSQPFLMDLEGKQGNFKNLREFVFKNIDGYFKIYSKHTPINLVRDLPQGFSALEPLVDLPIGINITRFQTLLALHRSYLTPGDSSSGWTAGAAAYYVGYLQPRTFLLKYNENGTITDAVDCALDPLSETKCTLKSFTVEKGIYQTSNFRVQPTESIVRFPNITNLCPFGEVFNATRFASVYAWNRKRISNCVADYSVLYNSASFSTFKCYGVSPTKLNDLCFTNVYADSFVIRGDEVRQIAPGQTGKIADYNYKLPDDFTGCVIAWNSNNLDSKVGGNYNYLYRLFRKSNLKPFERDISTEIYQAGSTPCNGVEGFNCYFPLQSYGFQPTNGVGYQPYRVVVLSFELLHAPATVCGPKKSTNLVKNKCVNFNFNGLTGTGVLTESNKKFLPFQQFGRDIADTTDAVRDPQTLEILDITPCSFGGVSVITPGTNTSNQVAVLYQDVNCTEVPVAIHADQLTPTWRVYSTGSNVFQTRAGCLIGAEHVNNSYECDIPIGAGICASYQTQTNSPRRARSVASQSIIAYTMSLGAENSVAYSNNSCAIPTNFAISVTTEILPVSMTKTSVDCTMYICGDSTECSNLLLQYGSFCTQLNRALTGIAVEQDKNTQEVFAQVKQIYKTPPIKDFGGFNFSQILPDPSKPSKRSFIEDLLFNKVTLADAGFIKQYGDCLGDIAARDLICAQKFNGLTVLPPLLTDEMIAQYTSALLAGTITSGWTFGAGAALQIPFAMQMAYRFNGIGVTQNVLYENQKLIANQFNSAIGKIQDSLSSTASALGKLQDVVNQNAQALNTLVKQLSSNFGAISSVLNDILSRLDKVEAEVQIDRLITGRLQSLQTYVTQQLIRAAEIRASANLAATKMSECVLGQSKRVDFCGKGYHLMSFPQSAPHGVVFLHVTYVPAQEKNFTCAPAICHDGKAHFPREGVFVSNGTHWFVTQRNFYEPQIITTDNTFVSGNCDVVIGIVNNTVYDPLQPELDSFKEELDKYFKNHTSPDVDLGDISGINASVVNIQKEIDRLNEVAKNLNESLIDLQELGKYEQYIK

SEQ ID NO: 1965 - protein, 1211 aa, Artificial Sequence
  SARS-CoV-2/USA/CruiseA-23/2020__EPI_ISL_414482 spike protein (1-1211)(I712C_T1077C)
MFVFLVLLPLVSSQCVNLTTRTQLPPAYTNSFTRGVYYPDKVFRSSVLHSTQDLFLPFFSNVTWFHAIHVSGTNGTKRFDNPVLPFNDGVYFASTEKSNIIRGWIFGTTLDSKTQSLLIVNNATNVVIKVCEFQFCNDPFLGVYYHKNNKSWMESEFRVYSSANNCTFEYVSQPFLMDLEVKQGNFKNLREFVFKNIDGYFKIYSKHTPINLVRDLPQGFSALEPLVDLPIGINITRFQTLLALHRSYLTPGDSSSGWTAGAAAYYVGYLQPRTFLLKYNENGTITDAVDCALDPLSETKCTLKSFTVEKGIYQTSNFRVQPTESIVRFPNITNLCPFGEVFNATRFASVYAWNRKRISNCVADYSVLYNSASFSTFKCYGVSPTKLNDLCFTNVYADSFVIRGDEVRQIAPGQTGKIADYNYKLPDDFTGCVIAWNSNNLDSKVGGNYNYLYRLFRKSNLKPFERDISTEIYQAGSTPCNGVEGFNCYFPLQSYGFQPTNGVGYQPYRVVVLSFELLHAPATVCGPKKSTNLVKNKCVNFNFNGLTGTGVLTESNKKFLPFQQFGRDIADTTDAVRDPQTLEILDITPCSFGGVSVITPGTNTSNQVAVLYQDVNCTEVPVAIHADQLTPTWRVYSTGSNVFQTRAGCLIGAEHVNNSYECDIPIGAGICASYQTQTNSPRRARSVASQSIIAYTMSLGAENSVAYSNNSCAIPTNFTISVTTEILPVSMTKTSVDCTMYICGDSTECSNLLLQYGSFCTQLNRALTGIAVEQDKNTQEVFAQVKQIYKTPPIKDFGGFNFSQILPDPSKPSKRSFIEDLLFNKVTLADAGFIKQYGDCLGDIAARDLICAQKFNGLTVLPPLLTDEMIAQYTSALLAGTITSGWTFGAGAALQIPFAMQMAYRFNGIGVTQNVLYENQKLIANQFNSAIGKIQDSLSSTASALGKLQDVVNQNAQALNTLVKQLSSNFGAISSVLNDILSRLDKVEAEVQIDRLITGRLQSLQTYVTQQLIRAAEIRASANLAATKMSECVLGQSKRVDFCGKGYHLMSFPQSAPHGVVFLHVTYVPAQEKNFTCAPAICHDGKAHFPREGVFVSNGTHWFVTQRNFYEPQIITTDNTFVSGNCDVVIGIVNNTVYDPLQPELDSFKEELDKYFKNHTSPDVDLGDISGINASVVNIQKEIDRLNEVAKNLNESLIDLQELGKYEQYIK

SEQ ID NO: 1966 - protein, 1211 aa, Artificial Sequence
  SARS-CoV-2/Hong Kong/case85_VM20002868/2020__EPI_ISL_414519 spike protein (1-1211)(I712C_T1077C)
MFVFLVLVPLVSSQCVNLTTRTQLPPAYTNSFTRGVYYPDKVFRSSVLHSTQDLFLPFFSNVTWFHAIHVSGTNGTKRFDNPVLPFNDGVYFASTEKSNIIRGWIFGTTLDSKTQSLLIVNNATNVVIKVCEFQFCNDPFLGVYYHKNNKSWMESEFRVYSSANNCTFEYVSQPFLMDLEGKQGNFKNLREFVFKNIDGYFKIYSKHTPINLVRDLPQGFSALEPLVDLPIGINITRFQTLLALHRSYLTPGDSSSGWTAGAAAYYVGYLQPRTFLLKYNENGTITDAVDCALDPLSETKCTLKSFTVEKGIYQTSNFRVQPTESIVRFPNITNLCPFGEVFNATRFASVYAWNRKRISNCVADYSVLYNSASFSTFKCYGVSPTKLNDLCFTNVYADSFVIRGDEVRQIAPGQTGKIADYNYKLPDDFTGCVIAWNSNNLDSKVGGNYNYLYRLFRKSNLKPFERDISTEIYQAGSTPCNGVEGFNCYFPLQSYGFQPTNGVGYQPYRVVVLSFELLHAPATVCGPKKSTNLVKNKCVNFNFNGLTGTGVLTESNKKFLPFQQFGRDIADTTDAVRDPQTLEILDITPCSFGGVSVITPGTNTSNQVAVLYQDVNCTEVPVAIHADQLTPTWRVYSTGSNVFQTRAGCLIGAEHVNNSYECDIPIGAGICASYQTQTNSPRRARSVASQSIIAYTMSLGAENSVAYSNNSCAIPTNFTISVTTEILPVSMTKTSVDCTMYICGDSTECSNLLLQYGSFCTQLNRALTGIAVEQDKNTQEVFAQVKQIYKTPPIKDFGGFNFSQILPDPSKPSKRSFIEDLLFNKVTLADAGFIKQYGDCLGDIAARDLICAQKFNGLTVLPPLLTDEMIAQYTSALLAGTITSGWTFGAGAALQIPFAMQMAYRFNGIGVTQNVLYENQKLIANQFNSAIGKIQDSLSSTASALGKLQDVVNQNAQALNTLVKQLSSNFGAISSVLNDILSRLDKVEAEVQIDRLITGRLQSLQTYVTQQLIRAAEIRASANLAATKMSECVLGQSKRVDFCGKGYHLMSFPQSAPHGVVFLHVTYVPAQEKNFTCAPAICHDGKAHFPREGVFVSNGTHWFVTQRNFYEPQIITTDNTFVSGNCDVVIGIVNNTVYDPLQPELDSFKEELDKYFKNHTSPDVDLGDISGINASVVNIQKEIDRLNEVAKNLNESLIDLQELGKYEQYIK

SEQ ID NO: 1967 - protein, 1211 aa, Artificial Sequence; identical to SEQ ID NO: 1957
  SARS-CoV-2/England/200990660/2020__EPI_ISL_414523 spike protein (1-1211)(I712C_T1077C)

SEQ ID NO: 1968 - protein, 1211 aa, Artificial Sequence
  SARS-CoV-2/Australia/NSW09/2020__EPI_ISL_413595 spike protein (1-1211)(I712C_T1077C)
MFVFLVLLPLVSSQCVNLTTRTQLPPAYTNSFTRGVYYPDKVFRSSVLHSTQDLFLPFFSNVTWFHAIHVSGTNGTKRFDNPVLPFNDGVYFASTEKSNIIRGWIFGTTLDSKTQSLLIVNNATNVVIKVCEFQFCNDPFLGVYYHKNNKSWMESEFRVYSSANNCTFEYVSQPFLMDLEGKQGNFKNLREFVFKNIDGYFKIYSKHTPINLVRDLPQGFSALEPLVDLPIGINITRFQTLLALHRSYLTPGDSSSGWTAGAAAYYVGYLQPRTFLLKYNENGTITDAVDCALDPLSETKCTLKSFTVEKGIYQTSNFRVQPTESIVRFPNITNLCPFGEVFNATRFASVYAWNRKRISNCVADYSVLYNSASFSTFKCYGVSPTKLNDLCFTNVYADSFVIRGDEVRQIAPGQTGKIADYNYKLPDDFTGCVIAWNSNNLDSKVGGNYNYLYRLFRKSNLKPFERDISTEIYQAGSTPCNGVEGFNCYFPLQSYGFQPTNGVGYQPYRVVVLSFELLHAPATVCGPKKSTNLVKNKCVNFNFNGLTGTGVLTESNKKFLPFQQFGRDIADTTDAVRDPQTLEILDITPCSFGGVSVITPGTNTSNQVAVLYQDVNCTEVPVAIHADQLTPTWRVYSTGSNVFQTRAGCLIGAEHVNNSYECDIPIGAGICASYQTQTNSPRRARSVASQSIIAYTMSLGAENSVAYSNNSCAIPTNFTISVTTEILPVSMTKTSVDCTMYICGDSTECSNLLLQYGSFCTQLNRALTGIAVEQDKNTQEVFAQVKQIYKTPPIKDFGGFNFSQILPDPSKPSKRSFIEDLLFNKVTLADAGFIKQYGDCLGDIAARDLICAQKFNGLTVLPPLLTDEMIAQYTSALLAGTITSGWTFGAGAALQIPFAMQMAYRFNGIGVTQNVLYENQKLIANQFNSAIGKIQDSLSFTASALGKLQDVVNQNAQALNTLVKQLSSNFGAISSVLNDILSRLDKVEAEVQIDRLITGRLQSLQTYVTQQLIRAAEIRASANLAATKMSECVLGQSKRVDFCGKGYHLMSFPQSAPHGVVFLHVTYVPAQEKNFTCAPAICHDGKAHFPREGVFVSNGTHWFVTQRNFYEPQIITTDNTFVSGNCDVVIGIVNNTVYDPLQPELDSFKEELDKYFKNHTSPDVDLGDISGINASVVNIQKEIDRLNEVAKNLNESLIDLQELGKYEQYIK

SEQ ID NO: 1969 - protein, 1211 aa, Artificial Sequence; identical to SEQ ID NO: 1949
  SARS-CoV-2/Australia/NSW10/2020__EPI_ISL_413596 spike protein (1-1211)(I712C_T1077C)

SEQ ID NO: 1970 - protein, 1211 aa, Artificial Sequence
  SARS-CoV-2/Switzerland/1000477797/2020__EPI_ISL_413023 spike protein (1-1211)(I712C_T1077C)
MFVFLVLLPLVSSQCVNLTTRTQLPPAYTNSFTRGVYYPDKVFRSSVLHSTQDLFLPFFSNVTWFHAIHVSGTNGTKRFDNPVLPFNDGVYFASTEKSNIIRGWIFGTTLDSKTQSLLIVNNATNVVIKVCEFQFCNDPFLGVYYHKNNKSWMESEFRVYSSANNCTFEYVSQPFLMDLEGKQGNFKNLREFVFKNIDGYFNIYSKHTPINLVRDLPQGFSALEPLVDLPIGINITRFQTLLALHRSYLTPGDSSSGWTAGAAAYYVGYLQPRTFLLKYNENGTITDAVDCALDPLSETKCTLKSFTVEKGIYQTSNFRVQPTESIVRFPNITNLCPFGEVFNATRFASVYAWNRKRISNCVADYSVLYNSASFSTFKCYGVSPTKLNDLCFTNVYADSFVIRGDEVRQIAPGQTGKIADYNYKLPDDFTGCVIAWNSNNLDSKVGGNYNYLYRLFRKSNLKPFERDISTEIYQAGSTPCNGVEGFNCYFPLQSYGFQPTNGVGYQPYRVVVLSFELLHAPATVCGPKKSTNLVKNKCVNFNFNGLTGTGVLTESNKKFLPFQQFGRDIADTTDAVRDPQTLEILDITPCSFGGVSVITPGTNTSNQVAVLYQGVNCTEVPVAIHADQLTPTWRVYSTGSNVFQTRAGCLIGAEHVNNSYECDIPIGAGICASYQTQTNSPRRARSVASQSIIAYTMSLGAENSVAYSNNSCAIPTNFTISVTTEILPVSMTKTSVDCTMYICGDSTECSNLLLQYGSFCTQLNRALTGIAVEQDKNTQEVFAQVKQIYKTPPIKDFGGFNFSQILPDPSKPSKRSFIEDLLFNKVTLADAGFIKQYGDCLGDIAARDLICAQKFNGLTVLPPLLTDEMIAQYTSALLAGTITSGWTFGAGAALQIPFAMQMAYRFNGIGVTQNVLYENQKLIANQFNSAIGKIQDSLSSTASALGKLQDVVNQNAQALNTLVKQLSSNFGAISSVLNDILSRLDKVEAEVQIDRLITGRLQSLQTYVTQQLIRAAEIRASANLAATKMSECVLGQSKRVDFCGKGYHLMSFPQSAPHGVVFLHVTYVPAQEKNFTCAPAICHDGKAHFPREGVFVSNGTHWFVTQRNFYEPQIITTDNTFVSGNCDVVIGIVNNTVYDPLQPELDSFKEELDKYFKNHTSPDVDLGDISGINASVVNIQKEIDRLNEVAKNLNESLIDLQELGKYEQYIK

SEQ ID NO: 1971 - protein, 1211 aa, Artificial Sequence
  SARS-CoV-2/Belgium/BA-02291/2020__EPI_ISL_415159 spike protein (1-1211)(I712C_T1077C)
MFVFLVLLPLVSSQCVNLTTRTQLPPAYTNSFTRGVYYPDKVFRSSVLHSTQDLFLPFFSNVTWFHAIHVSGTNGTKRFDNPVLPFNDGVYFASTEKSNIIRGWIFGTTLDSKTQSLLIVNNATNVVIKVCEFQFCNDPFLGVYYHKNNKSWMESEFRVYSSANNCTFEYVSQPFLMDLEGKQGNFKNLREFVFKNIDGYFKIYSKHTPINLVRDLPQGFSALEPLVDLPIGINITRFQTLLALHRSYLTPGDSSSGWTAGAAAYYVGYLQPRTFLLKYNENGTITDAVDCALDPLSETKCTLKSFTVEKGIYQTSNFRVQPTESIVRFPNITNLCPFGEVFNATRFASVYAWNRKRISNCVADYSVLYNSASFSTFKCYGVSPTKLNDLCFTNVYADSFVIRGDEVRQIAPGQTGKIADYNYKLPDDFTGCVIAWNSNNLDSKVGGNYNYLYRLFRRSNLKPFERDISTEIYQAGSTPCNGVEGFNCYFPLQSYGFQPTNGVGYQPYRVVVLSFELLPAPATVCGPKKSTNLVKNKCVNFNFNGLTGTGVLTESNKKFLPFQQFGRDIADTTDAVRDPQTLEILDITPCSFGGVSVITPGTNTSNQVAVLYQGVNCTEVPVAIHADQLTPTWRVYSTGSNVFQTRAGCLIGAEHVNNSYECDIPIGAGICASYQTQTNSPRRARSVASQSIIAYTMSLGAENSVAYSNNSCAIPTNFTISVTTEILPVSMTKTSVDCTMYICGDSTECSNLLLQYGSFCTQLNRALTGIAVEQDKNTQEVFAQVKQIYKTPPIKDFGGFNFSQILPDPSKPSKRSFIEDLLFNKVTLADAGFIKQYGDCLGDIAARDLICAQKFNGLTVLPPLLTDEMIAQYTSALLAGTITSGWTFGAGAALQIPFAMQMAYRFNGIGVTQNVLYENQKLIANQFNSAIGKIQDSLSSAAPALGKLQDVVNQNAQALNTLVKQLSSNFGAISSVLNDILSRLDKVEAEVQIDRLITGRLQSLQTYVTQQLIRAAEIRASANLAATKMSECVLGQSKRVDFCGKGYHLMSFPQSAPHGVVFLHVTYVPAQEKNFTCAPAICHDGKAHFPREGVFVSNGTHWFVTQRNFYEPQIITTDNTFVSGNCDVVIGIVNNTVYDPLQPELDSFKEELDKYFKNHTSPDVDLGDISGINASVVNIQKEIDRLNEVAKNLNESLIDLQELGKYEQYIK

SEQ ID NO: 1972 - protein, 1211 aa, Artificial Sequence
  SARS-CoV-2/USA/WA8-UW5/2020__EPI_ISL_413486 spike protein (1-1211)(I712C_T1077C)
MFVFLVLLPLVSSQCVNLTTRTQLPPAYTNSFTRGVYYPDKVFRSSVLHSTQDLFLPFFSNVTWFHAIHVSGTNGTKRFDNPVLPFNDGVYFASTEKSNIIRGWIFGTTLDSKTQSLLIVNNATNVVIKVCEFQFCNDPFLGVYYHKNNKSWMESEFRVYSSANNCTFEYVSQPFLMDLEGKQGNFKNLREFVFKNIDGYFKIYSKHTPINLVRDLPQGFSALEPLVDLPIGINITRFQTLLALHRSYLTPGDSSSGWTAGAAAYYVGYLQPRTFLLKYNENGTITDAVDCALDPLSETKCTLKSFTVEKGIYQTSNFRVQPTESIVRFPNITNLCPFGEVFNATRFASVYAWNRKRISNCVADYSVLYNSASFSTFKCYGVSPTKLNDLCFTNVYADSFVIRGDEVRQIAPGQTGKIADYNYKLPDDFTGCVIAWNSNNLDSKVGGNYNYLYRLFRKSNLKPFERDISTEIYQAGSTPCNGVEGFNCYFPLQSYGFQPTNGVGYQPYRVVVLSFELLHAPATVCGPKKSTNLVKNKCVNFNFNGLTGTGVLTESNKKFLPFQQFGRDIADTTDAVRDPQTLEILDITPCSFGGVSVITPGTNTSNQVAVLYQDVNCTEVPVAIHADQLTPTWRVYSTGSNVFQTRAGCLIGAEYVNNSYECDIPIGAGICASYQTQTNSPRRARSVASQSIIAYTMSLGAENSVAYSNNSCAIPTNFTISVTTEILPVSMTKTSVDCTMYICGDSTECSNLLLQYGSFCTQLNRALTGIAVEQDKNTQEVFAQVKQIYKTPPIKDFGGFNFSQILPDPSKPSKRSFIEDLLFNKVTLADAGFIKQYGDCLGDIAARDLICAQKFNGLTVLPPLLTDEMIAQYTSALLAGTITSGWTFGAGAALQIPFAMQMAYRFNGIGVTQNVLYENQKLIANQFNSAIGKIQDSLSSTASALGKLQDVVNQNAQALNTLVKQLSSNFGAISSVLNDILSRLDKVEAEVQIDRLITGRLQSLQTYVTQQLIRAAEIRASANLAATKMSECVLGQSKRVDFCGKGYHLMSFPQSAPHGVVFLHVTYVPAQEKNFTCAPAICHDGKAHFPREGVFVSNGTHWFVTQRNFYEPQIITTDNTFVSGNCDVVIGIVNNTVYDPLQPELDSFKEELDKYFKNHTSPDVDLGDISGINASVVNIQKEIDRLNEVAKNLNESLIDLQELGKYEQYIK

SEQ ID NO: 1973 - protein, 1211 aa, Artificial Sequence
  SARS-CoV-2/England/20102000506/2020__EPI_ISL_415147 spike protein (1-1211)(I712C_T1077C)
MFVFLVLLPLVSSQCVNLTTRTQLPPAYTNSFTRGVYYPDKVFRSSVLHSTQDLFLPFFSNVTWFHAIHVSGTNGTKRFDNPVLPFNDGVYFASTEKSNIIRGWIFGTTLDSKTQSLLIVNNATNVVIKVCEFQFCNDPFLGVYYHKNNKSWMESEFRVYSSANNCTFEYVSQPFLMDLEGKQGNFKNLREFVFKNIDGYFKIYSKHTPINLVRDLPQGFSALEPLVDLPIGINITRFQTLLALHRSYLTPGDSSSGWTAGAAAYYVGYLQPRTFLLKYNENGTITDAVDCALDPLSETKCTLKSFTVEKGIYQTSNFRVQPTESIVRFPNITNLCPFGEVFNATRFASVYAWNRKRISNCVADYSVLYNSASFSTFKCYGVSPTKLNDLCFTNVYADSFVIRGDEVRQIAPGQTGKIADYNYKLPDDFTGCVIAWNSNNLDSKVGGNYNYLYRLFRKSNLKPFERDISTEIYQAGSTPCNGVEGFNCYFPLQSYGFQPTNGVGYQPYRVVVLSFELLHAPATVCGPKKSTNLVKNKCVNFNFNGLTGTGVLTESNKKFLPFQQFGRDIADTTDAVRDPQTLEILDITPCSFGGVSVITPGTNTSNQVAVLYQGVNCTEVPVAIHADQLTPTWRVYSTGSNVFQTRAGCLIGAEHVNNSYECDIPIGAGICASYQTQTNSPRRARSVASQSIIAYTMSLGAENSVAYSNNSCAIPTNFTISVTTEILPVSMTKTSVDCTMYICGDSTECSNLLLQYGSFCTQLNRALTGIAVEQDKNTQEVFAQVKQIYKTPPIKDFGGFNFSQILPDPSKPSKRSFIEDLLFNKVTLADAGFIKQYGYCLGDIAARDLICAQKFNGLTVLPPLLTDEMIAQYTSALLAGTITSGWTFGAGAALQIPFAMQMAYRFNGIGVTQNVLYENQKLIANQFNSAIGKIQDSLSSTASALGKLQDVVNQNAQALNTLVKQLSSNFGAISSVLNDILSRLDKVEAEVQIDRLITGRLQSLQTYVTQQLIRAAEIRASANLAATKMSECVLGQSKRVDFCGKGYHLMSFPQSAPHGVVFLHVTYVPAQEKNFTCAPAICHDGKAHFPREGVFVSNGTHWFVTQRNFYEPQIITTDNTFVSGNCDVVIGIVNNTVYDPLQPELDSFKEELDKYFKNHTSPDVDLGDISGINASVVNIQKEIDRLNEVAKNLNESLIDLQELGKYEQYIK

SEQ ID NO: 1974 - protein, 1211 aa, Artificial Sequence
  SARS-CoV-2/Belgium/VAG-03013/2020__EPI_ISL_415155 spike protein (1-1211)(I712C_T1077C)
MFVFLVLLPLVSSQCVNLTTRTQLPPAYTNSFTRGVYYPDKVFRSSVLHSTQDLFLPFFSNVTWFHAIHVSGTNGTKRFDNPVLPFNDGVYFASTEKSNIIRGWIFGTTLDSKTQSLLIVNNATNVVIKVCEFQFCNDPFLGVYYHKNNKSWMESEFRVYSSANNCTFEYVSQPFLMDLEGKQGNFKNLREFVFKNIDGYFKIYSKHTPINLVRDLPQGFSALEPLVDLPIGINITRFQTLLALHRSYLTPGDSSSGWTAGAAAYYVGYLQPRTFLLKYNENGTITDAVDCALDPLSETKCTLKSFTVEKGIYQTSNFRVQPTESIVRFPNITNLCPFGEVFNATRFASVYAWNRKRISNCVADYSVLYNSASFSTFKCYGVSPTKLNDLCFTNVYADSFVIRGDEVRQIAPGQTGKIADYNYKLPDDFTGCVIAWNSNNLDSKVGGNYNYLYRLFRKSNLKPFERDISTEIYQAGSTPCNGVEGFNCYFPLQSYGFQPTNGVGYQPYRVVVLSFELLHAPATVCGPKKSTNLVKNKCVNFNFNGLTGTGVLTESNKKFLPFQQFGRDIADTTDAVRDPQTLEILDITPCSFGGVSVITPGTNTSNQVAVLYQGVNCTEVPVAIHADQLTPTWRVYSTGSNVFQTRAGCLIGAEHVNNSYECDIPIGAGICASYQTQTNSPRRARSVASQSIIAYTMSLGAENSVAYSNNSCAIPTNFTISVTTEILPVSMTKTSVDCTMYICGDSTECSNLLLQYGSFCTQLNRALTGIAVEQDKNTQEVFAQVKQIYKTPPIKDFGGFNFSQILPDPSKPSKRSFIEDLLFNKVTLADAGFIKQYGDCLGDIAARDLICAQKFNGLTVLPPLLTDEMIAQYTSALLAGTITSGWTFGAGAALQIPFAMQMAYRFNGIGVTQNVLYENQKLIANQFNSAIGKIQDSLSSTATALGKLQDVVNQNAQALNTLVKQLSSNFGAISSVLNDILSRLDKVEAEVQIDRLITGRLQSLQTYVTQQLIRAAEIRASANLAATKMSECVLGQSKRVDFCGKGYHLMSFPQSAPHGVVFLHVTYVPAQEKNFTCAPAICHDGKAHFPREGVFVSNGTHWFVTQRNFYEPQIITTDNTFVSGNCDVVIGIVNNTVYDPLQPELDSFKEELDKYFKNHTSPDVDLGDISGINASVVNIQKEIDRLNEVAKNLNESLIDLQELGKYEQYIK

SEQ ID NO: 1975 - protein, 1211 aa, Artificial Sequence
  SARS-CoV-2/Belgium/BC-03016/2020__EPI_ISL_415157 spike protein (1-1211)(I712C_T1077C)
MFVFLVLLPLVSSQCVNLTTRTQLPPAYTNSFTRGVYYPDKVFRSSVLHSTQDLFLPFFSNVTWFHAIHVSGTNGTKRFDNPVLPFNDGVYFASTEKSNIIRGWIFGTTLDSKTQSLLIVNNATNVVIKVCEFQFCNDPFLGVYYHKNNKSWMESEFRVYSSANNCTFEYVSQPFLMDLEGKQGNFKNLREFVFKNIDGYFKIYSKHTPINLVRDLPQGFSALEPLVDLPIGINITRFQTLLALHRSYLTPGDSSSGWTAGAAAYYVGYLQPRTFLLKYNENGTITDAVDCALDPLSETKCTLKSFTVEKGIYQTSNFRVQPTESIVRFPNITNLCPFGEVFNATRFASVYAWNRKRISNCVADYSVLYNSASFSTFKCYGVSPTKLNDLCFTNVYADSFVIRGDEVRQIAPGQTGKIADYNYKLPDDFTGCVIAWNSNNLDSKVGGNYNYLYRLFRKSNLKPFERDISTEIYQAGSTPCNGVEGFNCYFPLQSYGFQPTNGVGYQPYRVVVLSFELLHAPATVCGPKKSTNLVKNKCVNFNFNGLTGTGVLTESNKKFLPFQQFGRDIADTTDAVRDPQTLEILDITPCSFGGVSVITPGTNTSNQVAVLYQGVNCTEVPVAIHADQLTPTWRVYSTGSNVFQTRAGCLIGAEHVNNSYECDIPIGAGICASYQTQTNSPRRARSVASQSIIAYTMSLGAENSVAYSNNSCAIPTNFTISVTTEILPVSMTKTSVDCTMYICGDSTECSNLLLQYGSFCTQLNRALTGIAVEQDKNTQEVFAQVKQIYKTPPIKDFGGFNFSQILPDPSKPSKRSFIEDLLFNKVTLADAGFIKQYGDCLGDIAARDLICAQKFNGLTVLPPLLTDEMIAQYTSALLAGTITSGWTFGAGAALQIPFAMQMAYRFNGIGVTQNVLYENQKLIANQFNSAIGKIQDSLSSTAPALGKLQDVVNQNAQALNTLVKQLSSNFGAISSVLNDILSRLDKVEAEVQIDRLITGRLQSLQTYVTQQLIRAAEIRASANLAATKMSECVLGQSKRVDFCGKGYHLMSFPQSAPHGVVFLHVTYVPAQEKNFTCAPAICHDGKAHFPREGVFVSNGTHWFVTQRNFYEPQIITTDNTFVSGNCDVVIGIVNNTVYDPLQPELDSFKEELDKYFKNHTSPDVDLGDISGINASVVNIQKEIDRLNEVAKNLNESLIDLQELGKYEQYIK

SEQ ID NO: 1976 - protein, 1211 aa, Artificial Sequence
  SARS-CoV-2/Germany/BavPat3/2020__EPI_ISL_414521 spike protein (1-1211)(I712C_T1077C)
MFVFLVLLPLVSSQCVNLTTRTQLPPAYTNSFTRGVYYPDKVFRSSVLHSTQDLFLPFFSNVTWFHAIHVSGTNGTKRFDNPVLPFNDGVYFASTEKSNIIRGWIFGTTLDSKTQSLLIVNNATNVVIKVCEFQFCNDPFLGVYYHKNNKSWMESEFRVYSSANNCTFEYVSQPFLMDLEGKQGNFKNLREFVFKNIDGYFKIYSKHTPINLVRDLPQGFSALEPLVDLPIGINITRFQTLLALHRSYLTPGDSSSGWTAGAAAYYVGYLQPRTFLLKYNENGTITDAVDCALDPLSETKCTLKSFTVEKGIYQTSNFRVQPTESIVRFPNITNLCPFGEVFNATRFASVYAWNRKRISNCVADYSVLYNSASFSTFKCYGVSPTKLNDLCFTNVYADSFVIRGDEVRQIAPGQTGKIADYNYKLPDDFTGCVIAWNSNNLDSKVGGNYNYLYRLFRKSNLKPFERDISTEIYQAGSTPCNGVEGFNCYFPLQSYGFQPTNGVGYQPYRVVVLSFELLHAPATVCGPKKSTNLVKNKCVNFNFNGLTGTGVLTESNKKFLPFQQFGRDIADTTDAVRDPQTLEILDITPCSFGGVSVITPGTNTSNQVAVLYQDVNCTEVPVAIHADQLTPTWRVYSTGSNVFQTRAGCLIGAEHVNNSYECDIPIGAGICASYQTQTNSPRRARSVASQSIIAYTMSLGAENSVAYSNNSCAIPTNFTISVTTEILPVSMTKTSVDCTMYICGDSTECSNLLLQYGSFCTQLNRALTGIAVEQDKNTQQVFAQVKQIYKTPPIKDFGGFNFSQILPDPSKPSKRSFIEDLLFNKVTLADAGFIKQYGDCLGDIAARDLICAQKFNGLTVLPPLLTDEMIAQYTSALLAGTITSGWTFGAGAALQIPFAMQMAYRFNGIGVTQNVLYENQKLIANQFNSAIGKIQDSLSSTASALGKLQDVVNQNAQALNTLVKQLSSNFGAISSVLNDILSRLDKVEAEVQIDRLITGRLQSLQTYVTQQLIRAAEIRASANLAATKMSECVLGQSKRVDFCGKGYHLMSFPQSAPHGVVFLHVTYVPAQEKNFTCAPAICHDGKAHFPREGVFVSNGTHWFVTQRNFYEPQIITTDNTFVSGNCDVVIGIVNNTVYDPLQPELDSFKEELDKYFKNHTSPDVDLGDISGINASVVNIQKEIDRLNEVAKNLNESLIDLQELGKYEQYIK

SEQ ID NO: 1977 - protein, 1211 aa, Artificial Sequence
  SARS-CoV-2/France/HF1805/2020__EPI_ISL_414628 spike protein (1-1211)(I712C_T1077C)
MFVFLVLLPLVSSQCVNLTTRTQLPPAYTNSFTRGVYYPDKVFRSSVLHSTQDLFLPFFSNVTWFHAIHVSGTNGTKRFDNPVLPFNDGVYFASTEKSNIIRGWIFGTTLDSKTQSLLIVNNATNVVIKVCEFQFCNDPFLGVYYHKNNKSWMESEFRVYSSANNCTFEYVSQPFLMDLEGKQGNFKNLREFVFKNIDGYFKIYSKHTPINLVRDLPQGFSALEPLVDLPIGINITRFQTLLALHRSYLTPGDSSSGWTAGAAAYYVGYLQPRTFLLKYNENGTITDAVDCALDPLSETKCTLKSFTVEKGIYQTSNFRVQPTESIVRFPNITNLCPFGEVFNATRFASVYAWNRKRISNCVADYSVLYNSASFSTFKCYGVSPTKLNDLCFTNVYADSFVIRGDEVRQIAPGQTGKIADYNYKLPDDFTGCVIAWNSNNLDSKVGGNYNYLYRLFRKSNLKPFERDISTEIYQAGSTPCNGVEGFNCYFPLQSYGFQPTNGVGYQPYRVVVLSFELLHAPATVCGPKKSTNLVKNKCVNFNFNGLTGTGVLTESNKKFLPFQQFGRDIADTTDAVRDPQTLEILDITPCSFGGVSVITPGTNTSNQVAVLYQGVNCTEVPVAIHADQLTPTWRVYSTGSNVFQTRAGCLIGAEHVNNSYECDIPIGAGICASYQTQTNSPRRARSVASQSIIAYTMSLGAENSVAYSNNSCAIPTNFTISVTTEILPVSMTKTSVDCTMYICGDSTECSNLLLQYGSFCTQLNRALTGIAVEQDKNTQEVFAQVKQIYKTPPIKDFGGFNFSQILPDPSKPSKRSFIEDLLFNKVTLADAGFIKQYGDCLGDIAARDLICAQKFNGLTVLPPLLTDEMIAQYTSALLAGTITSGWTFGAGAALQIPFAMQMAYRFNGIGVTQNVLYENQKLIANQFNSAIGKIQDSLSSTASALGKLQDVVNQNAQALNTLVKQLSSNFGAISSVLNDILSRLDKVEAEVQIDRLITGRLQSLQTYVTQQLIRAAEIRASANLAATKMSECVLGQSKRVDFCGKGYHLMSFPQSAPHGVVFLHVTYVPAQEKNFTCAPAICHDGKAHFPREGVFVSNGTHWFVTQRNFYEPQIITTDNTFVSGNCDVVIGVVNNTVYDPLQPELDSFKEELDKYFKNHTSPDVDLGDISGINASVVNIQKEIDRLNEVAKNLNESLIDLQELGKYEQYIK

SEQ ID NO: 1978 - protein, 1211 aa, Artificial Sequence
  SARS-CoV-2/Netherlands/ZuidHolland_9/2020__EPI_ISL_414445 spike protein (1-1211)(I712C_T1077C)
MFVFLVLLPLVSSQCVNLTTRTQLPPAYTNSFTRGVYYPDKVFRSSVLHSTQDLFLPFFSNVTWFHAIHVSGTNGTKRFDNPVLPFNDGVYFASTEKSNIIRGWIFGTTLDSKTQSLLIVNNATNVVIKVCEFQFCNDPFLGVYYHKNNKSWMESEFRVYSSANNCTFEYVSQPFLMDLEGKQGNFKNLREFVFKNIDGYFKIYSKHTPINLVRDLPQGFSALEPLVDLPIGINITRFQTLLALHRSYLTPGDSSSGWTAGAAAYYVGYLQPRTFLLKYNENGTITDAVDCALDPLSETKCTLKSFTVEKGIYQTSNFRVQPTESIVRFPNITNLCPFGEVFNATRFASVYAWNRKRISNCVADYSVLYNSASFSTFKCYGVSPTKLNDLCFTNVYADSFVIRGDEVRQIAPGQTGKIADYNYKLPDDFTGCVIAWNSNNLDSKVGGNYNYLYRLFRKSNLKPFERDISTEIYQAGSTPCNGVEGFNCYFPLQSYGFQPTNGVGYQPYRVVVLSFELLHAPATVCGPKKSTNLVKNKCVNFNFNGLTGTGVLTESNKKFLPFQQFGRDIADTTDAVRDPQTLEILDITPCSFGGVSVITPGTNTSNQVAVLYQGVNCTEVPVAIHADQLTPTWRVYSTGSNVFQTRAGCLIGAEHVNNSYECDIPIGAGICASYQTQTNSPRRARSVASQSIIAYTMSLGAENSVAYSNNSCAIPTNFTISVTTEILPVSMTKTSVDCTMYICGDSTECSNLLLQYGSFCTQLNRALTGIAVEQDKNTQEVFAQVKQIYKTPPIKDFGGFNFSQILPDPSKPSKRSFIEDLLFNKVTLADAGFIKQYGDCLGDIAARDLICVQKFNGLTVLPPLLTDEMIAQYTSALLAGTITSGWTFGAGAALQIPFAMQMAYRFNGIGVTQNVLYENQKLIANQFNSAIGKIQDSLSSTASALGKLQDVVNQNAQALNTLVKQLSSNFGAISSVLNDILSRLDKVEAEVQIDRLITGRLQSLQTYVTQQLIRAAEIRASANLAATKMSECVLGQSKRVDFCGKGYHLMSFPQSAPHGVVFLHVTYVPAQEKNFTCAPAICHDGKAHFPREGVFVSNGTHWFVTQRNFYEPQIITTDNTFVSGNCDVVIGIVNNTVYDPLQPELDSFKEELDKYFKNHTSPDVDLGDISGINASVVNIQKEIDRLNEVAKNLNESLIDLQELGKYEQYIK

SEQ ID NO: 1979 - protein, 1211 aa, Artificial Sequence
  SARS-CoV-2/Finland/FIN03032020A/2020__EPI_ISL_413602 spike protein (1-1211)(I712C_T1077C)
MFVFLVLLPLVSSQCVNLTTRTQLPPAYTNSFTRGVYYPDKVFRSSVLHSTQDLFLPFFSNVTWFHAIHVSGTNGTKRFDNPVLPFNDGVYFASTEKSNIIRGWIFGTTLDSKTQSLLIVNNATNVVIKVCEFQFCNDPFLGVYYHKNNKSWMESEFRVYSSANNCTFEYVSQPFLMDLEGKQGNFKNLREFVFKNIDGYFKIYSKHTPINLVRDLPQGFSALEPLVDLPIGINITRFQTLLALHRSYLTPGDSSSGWTAGAAAYYVGYLQPRTFLLKYNENGTITDAVDCALDPLSETKCTLKSFTVEKGIYQTSNFRVQPTESIVRFPNITNLCPFGEVFNATRFASVYAWNRKRISNCVADYSVLYNSASFSTFKCYGVSPTKLNDLCFTNVYADSFVIRGDEVRQIAPGQTGKIADYNYKLPDDFTGCVISWNSNNLDSKVGGNYNYLYRLFRKSNLKPFERDISTEIYQAGSTPCNGVEGFNCYFPLQSYGFQPTNGVGYQPYRVVVLSFELLHAPATVCGPKKSTNLVKNKCVNFNFNGLTGTGVLTESNKKFLPFQQFGRDIADTTDAVRDPQTLEILDITPCSFGGVSVITPGTNTSNQVAVLYQGVNCTEVPVAIHADQLTPTWRVYSTGSNVFQTRAGCLIGAEHVNNSYECDIPIGAGICASYQTQTNSPRRARSVASQSIIAYTMSLGAENSVAYSNNSCAIPTNFTISVTTEILPVSMTKTSVDCTMYICGDSTECSNLLLQYGSFCTQLNRALTGIAVEQDKNTQEVFAQVKQIYKTPPIKDFGGFNFSQILPDPSKPSKRSFIEDLLFNKVTLADAGFIKQYGDCLGDIAARDLICAQKFNGLTVLPPLLTDEMIAQYTSALLAGTITSGWTFGAGAALQIPFAMQMAYRFNGIGVTQNVLYENQKLIANQFNSAIGKIQDSLSSTASALGKLQDVVNQNAQALNTLVKQLSSNFGAISSVLNDILSRLDKVEAEVQIDRLITGRLQSLQTYVTQQLIRAAEIRASANLAATKMSECVLGQSKRVDFCGKGYHLMSFPQSAPHGVVFLHVTYVPAQEKNFTCAPAICHDGKAHFPREGVFVSNGTHWFVTQRNFYEPQIITTDNTFVSGNCDVVIGIVNNTVYDPLQPELDSFKEELDKYFKNHTSPDVDLGDISGINASVVNIQKEIDRLNEVAKNLNESLIDLQELGKYEQYIK

SEQ ID NO: 1980 - protein, 1211 aa, Artificial Sequence
  SARS-CoV-2/France/GE1977/2020__EPI_ISL_414632 spike protein (1-1211)(I712C_T1077C)
MFVFLVLLPLVSSQCVNLTTRTQLPPAYTNSFTRGVYYPDKVFRSSVLHSTQDLFLPFFSNVTWFHAIHVSGTNGTKRFDNPVLPFNDGVYFASTEKSNIIRGWIFGTTLDSKTQSLLIVNNATNVVIKVCEFQFCNDPFLGVYYHKNNKSWMESEFRVYSSANNCTFEYVSQPFLMDLEGKQGNFKNLREFVFKNIDGYFKIYSKHTPINLVRDLPQGFSALEPLVDLPIGINITRFQTLLALHRSYLTPGDSSSGWTAGAAAYYVGYLQPRTFLLKYNENGTITDAVDCALDPLSETKCTLKSFTVEKGIYQTSNFRVQPTESIVRFPNITNLCPFGEVFNATRFASVYAWNRKRISNCVADYSVLYNSASFSTFKCYGVSPTKLNDLCFTNVYADSFVIRGDEVRQIAPGQTGKIADYNYKLPDDFTGCVIAWNSNNLDSKVGGNYNYLYRLFRKSNLKPFERDISTEIYQAGSTPCNGVEGFNCYFPLQSYGFQPTNGVGYQPYRVVVLSFELLHAPATVCGPKKSTNLVKNKCVNFNFNGLTGTGVLTESNKKFLPFQQFGRDIADTTDAVRDPQTLEILDITPCSFGGVSVITPGTNTSNQVAVLYQGVNCTEVPVAIHADQLTPTWRVYSTGSNVFQTRAGCLIGAEHVNNSYECDIPIGAGICASYQTQTNSPRRARSVASQSIIAYTMSLGAENSVAYSNNSCAIPTNFTISVTTEILPVSMTKTSVDCTMYICGDSTECSNLLLQYGSFCTQLNRALTGIAVEQDKNTQEVFAQVKQIYKTPPIKDFGGFNFSQILPDPSKPSKRSFIEDLLFNKVTLADAGFIKQYGDCLGDIAARDLICAQKFNGLTVLPPLLTDEMIAQYTSALLAGTITSGWTFGAGAALQIPFAMQMAYRFNGIGVTQNVLYENQKLIANQFNSAIGKIQDSLFSTASALGKLQDVVNQNAQALNTLVKQLSSNFGAISSVLNDILSRLDKVEAEVQIDRLITGRLQSLQTYVTQQLIRAAEIRASANLAATKMSECVLGQSKRVDFCGKGYHLMSFPQSAPHGVVFLHVTYVPAQEKNFTCAPAICHDGKAHFPREGVFVSNGTHWFVTQRNFYEPQIITTDNTFVSGNCDVVIGIVNNTVYDPLQPELDSFKEELDKYFKNHTSPDVDLGDISGINASVVNIQKEIDRLNEVAKNLNESLIDLQELGKYEQYIK

SEQ ID NO: 1981 - protein, 1211 aa, Artificial Sequence
  SARS-CoV-2/Finland/FIN-313/2020__EPI_ISL_414641 spike protein (1-1211)(I712C_T1077C)
MFVFLVLLPLVSSQCVNLTTRTQLPPAYTNSFTRGVYYPDKVFRSSVLHSTQDLFLPFFSNVTWFHAIHVSGTNGTKRFDNPVLPFNDGVYFASTEKSNIIRGWIFGTTLDSKTQSLLIVNNATNVVIKVCEFQFCNDPFLGVYYHKNNKSWMESEFRVYSSANNCTFEYVSQPFLMDLEGKQGNFKNLREFVFKNIDGYFKIYSKHTPINLVRDLPQGFSALEPLVDLPIGINITRFKTLLALHRSYLTPGDSSSGWTAGAAAYYVGYLQPRTFLLKYNENGTITDAVDCALDPLSETKCTLKSFTVEKGIYQTSNFRVQPTESIVRFPNITNLCPFGEVFNATRFASVYAWNRKRISNCVADYSVLYNSASFSTFKCYGVSPTKLNDLCFTNVYADSFVIRGDEVRQIAPGQTGKIADYNYKLPDDFTGCVIAWNSNNLDSKVGGNYNYLYRLFRKSNLKPFERDISTEIYQAGSTPCNGVEGFNCYFPLQSYGFQPTNGVGYQPYRVVVLSFELLHAPATVCGPKKSTNLVKNKCVNFNFNGLTGTGVLTESNKKFLPFQQFGRDIADTTDAVRDPQTLEILDITPCSFGGVSVITPGTNTSNQVAVLYQGVNCTEVPVAIHADQLTPTWRVYSTGSNVFQTRAGCLIGAEHVNNSYECDIPIGAGICASYQTQTNSPRRARSVASQSIIAYTMSLGAENSVAYSNNSCAIPTNFTISVTTEILPVSMTKTSVDCTMYICGDSTECSNLLLQYGSFCTQLNRALTGIAVEQDKNTQEVFAQVKQIYKTPPIKDFGGFNFSQILPDPSKPSKRSFIEDLLFNKVTLADAGFIKQYGDCLGDIAARDLICAQKFNGLTVLPPLLTDEMIAQYTSALLAGTITSGWTFGAGAALQIPFAMQMAYRFNGIGVTQNVLYENQKLIANQFNSAIGKIQDSLSSTASALGKLQDVVNQNAQALNTLVKQLSSNFGAISSVLNDILSRLDKVEAEVQIDRLITGRLQSLQTYVTQQLIRAAEIRASANLAATKMSECVLGQSKRVDFCGKGYHLMSFPQSAPHGVVFLHVTYVPAQEKNFTCAPAICHDGKAHFPREGVFVSNGTHWFVTQRNFYEPQIITTDNTFVSGNCDVVIGIVNNTVYDPLQPELDSFKEELDKYFKNHTSPDVDLGDISGINASVVNIQKEIDRLNEVAKNLNESLIDLQELGKYEQYIK

SEQ ID NO: 1982 - protein, 1211 aa, Artificial Sequence
  SARS-CoV-2/Netherlands/ZuidHolland_2/2020__EPI_ISL_414556 spike protein (1-1211)(I712C_T1077C)
MFVFLVLLPLVSSQCVNLTTRTQLPPAYTNSFTRGVYYPDKVFRSSVLHSTQDLFLPFFSNVTWFHAIHVSGTNGTKRFDNPVLPFNDGVYFASTEKSNIIRGWIFGTTLDSKTQSLLIVNNATNVVIKVCEFQFCNDPFLGVYYHKNNKSWMESEFRVYSSANNCTFEYVSQPFLMDLEGKQGNFKNLREFVFKNIDGYFKIYSKHTPINLVRDLPQGFSALEPLVDLPIGINITRFQTLLALHRSYLTPGDSSSGWTAGAAAYYVGYLQPRTFLLKYNENGTITDAVDCALDPLSETKCTLKSFTVEKGIYQTSNFRVQPTESIVRFPNITNLCPFGEVFNATRFASVYAWNRKRISNCVADYSVLYNSASFSTFKCYGVSPTKLNDLCFTNVYADSFVIRGDEVRQIAPGQTGKIADYNYKLPDDFTGCVIAWNSNNLDSKVGGNYNYLYRLFRKSNLKPFERDISTEIYQAGSTPCNGVEGFNCYFPLQSYGFQPTNGVGYQPYRVVVLSFELLHAPATVCGPKKSTNLVKNKCVNFNFNGLTGTGVLTESNKKFLPFQQFGRDIADTTDAVRDPQTLEILDITPCSFGGVSVITPGTNTSNQVAVLYQGVNCTEVPVAIHADQLTPTWRVYSTGSNVFQTRAGCLIGAEHVNNSYECDIPIGAGICASYQTQTNSPRRARSVASQSIIAYTMSLGAENSVAYSNNSCAIPTNFTISVTTEILPVSMTKTSVDCTMYICGDSTECSNLLLQYGSFCTQLNRALTGIALEQDKNTQEVFAQVKQIYKTPPIKDFGGFNFSQILPDPSKPSKRSFIEDLLFNKVTLADAGFIKQYGDCLGDIAARDLICAQKFNGLTVLPPLLTDEMIAQYTSALLAGTITSGWTFGAGAALQIPFAMQMAYRFNGIGVTQNVLYENQKLIANQFNSAIGKIQDSLSSTASALGKLQDVVNQNAQALNTLVKQLSSNFGAISSVLNDILSRLDKVEAEVQIDRLITGRLQSLQTYVTQQLIRAAEIRASANLAATKMSECVLGQSKRVDFCGKGYHLMSFPQSAPHGVVFLHVTYVPAQEKNFTCAPAICHDGKAHFPREGVFVSNGTHWFVTQRNFYEPQIITTDNTFVSGNCDVVIGIVNNTVYDPLQPELDSFKEELDKYFKNHTSPDVDLGDISGINASVVNIQKEIDRLNEVAKNLNESLIDLQELGKYEQYIK

SEQ ID NO: 1983 - protein, 1211 aa, Artificial Sequence
  SARS-CoV-2/USA/WA-UW31/2020__EPI_ISL_414618 spike protein (1-1211)(I712C_T1077C)
MFVFLVLLPLVSSQCVNLTTRTQLPPAYTNSFTRGVYYPDKVFRSSVLHSTQDLFLPFFSNVTWFHAIHVSGTNGTKRFDNPVLPFNDGVYFASTEKSNIIRGWIFGTTLDSKTQSLLIVNNATNVVIKVCEFQFCNDPFLGVYYHKNNKSWMESEFRVYSSANNCTFEYVSQPFLMDLEGKQGNFKNLREFVFKNIDGYFKIYSKHTPINLVRDLPQGFSALEPLVDLPIGINITRFQTLLALHRSYLTPGDSSSGWTAGAAAYYVGYLQPRTFLLKYNENGTITDAVDCALDPLSETKCTLKSFTVEKGIYQTSNFRVQPTESIVRFPNITNLCPFGEVFNATRFASVYAWNRKRISNCVADYSVLYNSASFSTFKCYGVSPTKLNDLCFTNVYADSFVIRGDEVRQIAPGQTGKIADYNYKLPDDFTGCVIAWNSNNLDSKVGGNYNYLYRLFRKSNLKPFERDISTEIYQAGSTPCNGAEGFNCYFPLQSYGFQPTNGVGYQPYRVVVLSFELLHAPATVCGPKKSTNLVKNKCVNFNFNGLTGTGVLTESNKKFLPFQQFGRDIADTTDAVRDPQTLEILDITPCSFGGVSVITPGTNTSNQVAVLYQDVNCTEVPVAIHADQLTPTWRVYSTGSNVFQTRAGCLIGAEHVNNSYECDIPIGAGICASYQTQTNSPRRARSVASQSIIAYTMSLGAENSVAYSNNSCAIPTNFTISVTTEILPVSMTKTSVDCTMYICGDSTECSNLLLQYGSFCTQLNRALTGIAVEQDKNTQEVFAQVKQIYKTPPIKDFGGFNFSQILPDPSKPSKRSFIEDLLFNKVTLADAGFIKQYGDCLGDIAARDLICAQKFNGLTVLPPLLTDEMIAQYTSALLAGTITSGWTFGAGAALQIPFAMQMAYRFNGIGVTQNVLYENQKLIANQFNSAIGKIQDSLSSTASALGKLQDVVNQNAQALNTLVKQLSSNFGAISSVLNDILSRLDKVEAEVQIDRLITGRLQSLQTYVTQQLIRAAEIRASANLAATKMSECVLGQSKRVDFCGKGYHLMSFPQSAPHGVVFLHVTYVPAQEKNFTCAPAICHDGKAHFPREGVFVSNGTHWFVTQRNFYEPQIITTDNTFVSGNCDVVIGIVNNTVYDPLQPELDSFKEELDKYFKNHTSPDVDLGDISGINASVVNIQKEIDRLNEVAKNLNESLIDLQELGKYEQYIK

SEQ ID NO: 1984 - protein, 1211 aa, Artificial Sequence
  SARS-CoV-2/South Korea/SNU01/2020__EPI_ISL_411929 spike protein (1-1211)(I712C_T1077C)
MFVFLVLLPLVSSQCVNLTTRTQLPPAYTNSFTRGVYYPDKVFRSSVLHSTQDLFLPFFSNVTWFHAIHVSGTNGTKRFDNPVLPFNDGVYFASTEKSNIIRGWIFGTTLDSKTQSLLIVNNATNVVIKVCEFQFCNDPFLGVYYHKNNKSWMESEFRVYSSANNCTFEYVSQPFLMDLEGKQGNFKNLREFVFKNIDGYFKIYSKHTPINLVRDLPQGFWALEPLVDLPIGINITRFQTLLALHRSYLTPGDSSSGWTAGAAAYYVGYLQPRTFLLKYNENGTITDAVDCALDPLSETKCTLKSFTVEKGIYQTSNFRVQPTESIVRFPNITNLCPFGEVFNATRFASVYAWNRKRISNCVADYSVLYNSASFSTFKCYGVSPTKLNDLCFTNVYADSFVIRGDEVRQIAPGQTGKIADYNYKLPDDFTGCVIAWNSNNLDSKVGGNYNYLYRLFRKSNLKPFERDISTEIYQAGSTPCNGVEGFNCYFPLQSYGFQPTNGVGYQPYRVVVLSFELLHAPATVCGPKKSTNLVKNKCVNFNFNGLTGTGVLTESNKKFLPFQQFGRDIADTTDAVRDPQTLEILDITPCSFGGVSVITPGTNTSNQVAVLYQDVNCTEVPVAIHADQLTPTWRVYSTGSNVFQTRAGCLIGAEHVNNSYECDIPIGAGICASYQTQTNSPRRARSVASQSIIAYTMSLGAENSVAYSNNSCAIPTNFTISVTTEILPVSMTKTSVDCTMYICGDSTECSNLLLQYGSFCTQLNRALTGIAVEQDKNTQEVFAQVKQIYKTPPIKDFGGFNFSQILPDPSKPSKRSFIEDLLFNKVTLADAGFIKQYGDCLGDIAARDLICAQKFNGLTVLPPLLTDEMIAQYTSALLAGTITSGWTFGAGAALQIPFAMQMAYRFNGIGVTQNVLYENQKLIANQFNSAIGKIQDSLSSTASALGKLQDVVNQNAQALNTLVKQLSSNFGAISSVLNDILSRLDKVEAEVQIDRLITGRLQSLQTYVTQQLIRAAEIRASANLAATKMSECVLGQSKRVDFCGKGYHLMSFPQSAPHGVVFLHVTYVPAQEKNFTCAPAICHDGKAHFPREGVFVSNGTHWFVTQRNFYEPQIITTDNTFVSGNCDVVIGIVNNTVYDPLQPELDSFKEELDKYFKNHTSPDVDLGDISGINASVVNIQKEIDRLNEVAKNLNESLIDLQELGKYEQYIK

SEQ ID NO: 1985 - protein, 1211 aa, Artificial Sequence
  SARS-CoV-2/China/WF0004/2020__EPI_ISL_413694 spike protein (1-1211)(I712C_T1077C)
MFVFLVLLPLVSSQCVNLTTRTQLPPAYTNSFTRGVYYPDKVFRSSVLHSTQDLFLPFFSNVTWFHAIHVSGTNGTKRFDNPVLPFNDGVYFASTEKSNIIRGWIFGTTLDSKTQSLLIVNNATNVVIKVCEFQFCNDPFLGVYYHKNNKSWTESEFRVYSSANNCTFEYVSQPFLMDLEGKQGNFKNLREFVFKNIDGYFKIYSKHTPINLVRDLPQGFSALEPLVDLPIGINITRFQTLLALHRSYLTPGDSSSGWTAGAAAYYVGYLQPRTFLLKYNENGTITDAVDCALDPLSETKCTLKSFTVEKGIYQTSNFRVQPTESIVRFPNITNLCPFGEVFNATRFASVYAWNRKRISNCVADYSVLYNSASFSTFKCYGVSPTKLNDLCFTNVYADSFVIRGDEVRQIAPGQTGKIADYNYKLPDDFTGCVIAWNSNNLDSKVGGNYNYLYRLFRKSNLKPFERDISTEIYQAGSTPCNGVEGFNCYFPLQSYGFQPTNGVGYQPYRVVVLSFELLHAPATVCGPKKSTNLVKNKCVNFNFNGLTGTGVLTESNKKFLPFQQFGRDIADTTDAVRDPQTLEILDITPCSFGGVSVITPGTNTSNQVAVLYQDVNCTEVPVAIHADQLTPTWRVYSTGSNVFQTRAGCLIGAEHVNNSYECDIPIGAGICASYQTQTNSPRRARSVASQSIIAYTMSLGAENSVAYSNNSCAIPTNFTISVTTEILPVSMTKTSVDCTMYICGDSTECSNLLLQYGSFCTQLNRALTGIAVEQDKNTQEVFAQVKQIYKTPPIKDFGGFNFSQILPDPSKPSKRSFIEDLLFNKVTLADAGFIKQYGDCLGDIAARDLICAQKFNGLTVLPPLLTDEMIAQYTSALLAGTITSGWTFGAGAALQIPFAMQMAYRFNGIGVTQNVLYENQKLIANQFNSAIGKIQDSLSSTASALGKLQDVVNQNAQALNTLVKQLSSNFGAISSVLNDILSRLDKVEAEVQIDRLITGRLQSLQTYVTQQLIRAAEIRASANLAATKMSECVLGQSKRFDFCGKGYHLMSFPQSAPHGVVFLHVTYVPAQEKNFTCAPAICHDGKAHFPREGVFVSNGTHWFVTQRNFYEPQIITTDNTFVSGNCDVVIGIVNNTVYDPLQPELDSFKEELDKYFKNHTSPDVDLGDISGINASVVNIQKEIDRLNEVAKNLNESLIDLQELGKYEQYIK

SEQ ID NO: 1986 - protein, 1211 aa, Artificial Sequence
  SARS-CoV-2/China/WF0028/2020__EPI_ISL_413791 spike protein (1-1211)(I712C_T1077C)
MFVFLVLLPLVSSQCVNLTTRTQLPPAYTNSFTRGVYYPDKVFRSSVLHSTQDLFLPFFSNVTWFHAIHVSGTNGTKRFDNPVLPFNDGVYFASTEKSNIIRGWIFGTTLDSKTQSLLIVNNATNVVIKVCEFQFCNDPFLGVYYHKNNKSWMESEFRVYSSANNCTFEYVSQPFLMDLEGKQGNFKNLREFVFKNIDGYFKIYSKHTPINLVRDLPQGFSALEPLVDLPIGINITRFQTLLALHRSYLTPGDSSSGWTAGAAAYYVGYLQPRTFLLKYNENGTITDAVDCALDPLSETKCTLKSFTVEKGIYQTSNFRVQPTESIVRFPNITNLCPFGEVFNATRFASVYAWNRKRISNCVADYSVLYNSASFSTFKCYGVSPTKLNDLCFTNVYADSFVIRGDEVRQIAPGQTGKIADYNYKLPDDFTGCVIAWNSNNLDSKVGGNYNYLYRLFRKSNLKPFERDISTEIYQAGSTPCNGVEGFNCYFPLQSYGFQPTNGVGYQPYRVVVLSFELLHAPATVCGPKKSTNLVKNKCVNFNFNGLTGTGVLTESNKKFLPFQQFGRDIADTTDAVRDPQTLEILDITPCSFGGVSVITPGTNTSNQVAVLYQDVNCTEVPVAIHADQLTPTWRVYSTGSNVFQTRAGCLIGAEHVNNSYECDIPIGAGICASYQTQTNSPRRARSVASQSIIAYTMSLGAENSVAYSNNSCAIPTNFTISVTTEILPVSMTKTSVDCTMYICGDSTECSNLLLQYGSFCTQLNRALTGIAVEQDKNTQEVFAQVKQIYKTPPIKDFGGFNFSQILPDPSKPSKRSFIEDLLFNKVTLADAGFIKQYGDCLGDIAARDLICAQKFNGLTVLPPLLTDEMIAQYTSALLAGTITSGWTFGAGAALQIPFAMQMAYRFNGIGVTQNVLYENQKLIANQFNSAIGKIQDSLSSTASALGKLQDVVNQNAQALNTLVKQLSSNFGAISSVLNDILSRLDKVEAEVQIDRLITGRLQSLQTYVTQQLIRAAEIRASANLAATKMSECVLGQSKRVDFCGKGYHLMSFPQSAPHGVVFLHVTYVPAQEKNFTCAPAICHDGKAHFPREGVFVSNGTHWFVTQRNFYEPQIITTDNTFVSGNCDVVIGIVNNTVYDPLQPELESFKEELDKYFKNHTSPDVDLGDISGINASVVNIQKEIDRLNEVAKNLNESLIDLQELGKYEQYIK

SEQ ID NO: 1987 - protein, 1211 aa, Artificial Sequence
  SARS-CoV-2/2019-nCoV/USA-CruiseA-18/2020__MT159716.1 spike protein (1-1211)(I712C_T1077C)
MFVFLVLLPLVSSQCVNLTTRTQLPPAYTNSFTRGVYYPDKVFRSSVLHSTQDLFLPFFSNVTWFHAIHVSGTNGTKRFDNPVLPFNDGVYFASTEKSNIIRGWIFGTTLDSKTQSLLIVNNATNVVIKVCEFQFCNDPFLGVYYHKNNKSWMESELRVYSSANNCTFEYVSQPFLMDLEGKQGNFKNLREFVFKNIDGYFKIYSKHTPINLVRDLPQGFSALEPLVDLPIGINITRFQTLLALHRSYLTPGDSSSGWTAGAAAYYVGYLQPRTFLLKYNENGTITDAVDCALDPLSETKCTLKSFTVEKGIYQTSNFRVQPTESIVRFPNITNLCPFGEVFNATRFASVYAWNRKRISNCVADYSVLYNSASFSTFKCYGVSPTKLNDLCFTNVYADSFVIRGDEVRQIAPGQTGKIADYNYKLPDDFTGCVIAWNSNNLDSKVGGNYNYLYRLFRKSNLKPFERDISTEIYQAGSTPCNGVEGFNCYFPLQSYGFQPTNGVGYQPYRVVVLSFELLHAPATVCGPKKSTNLVKNKCVNFNFNGLTGTGVLTESNKKFLPFQQFGRDIADTTDAVRDPQTLEILDITPCSFGGVSVITPGTNTSNQVAVLYQDVNCTEVPVAIHADQLTPTWRVYSTGSNVFQTRAGCLIGAEHVNNSYECDIPIGAGICASYQTQTNSPRRARSVASQSIIAYTMSLGAENSVAYSNNSCAIPTNFTISVTTEILPVSMTKTSVDCTMYICGDSTECSNLLLQYGSFCTQLNRALTGIAVEQDKNTQEVFAQVKQIYKTPPIKDFGGFNFSQILPDPSKPSKRSFIEDLLFNKVTLADAGFIKQYGDCLGDIAARDLICAQKFNGLTVLPPLLTDEMIAQYTSALLAGTITSGWTFGAGAALQIPFAMQMAYRFNGIGVTQNVLYENQKLIANQFNSAIGKIQDSLSSTASALGKLQDVVNQNAQALNTLVKQLSSNFGAISSVLNDILSRLDKVEAEVQIDRLITGRLQSLQTYVTQQLIRAAEIRASANLAATKMSECVLGQSKRVDFCGKGYHLMSFPQSAPHGVVFLHVTYVPAQEKNFTCAPAICHDGKAHFPREGVFVSNGTHWFVTQRNFYEPQIITTDNTFVSGNCDVVIGIVNNTVYDPLQPELDSFKEELDKYFKNHTSPDVDLGDISGINASVVNIQKEIDRLNEVAKNLNESLIDLQELGKYEQYIK

SEQ ID NO: 1988 - protein, 1211 aa, Artificial Sequence
  SARS-CoV-2/SARS-CoV-2/Yunnan-01/human/2020/CHN__MT049951.1 spike protein (1-1211)(I712C_T1077C)
MFVFLVLLPLVSSQCVNLTTRTQLPPANTNSFTRGVYYPDKVFRSSVLHSTQDLFLPFFSNVTWFHAIHVSGTNGTKRFDNPVLPFNDGVYFASTEKSNIIRGWIFGTTLDSKTQSLLIVNNATNVVIKVCEFQFCNDPFLGVYYHKNNKSWMESEFRVYSSANNCTFEYVSQPFLMDLEGKQGNFKNLREFVFKNIDGYFKIYSKHTPINLVRDLPQGFSALEPLVDLPIGINITRFQTLLALHRSYLTPGDSSSGWTAGAAAYYVGYLQPRTFLLKYNENGTITDAVDCALDPLSETKCTLKSFTVEKGIYQTSNFRVQPTESIVRFPNITNLCPFGEVFNATRFASVYAWNRKRISNCVADYSVLYNSASFSTFKCYGVSPTKLNDLCFTNVYADSFVIRGDEVRQIAPGQTGKIADYNYKLPDDFTGCVIAWNSNNLDSKVGGNYNYLYRLFRKSNLKPFERDISTEIYQAGSTPCNGVEGFNCYFPLQSYGFQPTNGVGYQPYRVVVLSFELLHAPATVCGPKKSTNLVKNKCVNFNFNGLTGTGVLTESNKKFLPFQQFGRDIADTTDAVRDPQTLEILDITPCSFGGVSVITPGTNTSNQVAVLYQDVNCTEVPVAIHADQLTPTWRVYSTGSNVFQTRAGCLIGAEHVNNSYECDIPIGAGICASYQTQTNSPRRARSVASQSIIAYTMSLGAENSVAYSNNSCAIPTNFTISVTTEILPVSMTKTSVDCTMYICGDSTECSNLLLQYGSFCTQLNRALTGIAVEQDKNTQEVFAQVKQIYKTPPIKDFGGFNFSQILPDPSKPSKRSFIEDLLFNKVTLADAGFIKQYGDCLGDIAARDLICAQKFNGLTVLPPLLTDEMIAQYTSALLAGTITSGWTFGAGAALQIPFAMQMAYRFNGIGVTQNVLYENQKLIANQFNSAIGKIQDSLSSTASALGKLQDVVNQNAQALNTLVKQLSSNFGAISSVLNDILSRLDKVEAEVQIDRLITGRLQSLQTYVTQQLIRAAEIRASANLAATKMSECVLGQSKRVDFCGKGYHLMSFPQSAPHGVVFLHVTYVPAQEKNFTCAPAICHDGKAHFPREGVFVSNGTHWFVTQRNFYEPQIITTDNTFVSGNCDVVIGIVNNTVYDPLQPELDSFKEELDKYFKNHTSPDVDLGDISGINASVVNIQKEIDRLNEVAKNLNESLIDLQELGKYEQYIK

SEQ ID NO: 1989 - protein, 1211 aa, Artificial Sequence
  SARS-CoV-2/USA/WA-UW292/2020__EPI_ISL_418077 spike protein (1-1211)(I712C_T1077C)
MFVFLVLLPLVSSQCVNLTTRTQLPPAYTNSFTRGVYYPDKVFRSSVLHSTQDLFLPFFSNVTWFHAIHVSGTNGTKRFDNPVLPFNDGVYFASTEKSNIIRGWIFGTTLDSKTQSLLIVNNATNVVIKVCEFQFCNDPFLGVYYHKNNKSWMESEFRVYSSANNCTFEYVSQPFLMDLEGKQGNFKNLREFVFKNIDGYFKIYSKHTPINLVRDLPQGFSALEPLVDLPIGINITRFQTLLALHRSYLTPGDSSSGWTAGAAAYYVGYLQPRTFLLKYNENGTITDAVDCALDPLSETKCTLKSFTVEKGIYQTSNFRVQPTESIVRFPNITNLCPFGEVFNATRFASVYAWNRKRISNCVADYSVLYNSASFSTFKCYGVSPTKLNDLCFTNVYADSFVIRGDEVRQIAPGQTGKIADYNYKLPDDFTGCVIAWNSNNLDSKVGGNYNYLYRLFRKSNLKPFERDISTEIYQASSTPCNGVEGFNCYFPLQSYGFQPTNGVGYQPYRVVVLSFELLHAPATVCGPKKSTNLVKNKCVNFNFNGLTGTGVLTESNKKFLPFQQFGRDIADTTDAVRDPQTLEILDITPCSFGGVSVITPGTNTSNQVAVLYQDVNCTEVPVAIHADQLTPTWRVYSTGSNVFQTRAGCLIGAEHVNNSYECDIPIGAGICASYQTQTNSPRRARSVASQSIIAYTMSLGAENSVAYSNNSCAIPTNFTISVTTEILPVSMTKTSVDCTMYICGDSTECSNLLLQYGSFCTQLNRALTGIAVEQDKNTQEVFAQVKQIYKTPPIKDFGGFNFSQILPDPSKPSKRSFIEDLLFNKVTLADAGFIKQYGDCLGDIAARDLICAQKFNGLTVLPPLLTDEMIAQYTSALLAGTITSGWTFGAGAALQIPFAMQMAYRFNGIGVTQNVLYENQKLIANQFNSAIGKIQDSLSSTASALGKLQDVVNQNAQALNTLVKQLSSNFGAISSVLNDILSRLDKVEAEVQIDRLITGRLQSLQTYVTQQLIRAAEIRASANLAATKMSECVLGQSKRVDFCGKGYHLMSFPQSAPHGVVFLHVTYVPAQEKNFTCAPAICHDGKAHFPREGVFVSNGTHWFVTQRNFYEPQIITTDNTFVSGNCDVVIGIVNNTVYDPLQPELDSFKEELDKYFKNHTSPDVDLGDISGINASVVNIQKEIDRLNEVAKNLNESLIDLQELGKYEQYIK

SEQ ID NO: 1990 - protein, 1211 aa, Artificial Sequence
  SARS-CoV-2/Iceland/192/2020__EPI_ISL_417819 spike protein (1-1211)(I712C_T1077C)
MFVFFVLLPLVSSQCVNLTTRTQLPPAYTNSFTRGVYYPDKVFRSSVLHSTQDLFLPFFSNVTWFHAIHVSGTNGTKRFDNPVLPFNDGVYFASTEKSNIIRGWIFGTTLDSKTQSLLIVNNATNVVIKVCEFQFCNDPFLGVYYHKNNKSWMESEFRVYSSANNCTFEYVSQPFLMDLEGKQGNFKNLREFVFKNIDGYFKIYSKHTPINLVRDLPQGFSALEPLVDLPIGINITRFQTLLALHRSYLTPGDSSSGWTAGAAAYYVGYLQPRTFLLKYNENGTITDAVDCALDPLSETKCTLKSFTVEKGIYQTSNFRVQPTESIVRFPNITNLCPFGEVFNATRFASVYAWNRKRISNCVADYSVLYNSASFSTFKCYGVSPTKLNDLCFTNVYADSFVIRGDEVRQIAPGQTGKIADYNYKLPDDFTGCVIAWNSNNLDSKVGGNYNYLYRLFRKSNLKPFERDISTEIYQAGSTPCNGVEGFNCYFPLQSYGFQPTNGVGYQPYRVVVLSFELLHAPATVCGPKKSTNLVKNKCVNFNFNGLTGTGVLTESNKKFLPFQQFGRDIADTTDAVRDPQTLEILDITPCSFGGVSVITPGTNTSNQVAVLYQGVNCTEVPVAIHADQLTPTWRVYSTGSNVFQTRAGCLIGAEHVNNSYECDIPIGAGICASYQTQTNSPRRARSVASQSIIAYTMSLGAENSVAYSNNSCAIPTNFTISVTTEILPVSMTKTSVDCTMYICGDSTECSNLLLQYGSFCTQLNRALTGIAVEQDKNTQEVFAQVKQIYKTPPIKDFGGFNFSQILPDPSKPSKRSFIEDLLFNKVTLADAGFIKQYGDCLGDIAARDLICAQKFNGLTVLPPLLTDEMIAQYTSALLAGTITSGWTFGAGAALQIPFAMQMAYRFNGIGVTQNVLYENQKLIANQFNSAIGKIQDSLSSTASALGKLQDVVNQNAQALNTLVKQLSSNFGAISSVLNDILSRLDKVEAEVQIDRLITGRLQSLQTYVTQQLIRAAEIRASANLAATKMSECVLGQSKRVDFCGKGYHLMSFPQSAPHGVVFLHVTYVPAQEKNFTCAPAICHDGKAHFPREGVFVSNGTHWFVTQRNFYEPQIITTDNTFVSGNCDVVIGIVNNTVYDPLQPELDSFKEELDKYFKNHTSPDVDLGDISGINASVVNIQKEIDRLNEVAKNLNESLIDLQELGKYEQYIK

SEQ ID NO: 1991 - protein, 1211 aa, Artificial Sequence
  SARS-CoV-2/Belgium/ULG-6939/2020__EPI_ISL_417020 spike protein (1-1211)(I712C_T1077C)
MFVFLVLLPLVSSQCVNLTTRTQLPPAYTNSFTRGVYYPDKVFRSSVLHSTQDLFLPFFSNVTWFHAIHVSGTNGTKRFDNPVLPFNDGVYFASTEKSNIIRGWIFGTTLDSKTQSLLIVNNATNVVIKVCEFQFCNDPFLGVYYHKNNKSWMESEFRVYSSANNCTFEYVSQPFLMDLEGKQGNFKNLREFVFKNIDGYFKIYSKHTPINLVRDLPQGFSALEPLVDLPIGINITRFQTLLALHRSYLTPGDSSSGWTAGAAAYYVGYLQPRTFLLKYNENGTITDAVDCALDPLSETKCTLKSFTVEKGIYQTSNFRVQPTESIVRFPNITNLCPFGEVFNATRFASVYAWNRKRISNCVADYSVLYNSASFSTFKCYGVSPTKLNDLCFTNVYADSFVIRGDEVRQIAPGQTGKIADYNYKLPDDFTGCVIAWNSNNLDSKVGGNYNYLYRLFRKSNLKPFERDISTEIYQAGSTPCNGVEGFNCYFPLQSYGFQPTNGVGYQPYRVVVLSFELLHAPATVCGPKKSTNLVKNKCVNFNFNGLTGTGVLTESNKKFLPFQQFGRDIADTTDAVRDPQTLEILDITPCSFGGVSVITPGTNTSNQVAVLYQGVNCTEVPVAIHADQLTPTWRVYSTGSNVFQTRAGCLIGAEHVNNSYECDIPIGAGICASYQTQTNSPRRARSVASQSIIAYTMSLGAENSVVYSNNSCAIPTNFTISVTTEILPVSMTKTSVDCTMYICGDSTECSNLLLQYGSFCTQLNRALTGIAVEQDKNTQEVFAQVKQIYKTPPIKDFGGFNFSQILPDPSKPSKRSFIEDLLFNKVTLADAGFIKQYGDCLGDIAARDLICAQKFNGLTVLPPLLTDEMIAQYTSALLAGTITSGWTFGAGAALQIPFAMQMAYRFNGIGVTQNVLYENQKLIANQFNSAIGKIQDSLSSTASALGKLQDVVNQNAQALNTLVKQLSSNFGAISSVLNDILSRLDKVEAEVQIDRLITGRLQSLQTYVTQQLIRAAEIRASANLAATKMSECVLGQSKRVDFCGKGYHLMSFPQSAPHGVVFLHVTYVPAQEKNFTCAPAICHDGKAHFPREGVFVSNGTHWFVTQRNFYEPQIITTDNTFVSGNCDVVIGIVNNTVYDPLQPELDSFKEELDKYFKNHTSPDVDLGDISGINASVVNIQKEIDRLNEVAKNLNESLIDLQELGKYEQYIK

SEQ ID NO: 1992 - protein, 1211 aa, Artificial Sequence
  SARS-CoV-2/France/HF2496/2020__EPI_ISL_418231 spike protein (1-1211)(I712C_T1077C)
MFVFLVLLPLVSSQCVNLTTRTQLPPAYTNSFTRGVYYPDKVFRSSVLHSTQDLFLPFFSNVTWFHAIHVSGTNGTKRFDNPVLPFNDGVYFASTEKSNIIRGWIFGTTLDSKTQSLLIVNNATNVVIKVCEFQFCNDPFLGVYYHKNNKSWMESEFRVYSSANNCTFEYVSQPFLMDLEGKQGNFKNLREFVFKNIDGYFKIYSKHTPINLVRDLPQGFSALEPLVDLPIGINITRFQTLLALHRSYLTPGDSSSGWTAGAAAYYVGYLQPRTFLLKYNENGTITDAVDCALDPLSETKCTLKSFTVEKGIYQTSNFRVQPTESIVRFPNITNLCPFGEVFNATRFASVYAWNRKRISNCVADYSVLYNSASFSTFKCYGVSPTKLNDLCFTNVYADSFVIRGDEVRQIAPGQTGKIADYNYKLPDDFTGCVIAWNSNNLDSKVGGNYNYLYRLFRKSNLKPFERDISTEIYQAGSTPCNGVEGFNCYFPLQSYGFQPTNGVGYQPYRVVVLSFELLHAPATVCGPKKSTNLVKNKCVNFNFNGLTGTGVLTESNKKFLPFQQFGRDIADTTDAVRDPQTLEILDITPCSFGGVSVITPGTNTSNQVAVLYQGVNCTEVPVAIHADQLTPTWRVYSTGSNVFQTRAGCLIGAEHVNNSYECDIPIGAGICASYQTQTNSPRRARSVASQSIIAYTMSLGAENSVAYSNNSCAIPTNFTISVTTEILPVSMTKTSVDCTMYICGDSTECSNLLLQYGSFCTQLNRALTGIAVEQDKNTQEVFAQVKQIYKTPPIKDFGGFNFSQILPDPSKPSKRSFIEDLLFNKVTLADAGFIKQYGDCLGDIVARDLICAQKFNGLTVLPPLLTDEMIAQYTSALLAGTITSGWTFGAGAALQIPFAMQMAYRFNGIGVTQNVLYENQKLIANQFNSAIGKIQDSLSSTASALGKLQDVVNQNAQALNTLVKQLSSNFGAISSVLNDILSRLDKVEAEVQIDRLITGRLQSLQTYVTQQLIRAAEIRASANLAATKMSECVLGQSKRVDFCGKGYHLMSFPQSAPHGVVFLHVTYVPAQEKNFTCAPAICHDGKAHFPREGVFVSNGTHWFVTQRNFYEPQIITTDNTFVSGNCDVVIGIVNNTVYDPLQPELDSFKEELDKYFKNHTSPDVDLGDISGINASVVNIQKEIDRLNEVAKNLNESLIDLQELGKYEQYIK

SEQ ID NO: 1993 - protein, 1211 aa, Artificial Sequence
  SARS-CoV-2/USA/WA-UW291/2020__EPI_ISL_418076 spike protein (1-1211)(I712C_T1077C)
MFVFLVLLPLVSSQCVNLTTRTQLPPAYTNSFTRGVYYPDKVFRSSVLHSTQDLFLPFFSNVTWFHAIHVSGTNGTKRFDNPVLPFNDGVYFASTEKSNIIRGWIFGTTLDSKTQSLLIVNNATNVVIKVCEFQFCNDPFLGVYYHKNNKSWMESEFRVYSSANNCTFEYVSQPFLMDLEGKQGNFKNLREFVFKNIDGYFKIYSKHTPINLVRDLPQGFSALEPLVDLPIGINITRFQTLLALHRSYLTPGDSSSGWTAGAAAYYVGYLQPRTFLLKYNENGTITDAVDCALDPLSETKCTLKSFTVEKGIYQTSNFRVQPTESIVRFPNITNLCPFGEVFNATRFASVYAWNRKRISNCVADYSVLYNSASFSTFKCYGVSPTKLNDLCFTNVYADSFVIRGDEVRQIAPGQTGKIADYNYKLPDDFTGCVIAWNSNNLDSKVGGNYNYLYRLFRKSNLKPFERDISTEIYQAGSTPCNGVEGFNCYFPLQSYGFQPTNGVGYQPYRVVVLSFELLHAPATVCGPKKSTNLVKNKCVNFNFNGLTGTGVLTESNKKFLPFQQFGRDIADTTDAVRDPQTLEILDITPCSFGGVSVITPGTNTSNQVAVLYQGVNCTEVPVAIHADQLTPTWRVYSTGSNVFQTRAGCLIGAEHVNNSYECDIPIGAGICASYQTQTNSPRRARSVASQSIIAYTMSLGAENSVAYSNNSCAIPTNFTISVTTEILPVSMTKTSVDCTMYICGDSTECSNLLLQYGSFCTQLNRALTGIAVEQDKNTQEVFAQVKQIYKTPPIKDFGGFNFSQILPDPSKPSKRSFIEDLLFNKVTLADAGFIKQYGDCLGDIAARDLICAQKFNGLTVLPPLLTDEMIAQYTSALLAGTITSGWTFGAGAALQIPFAMQMAYRFNGIGVTQNVLYENQKLIANQFNSAIGKIQYSLSSTASALGKLQDVVNQNAQALNTLVKQLSSNFGAISSVLNDILSRLDKVEAEVQIDRLITGRLQSLQTYVTQQLIRAAEIRASANLAATKMSECVLGQSKRVDFCGKGYHLMSFPQSAPHGVVFLHVTYVPAQEKNFTCAPAICHDGKAHFPREGVFVSNGTHWFVTQRNFYEPQIITTDNTFVSGNCDVVIGIVNNTVYDPLQPELDSFKEELDKYFKNHTSPDVDLGDISGINASVVNIQKEIDRLNEVAKNLNESLIDLQELGKYEQYIK

SEQ ID NO: 1994 - protein, 1211 aa, Artificial Sequence; identical to SEQ ID NO: 1957
  SARS-CoV-2/Portugal/PT0034/2020__EPI_ISL_418019 spike protein (1-1211)(I712C_T1077C)

SEQ ID NO: 1995 - protein, 1211 aa, Artificial Sequence
  SARS-CoV-2/Iceland/202/2020__EPI_ISL_417750 spike protein (1-1211)(I712C_T1077C)
MFVFLVLLPLVSSQCVNLTTRTQLPPAYTNSFTRGVYYPDKVFRSSVLHSTQDLFLPFFSNVTWFHAIHVSGTNGTKRFDNPVLPFNDGVYFASTEKSNIIRGWIFGTTLDSKTQSLLIVNNATNVVIKVCEFQFCNDPFLGVYYHKNNKSWMESEFRVYSSANNCTFEYVSQPFLMDLEGKQGNFKNLREFVFKNIDGYFKIYSKHTPINLVRDLPQGFSALEPLVDLPIGINITRFQTLLALHRSYLTPGDSSSGWTAGAAAYYVGYLQPRTFLLKYNENGTITDAVDCALDPLSETKCTLKSFTVEKGIYQTSNFRVQPTESIVRFPNITNLCPFGEVFNATRFASVYAWNRKRISNCVADYSVLYNSASFSTFKCYGVSPTKLNDLCFTNVYADSFVIRGDEVRQIAPGQTGKIADYNYKLPDDFTGCVIAWNSNNLDSKVGGNYNYLYRLFRKSNLKPFERDISTEIYQAGSTPCNGVEGFNCYFPLQSYGFQPTNGVGYQPYRVVVLSFELLHAPATVCGPKKSTNLVKNKCVNFNFNGLTGTGVLTESNKKFLPFQQFGRDIADTTDAVRDPQTLEILDITPCSFGGVSVITPGTNTSNQVAVLYQDVNCTEVPVAIHADQLTPTWRVYSTGSNVFQTRAGCLIGAEHVNNSYECDIPIGAGICASYQTQTNSPRRARSVASQSIIAYTMSLGAENSVAYSNNSCAIPTNFTISVTTEILPVSMTKTSVDCTMYICGDSTECSNLLLQYGSFCTQLNRALTGIAVEQDKNTQEVFAQVKQIYKTPPIKDFGGFNFSQILPDPSKPSKRSFIEDLLFNKVTLADAGFIKQYGDCLGDIAARDLICAQKFNGLTVLPPLLTDEMIAQYTSALLAGTITSGWTFGAGAALQIPFAMQMAYRFNGIGVTQNVLYENQKLIANQFNSAIGKIQDSLSSTASALGKLQDVVNQNAQALNTLVKQLSSNFGAISSVLNDILSRLDKVEAEVQIDRLITGRLQSLQTYVTQQLIRAAEIRASANLAATKMSECVLGQSKRVDFCGKGYHLMSFPQSAPHGVVFLHVTYVPAQEKNFTCAPAICHDGKAHFPREGVFVSNGTHWFVTQRNFYEPQIITTDNTFVSGNCDVVIGIVNNTVYDPLQPELDSFKEELDKYFKNHTSPDVDLGDIPGINASVVNIQKEIDRLNEVAKNLNESLIDLQELGKYEQYIK

SEQ ID NO: 1996 - protein, 1211 aa, Artificial Sequence
  SARS-CoV-2/USA/WA-UW261/2020__EPI_ISL_418046 spike protein (1-1211)(I712C_T1077C)
MFVFLVLLPLVSSQCVNLTTRTQLPPAYTNSFTRGVYYPDKVFRSSVLHSTQDLFLPFFSNVTWFHAIHVSGTNGTKRFDNPVLPFNDGVYFASTEKSNIIRGWIFGTTLDSKTQSLLIVNNATNVVIKVCEFQFCNDPFLGVYYHKNNKSWMESEFRVYSSANNCTFEYVSQPFLMDLEGKQGNFKNLREFVFKNIDGYFKIYSKHTPINLVRDLPQGFSALEPLVDLPIGINITRFQTLLALHRSYLTPGDSSSGWTAGAAAYYVGYLQPRTFLLKYNENGTITDAVDCALDPLSETKCTLKSFTVEKGIYQTSNFRVQPTESIVRFPNITNLCPFGEVFNATRFTSVYAWNRKRISNCVADYSVLYNSASFSTFKCYGVSPTKLNDLCFTNVYADSFVIRGDEVRQIAPGQTGKIADYNYKLPDDFTGCVIAWNSNNLDSKVGGNYNYLYRLFRKSNLKPFERDISTEIYQAGSTPCNGVEGFNCYFPLQSYGFQPTNGVGYQPYRVVVLSFELLHAPATVCGPKKSTNLVKNKCVNFNFNGLTGTGVLTESNKKFLPFQQFGRDIADTTDAVRDPQTLEILDITPCSFGGVSVITPGTNTSNQVAVLYQDVNCTEVPVAIHADQLTPTWRVYSTGSNVFQTRAGCLIGAEHVNNSYECDIPIGAGICASYQTQTNSPRRARSVASQSIIAYTMSLGAENSVAYSNNSCAIPTNFTISVTTEILPVSMTKTSVDCTMYICGDSTECSNLLLQYGSFCTQLNRALTGIAVEQDKNTQEVFAQVKQIYKTPPIKDFGGFNFSQILPDPSKPSKRSFIEDLLFNKVTLADAGFIKQYGDCLGDIAARDLICAQKFNGLTVLPPLLTDEMIAQYTSALLAGTITSGWTFGAGAALQIPFAMQMAYRFNGIGVTQNVLYENQKLIANQFNSAIGKIQDSLSSTASALGKLQDVVNQNAQALNTLVKQLSSNFGAISSVLNDILSRLDKVEAEVQIDRLITGRLQSLQTYVTQQLIRAAEIRASANLAATKMSECVLGQSKRVDFCGKGYHLMSFPQSAPHGVVFLHVTYVPAQEKNFTCAPAICHDGKAHFPREGVFVSNGTHWFVTQRNFYEPQIITTDNTFVSGNCDVVIGIVNNTVYDPLQPELDSFKEELDKYFKNHTSPDVDLGDISGINASVVNIQKEIDRLNEVAKNLNESLIDLQELGKYEQYIK

SEQ ID NO: 1997 - protein, 1211 aa, Artificial Sequence
  SARS-CoV-2/Portugal/PT0035/2020__EPI_ISL_418020 spike protein (1-1211)(I712C_T1077C)
MFVFLVLLPLVSSQCVNLTTRTQLPPAYTNSFTRGVYYPDKVFRSSVLHSTQDLFLPFFSNVTWFHAIHVSGTNGTKRFDNPVLPFNDGVYFASTEKSNIIRGWIFGTTLDSKTQSLLIVNNATNVVIKVCEFQFCNDPFLGVYYHKNNKSWMESEFRVYSSANNCTFEYVSQPFLMDLEGKQGNFKNLREFVFKNIDGYFKIYSKHTPINLVRDLPQGFSALEPLVDLPIGINITRFQTLLALHRSYLTPGDSSSGWTAGAAAYYVGYLQPRTFLLKYNENGTITDAVDCALDPLSETKCTLKSFTVEKGIYQTSNFRVQPTESIVRFPNITNLCPFGEVFNATRFASVYAWNRKRISNCVADYSVLYNSASFSTFKCYGVSPTKLNDLCFTNVYADSFVIRGDEVRQIAPGQTGKIADYNYKLPDDFTGCVIAWNSNNLDSKVGGNYNYLYRLFRKSNLKPFERDISTEIYQAGSTPCNGVEGFNCYFPLQSYGFQPTNGVGYQPYRVVVLSFELLHAPATVCGPKKSTNLVKNKCVNFNFNGLTGTGVLTESNKKFLPFQQFGRDIADTTDAVRDPQTLEILDITPCSFGGVSVITPGTNTSNQVAVLYQDVNCTEVPVAIHADQLTPTWRVYSTGSNVFQTRAGCLIGAEHVNNSYECDIPIGAGICASYQTQTNSPRRARSVASQSIIAYTMSLGAENSVAYSNNSCAIPTNFTISVTTEILPVSMTKTSVDCTMYICGDSTECSNLLLQYGSFCTQLNRALTGIAVEQDKNTQEVFAQVKQIYKTPPIKDFGGFNFSQILPDPSKPSKRSFIEDLLFNKVTLADAGFIKQYGDCLGDISARDLICAQKFNGLTVLPPLLTDEMIAQYTSALLAGTITSGWTFGAGAALQIPFAMQMAYRFNGIGVTQNVLYENQKLIANQFNSAIGKIQDSLSSTASALGKLQDVVNQNAQALNTLVKQLSSNFGAISSVLNDILSRLDKVEAEVQIDRLITGRLQSLQTYVTQQLIRAAEIRASANLAATKMSECVLGQSKRVDFCGKGYHLMSFPQSAPHGVVFLHVTYVPAQEKNFTCAPAICHDGKAHFPREGVFVSNGTHWFVTQRNFYEPQIITTDNTFVSGNCDVVIGIVNNTVYDPLQPELDSFKEELDKYFKNHTSPDVDLGDISGINASVVNIQKEIDRLNEVAKNLNESLIDLQELGKYEQYIK

SEQ ID NO: 1998 - protein, 1211 aa, Artificial Sequence
  SARS-CoV-2/USA/NY-NYUMC7/2020__EPI_ISL_418192 spike protein (1-1211)(I712C_T1077C)
MFVFLVLLPLVSSQCVNLTTRTQLPPAYTNSFTRGVYYPDKVFRSSVLHSTQDLFLPFFSNVTWFHAIHVSGTNGTKRFDNPVLPFNDGVYFASTEKSNIIRGWIFGTTLDSKTQSLLIVNNATNVVIKVCEFQFCNDPFLGVYHHKNNKSWMESEFRVYSSANNCTFEYVSQPFLMDLEGKQGNFKNLREFVFKNIDGYFKIYSKHTPINLVRDLPQGFSALEPLVDLPIGINITRFQTLLALHRSYLTPGDSSSGWTAGAAAYYVGYLQPRTFLLKYNENGTITDAVDCALDPLSETKCTLKSFTVEKGIYQTSNFRVQPTESIVRFPNITNLCPFGEVFNATRFASVYAWNRKRISNCVADYSVLYNSASFSTFKCYGVSPTKLNDLCFTNVYADSFVIRGDEVRQIAPGQTGKIADYNYKLPDDFTGCVIAWNSNNLDSKVGGNYNYLYRLFRKSNLKPFERDISTEIYQAGSTPCNGVEGFNCYFPLQSYGFQPTNGVGYQPYRVVVLSFELLHAPATVCGPKKSTNLVKNKCVNFNFNGLTGTGVLTESNKKFLPFQQFGRDIADTTDAVRDPQTLEILDITPCSFGGVSVITPGTNTSNQVAVLYQGVNCTEVPVAIHADQLTPTWRVYSTGSNVFQTRAGCLIGAEHVNNSYECDIPIGAGICASYQTQTNSPRRARSVASQSIIAYTMSLGAENSVAYSNNSCAIPTNFTISVTTEILPVSMTKTSVDCTMYICGDSTECSNLLLQYGSFCTQLNRALTGIAVEQDKNTQEVFAQVKQIYKTPPIKDFGGFNFSQILPDPSKPSKRSFIEDLLFNKVTLADAGFIKQYGDCLGDIAARDLICAQKFNGLTVLPPLLTDEMIAQYTSALLAGTITSGWTFGAGAALQIPFAMQMAYRFNGIGVTQNVLYENQKLIANQFNSAIGKIQDSLSSTASALGKLQDVVNQNAQALNTLVKQLSSNFGAISSVLNDILSRLDKVEAEVQIDRLITGRLQSLQTYVTQQLIRAAEIRASANLAATKMSECVLGQSKRVDFCGKGYHLMSFPQSAPHGVVFLHVTYVPAQEKNFTCAPAICHDGKAHFPREGVFVSNGTHWFVTQRNFYEPQIITTDNTFVSGNCDVVIGIVNNTVYDPLQPELDSFKEELDKYFKNHTSPDVDLGDISGINASVVNIQKEIDRLNEVAKNLNESLIDLQELGKYEQYIK

SEQ ID NO: 1999 - protein, 1211 aa, Artificial Sequence
  SARS-CoV-2/Iceland/189/2020__EPI_ISL_417709 spike protein (1-1211)(I712C_T1077C)
MFVFLVLLPLVSSQCVNLTTRTQLPPAYTNSFTRGVYYPDKVFRSSVLHSTQDLFLPFFSNVTWFHAIHVSGTNGTKRFDNPVLPFNDGVYFASTEKSNIIRGWIFGTTLDSKTQSLLIVNNATNVVIKVCEFQFCNDPFLGVYYHKNNKSWMESEFRVYSSANNCTFEYVSQPFLMDLEGKQGNFKNLREFVFKNIDGYFKIYSKHTPINLVRDLPQGFSALEPLVDLPIGINITRFQTLLALHRSYLTPGDSSSGWTAGAAAYYVGYLQPRTFLLKYNENGTITDAVDCALDPLSETKCTLKSFTVEKGIYQTSNFRVQPTESIVRFPNITNLCPFGEVFNATRFASVYAWNRKRISNCVADYSVLYNSASFSTFKCYGVSPTKLNDLCFTNVYADSFVIRGDEVRQIAPGQTGKIADYNYKLPDDFTGCVIAWNSNNLDSKVGGNYNYLYRLFRKSNLKPFERDISTEIYQAGSTPCNGVEGFNCYFPLQSYGFQPTNGVGYQPYRVVVLSFELLHAPATVCGPKKSTNLVKNKCVNFNFNGLTGTGVLTESNKKFLPFQQFGRDIADTTDAVRDPQTLEILDITPCSFGGVSVITPGTNTSNQVAVLYQGVNCTEVPVAIHADQLTPTWRVYSTGSNVFQTRAGCLIGAEHVNNSYECDIPIGAGICASYQTQTNSPRRARSVASQSIIAYTMSLGAENSVAYSNNSCAIPTNFTISVTTEILPVSMTKTSVDCTMYICGDSTECSNLLLQYGSFCTQLNRALTGIAVEQDKNTQEVFAQVKQIYKTPPIKDFGGFNFSQILPDPSKPSKRSFIEDLLFNKVTLADAGFTKQYGDCLGDIAARDLICAQKFNGLTVLPPLLTDEMIAQYTSALLAGTITSGWTFGAGAALQIPFAMQMAYRFNGIGVTQNVLYENQKLIANQFNSAIGKIQDSLSSTASALGKLQDVVNQNAQALNTLVKQLSSNFGAISSVLNDILSRLDKVEAEVQIDRLITGRLQSLQTYVTQQLIRAAEIRASANLAATKMSECVLGQSKRVDFCGKGYHLMSFPQSAPHGVVFLHVTYVPAQEKNFTCAPAICHDGKAHFPREGVFVSNGTHWFVTQRNFYEPQIITTDNTFVSGNCDVVIGIVNNTVYDPLQPELDSFKEELDKYFKNHTSPDVDLGDISGINASVVNIQKEIDRLNEVAKNLNESLIDLQELGKYEQYIK

SEQ ID NO: 2000 - protein, 1211 aa, Artificial Sequence
  SARS-CoV-2/Australia/NSW56/2020__EPI_ISL_417408 spike protein (1-1211)(I712C_T1077C)
MFVFLVLLPLVSSQCVNLTTRTQLPPAYTNSFTRGVYYPDKVFRSSVLHSTQDLFLPFFSNVTWFHAIHVSGTNGTKRFDNPVLPFNDGVYFASTEKSNIIRGWIFGTTLDSKTQSLLIVNNATNVVIKVCEFQFCNDPFLGVYYHKNNKSWMESEFRVYSSANNCTFEYVSQPFLMDLEGKQGNFKNLREFVFKNIDGYFKIYSKHTPINLVRDLPQGFSALEPLVDLPIGINITRFQTLLALHRSYLTPGDSSSGWTAGAAAYYVGYLQPRTFLLKYNENGTITDAVDCALDPLSETKCTLKSFTVEKGIYQTSNFRVQPTESIVRFPNITNLCPFGEVFNATRFASVYAWNRKRISNCVADYSVLYNSASFSTFKCYGVSPTKLNDLCFTNVYADSFVIRGDEVRQIAPGQTGKIADYNYKLPDDFTGCVIAWNSNNLDSKVGGNYNYLYRLFRKSNLKPFERDISTEIYQAGSTPCNGVEGFNCYFPLQSYGFQPTNGVGYQPYRVVVLSFELLHAPATVCGPKKSTNLVKNKCVNFNFNGLTGTGVLTESNKKFLPFQQFGRDIADTTDAVRDPQTLEILDITPCSFGGVSVITPGTNTSNQVAVLYQDVNCTEVPVAIHADQLTPTWRVYSTGSNVFQTRAGCLIGAEHVNNSYECDIPIGAGICASYQTQTNSPRRARSVASQSIIAYTMSLGAENSVAYSNNSCAIPTNFTISVTTEILPVSMTKTSVDCTMYICGDSTECSNLLLQYGSFCTQLNRALTGIAVEQDKNTQEVFAQVKQIYKTPPIKDFGGFNFSQILPDSSKPSKRSFIEDLLFNKVTLADAGFIKQYGDCLGDIAARDLICAQKFNGLTVLPPLLTDEMIAQYTSALLAGTITSGWTFGAGAALQIPFAMQMAYRFNGIGVTQNVLYENQKLIANQFNSAIGKIQDSLSSTASALGKLQDVVNQNAQALNTLVKQLSSNFGAISSVLNDILSRLDKVEAEVQIDRLITGRLQSLQTYVTQQLIRAAEIRASANLAATKMSECVLGQSKRVDFCGKGYHLMSFPQSAPHGVVFLHVTYVPAQEKNFTCAPAICHDGKAHFPREGVFVSNGTHWFVTQRNFYEPQIITTDNTFVSGNCDVVIGIVNNTVYDPLQPELDSFKEELDKYFKNHTSPDVDLGDISGINASVVNIQKEIDRLNEVAKNLNESLIDLQELGKYEQYIK

SEQ ID NO: 2001 - protein, 1211 aa, Artificial Sequence
  SARS-CoV-2/Iceland/280/2020__EPI_ISL_417608 spike protein (1-1211)(I712C_T1077C)
MFVFLVLLPLVSSQCVNLTTRTQLPPAYTNSFTRGVYYPDKVFRSSVLHSTQDLFLPFFSNVTWFHAIHVSGTNGTKRFDNPVLPFNDGVYFASTEKSNIIRGWIFGTTLDSKTQSLLIVNNATNVVIKVCEFQFCNDPFLGVYYHKNNKSWMESEFRVYSSANNCTFEYVSQPFLMDLEGKQGNFKNLREFVFKNIDGYFKIYSKHTPINLVRDLPQGFSALEPLVDLPIGINITRFQTLLALHRSYLTPGDSSSGWTAGAAAYYVGYLQPRTFLLKYNENGTITDAVDCALDPLSETKCTLKSFTVEKGIYQTSNFRVQPTESIVRFPNITNLCPFGEVFNATRFASVYAWNRKRISNCVADYSVLYNSASFSTFKCYGVSPTKLNDLCFTNVYADSFVIRGDEVRQIAPGQTGKIADYNYKLPDDFTGCVIAWNSNNLDSKVGGNYNYLYRLFRKSNLKPFERDISTEIYQAGSTPCNGVEGFNCYFPLQSYGFQPTNGVGYQPYRVVVLSFELLHAPATVCGPKKSTNLVKNKCVNFNFNGLTGTGVLTESNKKFLPFQQFGRDIADTTDAVRDPQTLEILDITPCSFGGVSVITPGTNTSNQVAVLYQGVNCTEVPVAIHADQLTPTWRVYSTGSNVFQTRAGCLIGAEHVNNSYECDIPIGAGICASYHTQTNSPRRARSVASQSIIAYTMSLGAENSVAYSNNSCAIPTNFTISVTTEILPVSMTKTSVDCTMYICGDSTECSNLLLQYGSFCTQLNRALTGIAVEQDKNTQEVFAQVKQIYKTPPIKDFGGFNFSQILPDPSKPSKRSFIEDLLFNKVTLADAGFIKQYGDCLGDIAARDLICAQKFNGLTVLPPLLTDEMIAQYTSALLAGTITSGWTFGAGAALQIPFAMQMAYRFNGIGVTQNVLYENQKLIANQFNSAIGKIQDSLSSTASALGKLQDVVNQNAQALNTLVKQLSSNFGAISSVLNDILSRLDKVEAEVQIDRLITGRLQSLQTYVTQQLIRAAEIRASANLAATKMSECVLGQSKRVDFCGKGYHLMSFPQSAPHGVVFLHVTYVPAQEKNFTCAPAICHDGKAHFPREGVFVSNGTHWFVTQRNFYEPQIITTDNTFVSGNCDVVIGIVNNTVYDPLQPELDSFKEELDKYFKNHTSPDVDLGDISGINASVVNIQKEIDRLNEVAKNLNESLIDLQELGKYEQYIK

SEQ ID NO: 2002 - protein, 1211 aa, Artificial Sequence; identical to SEQ ID NO: 1957
  SARS-CoV-2/Iceland/247/2020__EPI_ISL_417575 spike protein (1-1211)(I712C_T1077C)

SEQ ID NO: 2003 - protein, 1211 aa, Artificial Sequence
  SARS-CoV-2/Iceland/238/2020__EPI_ISL_417566 spike protein (1-1211)(I712C_T1077C)
MFVFLVLLPLVSSQCVNLTTRTQLPPAYTNSFTRGVYYPDKVFRSSVLHSTQDLFLPFFSNVTWFHAIHVSGTNGTKRFDNPVLPFNDGVYFASTEKSNIIRGWIFGTTLDSKTQSLLIVNNATNVVIKVCEFQFCNDPFLGVYYHKNNKSWMESEFRVYSSANNCTFEYVSQPFLMDLEGKQGNFKNLREFVFKNIDGYFKIYSKHTPINLVRDLPQGFSALEPLVDLPIGINITRFQTLLALHRSYLTPGDSSSGWTAGAAAYYVGYLQPRTFLLKYNENGTITDAVDCALDPLSETKCTLKSFTVEKGIYQTSNFRVQPTESIVRFPNITNLCPFGEVFNATRFASVYAWNRKRISNCVADYSVLYNSASFSTFKCYGVSPTKLNDLCFTNVYADSFVIRGDEVRQIAPGQTGKIADYNYKLPDDFTGCVIAWNSNNLDSKVGGNYNYLYRLFRKSNLKPFERDISTEIYQAGSTPCNGVEGFNCYFPLQSYGFQPTNGVGYQPYRVVVLSFELLHAPATVCGPKKSTNLVKNKCVNFNFNGLTGTGVLTESNKKFLPFQQFGRDIADTTDAVRDPQTLEILDITPCSFGGVSVITPGTNTSNQVAVLYQGVNCTEVPVAIHADQLTPTWRVYSTGSNVFQTRAGCLIGAEHVNNSYECDIPIGAGICASYQTQTNSPRRARSVASQSIIAYTMSLGAENSVAYSNNSCAIPTNFTISVTTEILPVSMTKTSVDCTMYICGDSTECSNLLLQYGSFCTQLNRALTGIAVEQDKNTQEVFAQVKQIYKTPPIKDFGGFNFSQILPDPSKPSKRSFIEDLLFNKVTLADVGFIKQYGDCLGDIAARDLICAQKFNGLTVLPPLLTDEMIAQYTSALLAGTITSGWTFGAGAALQIPFAMQMAYRFNGIGVTQNVLYENQKLIANQFNSAIGKIQDSLSSTASALGKLQDVVNQNAQALNTLVKQLSSNFGAISSVLNDILSRLDKVEAEVQIDRLITGRLQSLQTYVTQQLIRAAEIRASANLAATKMSECVLGQSKRVDFCGKGYHLMSFPQSAPHGVVFLHVTYVPAQEKNFTCAPAICHDGKAHFPREGVFVSNGTHWFVTQRNFYEPQIITTDNTFVSGNCDVVIGIVNNTVYDPLQPELDSFKEELDKYFKNHTSPDVDLGDISGINASVVNIQKEIDRLNEVAKNLNESLIDLQELGKYEQYIK

SEQ ID NO: 2004 - protein, 1211 aa, Artificial Sequence
  SARS-CoV-2/Greece/16/2020__EPI_ISL_418265 spike protein (1-1211)(I712C_T1077C)
MFVFLVLLPLVSSQCVNLTTRTQLPPAYTNSFTRGVYYPDKVFRSSVLHSTQDLFLPFFSNVTWFHAIHVSGTNGTKRFDNPVLPFNDGVYFASTEKSNIIRGWIFGTTLDSKTQSLLIVNNATNVVIKVCEFQFCNDPFLGVYYHKNNKSWMESEFRVYSSANNCTFEYVSQPFLMDLEGKQGNFKNLREFVFKNVDGYFKIYSKHTPINLVRDLPQGFSALEPLVDLPIGINITRFQTLLALHRSYLTPGDSSSGWTAGAAAYYVGYLQPRTFLLKYNENGTITDAVDCALDPLSETKCTLKSFTVEKGIYQTSNFRVQPTESIVRFPNITNLCPFGEVFNATRFASVYAWNRKRISNCVADYSVLYNSASFSTFKCYGVSPTKLNDLCFTNVYADSFVIRGDEVRQIAPGQTGKIADYNYKLPDDFTGCVIAWNSNNLDSKVGGNYNYLYRLFRKSNLKPFERDISTEIYQAGSTPCNGVEGFNCYFPLQSYGFQPTNGVGYQPYRVVVLSFELLHAPATVCGPKKSTNLVKNKCVNFNFNGLTGTGVLTESNKKFLPFQQFGRDIADTTDAVRDPQTLEILDITPCSFGGVSVITPGTNTSNQVAVLYQDVNCTEVPVAIHADQLTPTWRVYSTGSNVFQTRAGCLIGAEHVNNSYECDIPIGAGICASYQTQTNSPRRARSVASQSIIAYTMSLGAENSVAYSNNSCAIPTNFTISVTTEILPVSMTKTSVDCTMYICGDSTECSNLLLQYGSFCTQLNRALTGIAVEQDKNTQEVFAQVKQIYKTPPIKDFGGFNFSQILPDPSKPSKRSFIEDLLFNKVTLADAGFIKQYGDCLGDIAARDLICAQKFNGLTVLPPLLTDEMIAQYTSALLAGTITSGWTFGAGAALQIPFAMQMAYRFNGIGVTQNVLYENQKLIANQFNSAIGKIQDSLSSTASALGKLQDVVNQNAQALNTLVKQLSSNFGAISSVLNDILSRLDKVEAEVQIDRLITGRLQSLQTYVTQQLIRAAEIRASANLAATKMSECVLGQSKRVDFCGKGYHLMSFPQSAPHGVVFLHVTYVPAQEKNFTCAPAICHDGKAHFPREGVFVSNGTHWFVTQRNFYEPQIITTDNTFVSGNCDVVIGIVNNTVYDPLQPELDSFKEELDKYFKNHTSPDVDLGDISGINASVVNIQKEIDRLNEVAKNLNESLIDLQELGKYEQYIK

SEQ ID NO: 2005 - protein, 1211 aa, Artificial Sequence
  SARS-CoV-2/Iceland/319/2020__EPI_ISL_417648 spike protein (1-1211)(I712C_T1077C)
MFVFLVLLPLVSSQCVNLTTRTQLPPAYTNSFTRGVYYPDKVFRSSVLHSTQDLFLPFFSNVTWFHAIHVSGTNGTKRFDNPVLPFNDGVYFASTEKSNIIRGWIFGTTLDSKTQSLLIVNNATNVVIKVCEFQFCNDPFLGVYYHKNNKSWMESEFRVYSSANNCTFEYVSQPFLIDLEGKQGNFKNLREFVFKNIDGYFKIYSKHTPINLVRDLPQGFSALEPLVDLPIGINITRFQTLLALHRSYLTPGDSSSGWTAGAAAYYVGYLQPRTFLLKYNENGTITDAVDCALDPLSETKCTLKSFTVEKGIYQTSNFRVQPTESIVRFPNITNLCPFGEVFNATRFASVYAWNRKRISNCVADYSVLYNSASFSTFKCYGVSPTKLNDLCFTNVYADSFVIRGDEVRQIAPGQTGKIADYNYKLPDDFTGCVIAWNSNNLDSKVGGNYNYLYRLFRKSNLKPFERDISTEIYQAGSTPCNGVEGFNCYFPLQSYGFQPTNGVGYQPYRVVVLSFELLHAPATVCGPKKSTNLVKNKCVNFNFNGLTGTGVLTESNKKFLPFQQFGRDIADTTDAVRDPQTLEILDITPCSFGGVSVITPGTNTSNQVAVLYQGVNCTEVPVAIHADQLTPTWRVYSTGSNVFQTRAGCLIGAEHVNNSYECDIPIGAGICASYQTQTNSPRRARSVASQSIIAYTMSLGAENSVAYSNNSCAIPTNFTISVTTEILPVSMTKTSVDCTMYICGDSTECSNLLLQYGSFCTQLNRALTGIAVEQDKNTQEVFAQVKQIYKTPPIKDFGGFNFSQILPDPSKPSKRSFIEDLLFNKVTLADAGFIKQYGDCLGDIAARDLICAQKFNGLTVLPPLLTDEMIAQYTSALLAGTITSGWTFGAGAALQIPFAMQMAYRFNGIGVTQNVLYENQKLIANQFNSAIGKIQDSLSSTASALGKLQDVVNQNAQALNTLVKQLSSNFGAISSVLNDILSRLDKVEAEVQIDRLITGRLQSLQTYVTQQLIRAAEIRASANLAATKMSECVLGQSKRVDFCGKGYHLMSFPQSAPHGVVFLHVTYVPAQEKNFTCAPAICHDGKAHFPREGVFVSNGTHWFVTQRNFYEPQIITTDNTFVSGNCDVVIGIVNNTVYDPLQPELDSFKEELDKYFKNHTSPDVDLGDISGINASVVNIQKEIDRLNEVAKNLNESLIDLQELGKYEQYIK

SEQ ID NO: 2006 - protein, 1211 aa, Artificial Sequence
  SARS-CoV-2/Congo/94/2020__EPI_ISL_417947 spike protein (1-1211)(I712C_T1077C)
MFVFLVLLPLVSSQCVNLTTRTQLPPAYTNSFTRGVYYPDKVFRSSVLHSTQDLFLPFFSNVTWFHAIHVSGTNGTKRFDNPVLPFNDGVYFASTEKSNIIRGWIFGTTLDSKTQSLLIVNNATNVVIKVCEFQFCNDPFLGVYYHKNNKSWMESEFRVYSSANNCTFEYVSQPFLMDLEGKQGNFKNLREFVFKNIDGYFKIYSKHTPINLVRDLPQGFSALEPLVDLPIGINITRFQTLLALHRSYLTPGDSSSGWTAGAAAYYVGYLQPRTFLLKYNENGTITDAVDCALDPLSETKCTLKSFTVEKGIYQTSNFRVQPTESIVRFPNITNLCPFGEVFNATRFASVYAWNRKRISNCVADYSVLYNSASFSTFKCYGVSPTKLNDLCFTNVYADSFVIRGDEVRQIAPGQTGKIADYNYKLPDDFTGCVIAWNSNNLDSKVGGNYNYLYRLFRKSNLKPFERDISTEIYQAGSTPCNGVEGFNCYFPLQSYGFQPTNGVGYQPYRVVVLSFELLHAPATVCGPKKSTNLVKNKCVNFNFNGLTGTGVLTESNKKFLPFQQFGRDIADTTDAVRDPQTLEILDITPCSFGGVSVITPGTNTSNQVAVLYQGVNCTEVPVAIHADQLTPTWRVYSTGSNVFQTRAGCLIGAEHVNNSYECDIPIGAGICASYQTQTNSPRRARSVASQSIIAYTMSLGAENSVAYSNNSCAIPTNFTISVTTEILPVSMTKTSVDCTMYICGDSTECSNLLLQYGSFCTQLNRALTGIAVEQDKNTQEVFAQVKQIYKTPPIKDFGGFNFSQILPDPSKPSKRSFIEDILFNKVTLADAGFIKQYGDCLGDIAARDLICAQKFNGLTVLPPLLTDEMIAQYTSALLAGTITSGWTFGAGAALQIPFAMQMAYRFNGIGVTQNVLYENQKLIANQFNSAIGKIQDSLSSTASALGKLQDVVNQNAQALNTLVKQLSSNFGAISSVLNDILSRLDKVEAEVQIDRLITGRLQSLQTYVTQQLIRAAEIRASANLAATKMSECVLGQSKRVDFCGKGYHLMSFPQSAPHGVVFLHVTYVPAQEKNFTCAPAICHDGKAHFPREGVFVSNGTHWFVTQRNFYEPQIITTDNTFVSGNCDVVIGIVNNTVYDPLQPELDSFKEELDKYFKNHTSPDVDLGDISGINASVVNIQKEIDRLNEVAKNLNESLIDLQELGKYEQYIK

SEQ ID NO: 2007 - protein, 1211 aa, Artificial Sequence
  SARS-CoV-2/Congo/158/2020__EPI_ISL_417950 spike protein (1-1211)(I712C_T1077C)
MFVFLVLLPLVSSQCVNLTTRTQLPPAYTNSFTRGVYYPDKVFRSSVLHSTQDLFLPFFSNVTWFHAIHVSGTNGTKRFDNPVLPFNDGVYFASTEKSNIIRGWIFGTTLDSKTQSLLIVNNATNVVIKVCEFQFCNDPFLGVYYHKNNKSWMESEFRVYSSANNCTFEYVSQPFLMDLEGKQGNFKNLREFVFKNIDGYFKIYSKHTPINLVRDLPQGFSALEPLVDLPIGINITRFQTLLALHRSYLTPGDSSSGWTAGAAAYYVGYLQPRTFLLKYNENGTITDAVDCALDPLSETKCTLKSFTVEKGIYQTSNFRVQPTESIVRFPNITNLCPFGEVFNATRFASVYAWNRKRISNCVADYSVLYNSASFSTFKCYGVSPTKLNDLCFTNVYADSFVIRGDEVRQIAPGQTGKIADYNYKLPDDFTGCVIAWNSNNLDSKVGGNYNYLYRLFRKSNLKPFERDISTEIYQAGSTPCNGVEGFNCYFPLQSYGFQPTNGVGYQPYRVVVLSFELLHAPATVCGPKKSTNLVKNKCVNFNFNGLTGTGVLTESNKKFLPFQQFGRDIADTTDAVRDPQTLEILDITPCSFGGVSVITPGTNTSNQVAVLYQDVNCTEVPVAIHADQLTPTWRVYSTGSNVFQTRAGCLIGAEHVNNSYECDIPIGAGICASYQTQTNSPRRARSVASQSIIAYTMSLGAENSVAYSNNSCAIPTNFTISVTTEILPVSMTKTSVDCTMYICGDSTECSNLLLQYGSFCTQLNRALTGIAVEQDKNTQEVFAQVKQIYKTPPIKDFGGFNFSQILPDPSKPSKRSFIEDLLFNKVTLADAGFIKQYGDCLGDIAARDLICAQKFNGLTVLPPLLTDEMIAQYTSALLAGTITSGWTFGAGAALQIPFAMQMAYRFNGIGVTQNVLYENQKLIANQFNSAIGKIQDSLSSTASALGKLQDVVNQNAQALNTLVKQLSSNFGAISSVLNDILSRLDKVEAEVQIDRLITGRLQSLQTYVTQQLIRAAEIRASANLAATKMSECVLGQSKRVDFCGKGYHLMSFPQSAPHGVVFLHVTYVPAQEKNFTCAPAICHDGKAHFPREGVFVSNGTHWFVTQRNFYEPQIITTDNTFLSGNCDVVIGIVNNTVYDPLQPELDSFKEELDKYFKNHTSPDVDLGDISGINASVVNIQKEIDRLNEVAKNLNESLIDLQELGKYEQYIK

SEQ ID NO: 2008 - protein, 1211 aa, Artificial Sequence
  SARS-CoV-2/USA/UT-00034/2020__EPI_ISL_417977 spike protein (1-1211)(I712C_T1077C)
MFVFLVLLPLVSSQCVNLTTRTQLPPAYTNSFTRGVYYPDKVFRSSVLHSTQDLFLPFFSNVTWFHAIHVSGTNGTKRFDNPVLPFNDGVYFASTEKSNIIRGWIFGTTLDSKTQSLLIVNNATNVVIKVCEFQFCNDPFLGVYYYKNNKSWMESEFRVYSSANNCTFEYVSQPFLMDLEGKQGNFKNLREFVFKNIDGYFKIYSKHTPINLVRDLPQGFSALEPLVDLPIGINITRFQTLLALHRSYLTPGDSSSGWTAGAAAYYVGYLQPRTFLLKYNENGTITDAVDCALDPLSETKCTLKSFTVEKGIYQTSNFRVQPTESIVRFPNITNLCPFGEVFNATRFASVYAWNRKRISNCVADYSVLYNSASFSTFKCYGVSPTKLNDLCFTNVYADSFVIRGDEVRQIAPGQTGKIADYNYKLPDDFTGCVIAWNSNNLDSKVGGNYNYLYRLFRKSNLKPFERDISTEIYQAGSTPCNGVEGFNCYFPLQSYGFQPTNGVGYQPYRVVVLSFELLHAPATVCGPKKSTNLVKNKCVNFNFNGLTGTGVLTESNKKFLPFQQFGRDIADTTDAVRDPQTLEILDITPCSFGGVSVITPGTNTSNQVAVLYQGVNCTEVPVAIHADQLTPTWRVYSTGSNVFQTRAGCLIGAEHVNNSYECDIPIGAGICASYQTQTNSPRRARSVASQSIIAYTMSLGAENSVAYSNNSCAIPTNFTISVTTEILPVSMTKTSVDCTMYICGDSTECSNLLLQYGSFCTQLNRALTGIAVEQDKNTQEVFAQVKQIYKTPPIKDFGGFNFSQILPDPSKPSKRSFIEDLLFNKVTLADAGFIKQYGDCLGDIAARDLICAQKFNGLTVLPPLLTDEMIAQYTSALLAGTITSGWTFGAGAALQIPFAMQMAYRFNGIGVTQNVLYENQKLIANQFNSAIGKIQDSLSSTASALGKLQDVVNQNAQALNTLVKQLSSNFGAISSVLNDILSRLDKVEAEVQIDRLITGRLQSLQTYVTQQLIRAAEIRASANLAATKMSECVLGQSKRVDFCGKGYHLMSFPQSAPHGVVFLHVTYVPAQEKNFTCAPAICHDGKAHFPREGVFVSNGTHWFVTQRNFYEPQIITTDNTFVSGNCDVVIGIVNNTVYDPLQPELDSFKEELDKYFKNHTSPDVDLGDISGINASVVNIQKEIDRLNEVAKNLNESLIDLQELGKYEQYIK

SEQ ID NO: 2009 - protein, 1211 aa, Artificial Sequence
  SARS-CoV-2/USA/UT-00033/2020__EPI_ISL_417976 spike protein (1-1211)(I712C_T1077C)
MFVFLVLLPLVSSQCVNLTTRTQLPPAYTNSFTRGVYYPDKVFRSSVLHSTQDLFLPFFSNVTWFHAIHVSGTNGTKRFDNPVLPFNDGVYFASTEKSNIIRGWIFGTTLDSKTQSLLIVNNATNVVIKVCEFQFCNDPFLGVYYHKNNKSWMESEFRVYSSANNCTFEYVSQPFLMDLEGKQGNFKNLREFVFKNIDGYFKIYSKHTPINLVRDLPQGFSALEPLVDLPIGINITRFQTLLALHRSYLTPGDSSSGLTAGAAAYYVGYLQPRTFLLKYNENGTITDAVDCALDPLSETKCTLKSFTVEKGIYQTSNFRVQPTESIVRFPNITNLCPFGEVFNATRFASVYAWNRKRISNCVADYSVLYNSASFSTFKCYGVSPTKLNDLCFTNVYADSFVIRGDEVRQIAPGQTGKIADYNYKLPDDFTGCVIAWNSNNLDSKVGGNYNYLYRLFRKSNLKPFERDISTEIYQAGSTPCNGVEGFNCYFPLQSYGFQPTNGVGYQPYRVVVLSFELLHAPATVCGPKKSTNLVKNKCVNFNFNGLTGTGVLTESNKKFLPFQQFGRDIADTTDAVRDPQTLEILDITPCSFGGVSVITPGTNTSNQVAVLYQGVNCTEVPVAIHADQLTPTWRVYSTGSNVFQTRAGCLIGAEHVNNSYECDIPIGAGICASYQTQTNSPRRARSVASQSIIAYTMSLGAENSVAYSNNSCAIPTNFTISVTTEILPVSMTKTSVDCTMYICGDSTECSNLLLQYGSFCTQLNRALTGIAVEQDKNTQEVFAQVKQIYKTPPIKDFGGFNFSQILPDPSKPSKRSFIEDLLFNKVTLADAGFIKQYGDCLGDIAARDLICAQKFNGLTVLPPLLTDEMIAQYTSALLAGTITSGWTFGAGAALQIPFAMQMAYRFNGIGVTQNVLYENQKLIANQFNSAIGKIQDSLSSTASALGKLQDVVNQNAQALNTLVKQLSSNFGAISSVLNDILSRLDKVEAEVQIDRLITGRLQSLQTYVTQQLIRAAEIRASANLAATKMSECVLGQSKRVDFCGKGYHLMSFPQSAPHGVVFLHVTYVPAQEKNFTCAPAICHDGKAHFPREGVFVSNGTHWFVTQRNFYEPQIITTDNTFVSGNCDVVIGIVNNTVYDPLQPELDSFKEELDKYFKNHTSPDVDLGDISGINASVVNIQKEIDRLNEVAKNLNESLIDLQELGKYEQYIK

SEQ ID NO: 2010 - protein, 1211 aa, Artificial Sequence
  SARS-CoV-2/USA/WI-13/2020__EPI_ISL_417516 spike protein (1-1211)(I712C_T1077C)
MFVFLVLLPLVSSQCVNLTTRTQLPPAYTNSFTRGVYYPDKVFRSSVLHSTQDLFLPFFSNVTWFHAIHVSGTNGTKRFDNPVLPFNDGVYFASTEKSNIIRGWIFGTTLDSKTQSLLIVNNATNVVIKVCEFQFCNDPFLGVYYHKNNKSWMESEFRVYSSANNCTFEYVSQPFLMDLEGKQGNFKNLREFVFKNIDGYFKIYSKHTPINLVRDLPQGFSALEPLVDLPIGINITRFQTLLALHRSYLTPGDSSSGWTAGAAAYYVGYLQPRTFLLKYNENGTITDAVDCALDPLSETKCTLKSFTVEKGIYQTSNFRVLPTESIVRFPNITNLCPFGEVFNATRFASVYAWNRKRISNCVADYSVLYNSASFSTFKCYGVSPTKLNDLCFTNVYADSFVIRGDEVRQIAPGQTGKIADYNYKLPDDFTGCVIAWNSNNLDSKVGGNYNYLYRLFRKSNLKPFERDISTEIYQAGSTPCNGVEGFNCYFPLQSYGFQPTNGVGYQPYRVVVLSFELLHAPATVCGPKKSTNLVKNKCVNFNFNGLTGTGVLTESNKKFLPFQQFGRDIADTTDAVRDPQTLEILDITPCSFGGVSVITPGTNTSNQVAVLYQGVNCTEVPVAIHADQLTPTWRVYSTGSNVFQTRAGCLIGAEHVNNSYECDIPIGAGICASYQTQTNSPRRARSVASQSIIAYTMSLGAENSVAYSNNSCAIPTNFTISVTTEILPVSMTKTSVDCTMYICGDSTECSNLLLQYGSFCTQLNRALTGIAVEQDKNTQEVFAQVKQIYKTPPIKDFGGFNFSQILPDPSKPSKRSFIEDLLFNKVTLADAGFIKQYGDCLGDIAARDLICAQKFNGLTVLPPLLTDEMIAQYTSALLAGTITSGWTFGAGAALQIPFAMQMAYRFNGIGVTQNVLYENQKLIANQFNSAIGKIQDSLSSTASALGKLQDVVNQNAQALNTLVKQLSSNFGAISSVLNDILSRLDKVEAEVQIDRLITGRLQSLQTYVTQQLIRAAEIRASANLAATKMSECVLGQSKRVDFCGKGYHLMSFPQSAPHGVVFLHVTYVPAQEKNFTCAPAICHDGKAHFPREGVFVSNGTHWFVTQRNFYEPQIITTDNTFVSGNCDVVIGIVNNTVYDPLQPELDSFKEELDKYFKNHTSPDVDLGDISGINASVVNIQKEIDRLNEVAKNLNESLIDLQELGKYEQYIK

SEQ ID NO: 2011 - protein, 1210 aa, Artificial Sequence
  SARS-CoV-2/India/1-27/2020__EPI_ISL_413522 spike protein (1-1210)(I711C_T1076C)
MFVFLVLLPLVSSQCVNLTTRTQLPPAYTNSFTRGVYYPDKVFRSSVLHSTQDLFLPFFSNVTWFHAIHVSGTNGTKRFDNPVLPFNDGVYFASTEKSNIIRGWIFGTTLDSKTQSLLIVNNATNVVIKVCEFQFCNDPFLGVYHKNNKSWMESEFRVYSSANNCTFEYVSQPFLMDLEGKQGNFKNLREFVFKNIDGYFKIYSKHTPINLVRDLPQGFSALEPLVDLPIGINITRFQTLLALHRSYLTPGDSSSGWTAGAAAYYVGYLQPRTFLLKYNENGTITDAVDCALDPLSETKCTLKSFTVEKGIYQTSNFRVQPTESIVRFPNITNLCPFGEVFNATRFASVYAWNRKRISNCVADYSVLYNSASFSTFKCYGVSPTKLNDLCFTNVYADSFVIRGDEVIQIAPGQTGKIADYNYKLPDDFTGCVIAWNSNNLDSKVGGNYNYLYRLFRKSNLKPFERDISTEIYQAGSTPCNGVEGFNCYFPLQSYGFQPTNGVGYQPYRVVVLSFELLHAPATVCGPKKSTNLVKNKCVNFNFNGLTGTGVLTESNKKFLPFQQFGRDIADTTDAVRDPQTLEILDITPCSFGGVSVITPGTNTSNQVAVLYQDVNCTEVPVAIHADQLTPTWRVYSTGSNVFQTRAGCLIGAEHVNNSYECDIPIGAGICASYQTQTNSPRRARSVASQSIIAYTMSLGAENSVAYSNNSCAIPTNFTISVTTEILPVSMTKTSVDCTMYICGDSTECSNLLLQYGSFCTQLNRALTGIAVEQDKNTQEVFAQVKQIYKTPPIKDFGGFNFSQILPDPSKPSKRSFIEDLLFNKVTLADAGFIKQYGDCLGDIAARDLICAQKFNGLTVLPPLLTDEMIAQYTSALLAGTITSGWTFGAGAALQIPFAMQMAYRFNGIGVTQNVLYENQKLIANQFNSAIGKIQDSLSSTASALGKLQDVVNQNAQALNTLVKQLSSNFGAISSVLNDILSRLDKVEAEVQIDRLITGRLQSLQTYVTQQLIRAAEIRASANLAATKMSECVLGQSKRVDFCGKGYHLMSFPQSAPHGVVFLHVTYVPAQEKNFTCAPAICHDGKAHFPREGVFVSNGTHWFVTQRNFYEPQIITTDNTFVSGNCDVVIGIVNNTVYDPLQPELDSFKEELDKYFKNHTSPDVDLGDISGINASVVNIQKEIDRLNEVAKNLNESLIDLQELGKYEQYIK

SEQ ID NO: 2012 - protein, 1205 aa, Artificial Sequence
  SARS-CoV-2/pangolin/Guangxi/P4L/2017__EPI_ISL_410538 spike protein (1-1205)(I706C_T1071C)
MFVFLFVLPLVSSQCVNLTTRTGIPPGYTNSSTRGVYYPDKVFRSSILHLTQDLFLPFFSNVTWFNTINYQGGFKKFDNPVLPFNDGVYFASTEKSNIIRGWIFGTTLDARTQSLLIVNNATNVVIKVCEFQFCTDPFLGVYYHNNNKTWVENEFRVYSSANNCTFEYISQPFLMDLEGKQGNFKNLREFVFKNVDGYFKIYSKHTPIDLVRDLPRGFAALEPLVDLPIGINITRFQTLLALHRSYLTPGNLESGWTTGAAAYYVGYLQQRTFLLSYNQNGTITDAVDCSLDPLSETKCTLKSLTVEKGIYQTSNFRVQPTISIVRFPNITNLCPFGEVFNASKFASVYAWNRKRISNCVADYSVLYNSTSFSTFKCYGVSPTKLNDLCFTNVYADSFVVKGDEVRQIAPGQTGVIADYNYKLPDDFTGCVIAWNSVKQDALTGGNYGYLYRLFRKSKLKPFERDISTEIYQAGSTPCNGQVGLNCYYPLERYGFHPTTGVNYQPFRVVVLSFELLNGPATVCGPKLSTTLVKDKCVNFNFNGLTGTGVLTTSKKQFLPFQQFGRDISDTTDAVRDPQTLEILDITPCSFGGVSVITPGTNTSNQVAVLYQDVNCTEVPMAIHAEQLTPAWRVYSAGANVFQTRAGCLVGAEHVNNSYECDIPVGAGICASYHSMSSLRSVNQRSIIAYTMSLGAENSVAYSNNSCAIPTNFTISVTTEILPVSMTKTSVDCTMYICGDSIECSNLLLQYGSFCTQLNRALTGIAVEQDKNTQEVFAQVKQIYKTPPIKDFGGFNFSQILPDPSKPSKRSFIEDLLFNKVTLADAGFIKQYGDCLGDIAARDLICAQKFNGLTVLPPLLTDEMIAQYTSALLAGTITSGWTFGAGAALQIPFAMQMAYRFNGIGVTQNVLYENQKLIANQFNSAIGKIQDSLSSTASALGKLQDVVNQNAQALNTLVKQLSSNFGAISSVLNDILSRLDKVEAEVQIDRLITGRLQSLQTYVTQQLIRAAEIRASANLAATKMSECVLGQSKRVDFCGKGYHLMSFPQSAPHGVVFLHVTYVPAQEKNFTCAPAICHEGKAHFPREGVFVSNGTHWFITQRNFYEPQIITTDNTFVSGSCDVVIGIVNNTVYDPLQPELDSFKEELDKYFKNHTSPDVDLGDISGINASVVNIQKEIDRLNEVAKNLNESPIDLQELGKYEQYIK

SEQ ID NO: 2013 - protein, 1205 aa, Artificial Sequence
  SARS-CoV-2/pangolin/Guangxi/P5L/2017__EPI_ISL_410540 spike protein (1-1205)(I706C_T1071C)
MFVFLFVLPLVSSQCVNLTTRTGIPPGYTNSSTRGVYYPDKVFRSSILHLTQDLFLPFFSNVTWFNTINYQGGFKKFDNPVLPFNDGVYFASTEKSNIIRGWIFGTTLDARTQSLLIVNNATNVVIKVCEFQFCTDPFLGVYYHNNNKTWVENEFRVYSSANNCTFEYISQPFLMDLEGKQGNFKNLREFVFKNVDGYFKIYSKHTPIDLVRDLPRGFAALEPLVDLPIGINITRFQTLLALHRSYLTPGKLESGWTTGAAAYYVGYLQQRTFLLSYNQNGTITDAVDCSLDPLSETKCTLKSLTVEKGIYQTSNFRVQPTISIVRFPNITNLCPFGEVFNASKFASVYAWNRKRISNCVADYSVLYNSTSFSTFKCYGVSPTKLNDLCFTNVYADSFVVKGDEVRQIAPGQTGVIADYNYKLPDDFTGCVIAWNSVKQDALTGGNYGYLYRLFRKSKLKPFERDISTEIYQAGSTPCNGQVGLNCYYPLERYGFHPTTGVNYQPFRVVVLSFELLNGPATVCGPKLSTTLVKDKCVNFNFNGLTGTGVLTTSKKQFLPFQQFGRDISDTTDAVRDPQTLEILDITPCSFGGVSVITPGTNTSNQVAVLYQDVNCTEVPMAIHAEQLTPAWRVYSAGANVFQTRAGCLVGAEHVNNSYECDIPVGAGICASYHSMSSFRSVNQRSIIAYTMSLGAENSVAYSNNSCAIPTNFTISVTTEILPVSMTKTSVDCTMYICGDSIECSNLLLQYGSFCTQLNRALTGIAVEQDKNTQEVFAQVKQIYKTPPIKDFGGFNFSQILPDPSKPSKRSFIEDLLFNKVTLADAGFIKQYGDCLGDIAARDLICAQKFNGLTVLPPLLTDEMIAQYTSALLAGTITSGWTFGAGAALQIPFAMQMAYRFNGIGVTQNVLYENQKLIANQFNSAIGKIQDSLSSTASALGKLQDVVNQNAQALNTLVKQLSSNFGAISSVLNDILSRLDKVEAEVQIDRLITGRLQSLQTYVTQQLIRAAEIRASANLAATKMSECVLGQSKRVDFCGKGYHLMSFPQSAPHGVVFLHVTYVPAQEKNFTCAPAICHEGKAHFPREGVFVSNGTHWFITQRNFYEPQIITTDNTFVSGSCDVVIGIVNNTVYDPLQPELDSFKEELDKYFKNHTSPDVDLGDISGINASVVNIQKEIDRLNEVAKNLNESLIDLQELGKYEQYIK

SEQ ID NO: 2014 - protein, 1205 aa, Artificial Sequence
  SARS-CoV-2/pangolin/Guangxi/P5E/2017__EPI_ISL_410541 spike protein (1-1205)(I706C_T1071C)
MFVFLFVLPLVSSQCVNLTTRTGIPPGYTNSSTRGVYYPDKVFRSSILHLTQDLFLPFFSNVTWFNTITYQGGSKKFDNPVLPFNDGVYFASTEKSNIIRGWIFGTTLDARTQSLLIVNNATNVVIKVCEFQFCTDPFLGVYYHNNNKTWVENEFRVYSSANNCTFEYISQPFLMDLEGKQGNFKNLREFVFKNVDGYFKIYSKHTPIDLVRDLPRGFAALEPLVDLPIGINITRFQTLLALHRSYLTPGKLESGWTTGAAAYYVGYLQQRTFLLSYNQNGTITDAVDCSLDPLSETKCTLKSLTVEKGIYQTSNFRVQPTISIVRFPNITNLCPFGEVFNASKFASVYAWNRKRISNCVADYSVLYNSTSFSTFKCYGVSPTKLNDLCFTNVYADSFVVKGDEVRQIAPGQTGVIADYNYKLPDDFTGCVIAWNSVKQDALTGDNYGYLYRLFRKSKLKPFERDISTEIYQAGSTPCNGQVGLNCYYPLERYGFHPTTGVNYQPFRVVVLSFELLNGPATVCGPKLSTTLVKDKCVNFNFNGLTGTGVLTTSKKQFLPFQQFGRDISDTTDAVRDPQTLEILDITPCSFGGVSVITPGTNTSNQVAVLYQDVNCTEVPMAIHAEQLTPAWRVYSAGANVFQTRAGCLVGAEHVNNSYECDIPVGAGICASYHSMSSFRSVNQRSIIAYTMSLGAENSVAYSNNSCAIPTNFTISVTTEILPVSMTKTSVDCTMYICGDSIECSNLLLQYGSFCTQLNRALTGIAVEQDKNTQEVFAQVKQIYKTPPIKDFGGFNFSQILPDPSKPSKRSFIEDLLFNKVTLADAGFIKQYGDCLGDIAARDLICAQKFNGLTVLPPLLTDEMIAQYTSALLAGTITSGWTFGAGAALQIPFAMQMAYRFNGIGVTQNVLYENQKLIANQFNSAIGKIQDSLSSTASALGKLQDVVNQNAQALNTLVKQLSSNFGAISSVLNDILSRLDKVEAEVQIDRLITGRLQSLQTYVTQQLIRAAEIRASANLAATKMSECVLGQSKRVDFCGKGYHLMSFPQSAPHGVVFLHVTYVPAQEKNFTCAPAICHEGKAHFPREGVFVSNGTHWFITQRNFYEPQIITTDNTFVSGSCDVVIGIVNNTVYDPLQPELDSFKEELDKYFKNHTSPDVDLGDISGINASVVNIQKEIDRLNEVAKNLNESLIDLQELGKYEQYIK

SEQ ID NO: 2015 - protein, 1203 aa, Artificial Sequence
  SARS-CoV-2/pangolin/Guangxi/P1E/2017__EPI_ISL_410539 spike protein (1-1203)(I704C_T1069C)
MFVFLFVLPLVSSQCVNLTTRTGIQPGYTNSSTRGVYYPDKVFRSSILHLTQDLFLPFFSNVTWFNTINYQGGFKKFDNPVLPFNDGVYFASTEKSNIIRGWIFGTTLDARTQSLLIVNNATNVVIKVCEFQFCTDPFLGVYYHNNNKTWVENEFRVYSSANNCTFEYISQPFLMDLEGKQGNFKNLREFVFKNVDGYFKIYSKHTPIDLVRDLPRGFAALEPLVDLPIGINITRFQTLLALHRSYLTPGKLESGWTTGAAAYYVGYLQQRTFLLSYNQNGTITDAVDCSLDPLSETKCTLKSLTVEKGIYQTSNFRVQPTISIVRFPNITNLCPFGEVFNASKFASVYAWNRKRISNCVADYSVLYNSTSFSTFKCYGVSPTKLNDLCFTNVYADSFVVKGDEVRQIAPGQTGVIADYNYKLPDDFTGCVIAWNSVKQDALTGGNYLYRLFRKSKLKPFERDISTEIYQAGSTPCNGQVGLNCYYPLERYGFHPTTGVNYQPFRVVVLSFELLNGPATVCGPKLSTTLVKDKCVNFNFNGLTGTGVLTTSKKQFLPFQQFGRDISDTTDAVRDPQTLEILDITPCSFGGVSVITPGTNTSNQVAVLYQDVNCTEVPMAIHAEQLTPAWRVYSAGANVFQTRAGCLVGAEHVNNSYECDIPVGAGICASYHSMSSLRSVNQRSIIAYTMSLGAENSVAYSNNSCAIPTNFTISVTTEILPVSMTKTSVDCTMYICGDSIECSNLLLQYGSFCTQLNRALTGIAVEQDKNTQEVFAQVKQIYKTPPIKDFGGFNFSQILPDPSKPSKRSFIEDLLFNKVTLADAGFIKQYGDCLGDIAARDLICAQKFNGLTVLPPLLTDEMIAQYTSALLAGTITSGWTFGAGAALQIPFAMQMAYRFNGIGVTQNVLYENQKLIANQFNSAIGKIQDSLSSTASALGKLQDVVNQNAQALNTLVKQLSSNFGAISSVLNDILSRLDKVEAEVQIDRLITGRLQSLQTYVTQQLIRAAEIRASANLAATKMSECVLGQSKRVDFCGKGYHLMSFPQSAPHGVVFLHVTYVPAQEKNFTCAPAICHEGKAHFPREGVFVSNGTHWFITQRNFYEPQIITTDNTFVSGSCDVVIGIVNNTVYDPLQPELDSFKEELDKYFKNHTSPDVDLGDISGINASVVNIQKEIDRLNEVAKNLNESLIDLQELGKYEQYIK

SEQ ID NO: 2016 - protein, 1211 aa, Artificial Sequence
  SARS-CoV-2/Wuhan/WIV05/2019__EPI_ISL_402128 spike protein (1-1211)(I714C_Y1110C)
MFVFLVLLPLVSSQCVNLTTRTQLPPAYTNSFTRGVYYPDKVFRSSVLHSTQDLFLPFFSNVTWFHAIHVSGTNGTKRFDNPVLPFNDGVYFASTEKSNIIRGWIFGTTLDSKTQSLLIVNNATNVVIKVCEFQFCNDPFLGVYYHKNNKSWMESEFRVYSSANNCTFEYVSQPFLMDLEGKQGNFKNLREFVFKNIDGYFKIYSKHTPINLVRDLPQGFSALEPLVDLPIGINITRFQTLLALHRSYLTPGDSSSGWTAGAAAYYVGYLQPRTFLLKYNENGTITDAVDCALDPLSETKCTLKSFTVEKGIYQTSNFRVQPTESIVRFPNITNLCPFGEVFNATRFASVYAWNRKRISNCVADYSVLYNSASFSTFKCYGVSPTKLNDLCFTNVYADSFVIRGDEVRQIAPGQTGKIADYNYKLPDDFTGCVIAWNSNNLDSKVGGNYNYLYRLFRKSNLKPFERDISTEIYQAGSTPCNGVEGFNCYFPLQSYGFQPTNGVGYQPYRVVVLSFELLHAPATVCGPKKSTNLVKNKCVNFNFNGLTGTGVLTESNKKFLPFQQFGRDIADTTDAVRDPQTLEILDITPCSFGGVSVITPGTNTSNQVAVLYQDVNCTEVPVAIHADQLTPTWRVYSTGSNVFQTRAGCLIGAEHVNNSYECDIPIGAGICASYQTQTNSPRRARSVASQSIIAYTMSLGAENSVAYSNNSIACPTNFTISVTTEILPVSMTKTSVDCTMYICGDSTECSNLLLQYGSFCTQLNRALTGIAVEQDKNTQEVFAQVKQIYKTPPIKDFGGFNFSQILPDPSKPSKRSFIEDLLFNKVTLADAGFIKQYGDCLGDIAARDLICAQKFNGLTVLPPLLTDEMIAQYTSALLAGTITSGWTFGAGAALQIPFAMQMAYRFNGIGVTQNVLYENQKLIANQFNSAIGKIQDSLSSTASALGKLQDVVNQNAQALNTLVKQLSSNFGAISSVLNDILSRLDKVEAEVQIDRLITGRLQSLQTYVTQQLIRAAEIRASANLAATKMSECVLGQSKRVDFCGKGYHLMSFPQSAPHGVVFLHVTYVPAQEKNFTTAPAICHDGKAHFPREGVFVSNGTHWFVTQRNFCEPQIITTDNTFVSGNCDVVIGIVNNTVYDPLQPELDSFKEELDKYFKNHTSPDVDLGDISGINASVVNIQKEIDRLNEVAKNLNESLIDLQELGKYEQYIK

SEQ ID NO: 2017 - protein, 1207 aa, Artificial Sequence
  SARS-CoV-2/bat/Yunnan/RaTG13/2013__EPI_ISL_402131 spike protein (1-1207)(I710C_Y1106C)
MFVFLVLLPLVSSQCVNLTTRTQLPPAYTNSSTRGVYYPDKVFRSSVLHLTQDLFLPFFSNVTWFHAIHVSGTNGIKRFDNPVLPFNDGVYFASTEKSNIIRGWIFGTTLDSKTQSLLIVNNATNVVIKVCEFQFCNDPFLGVYYHKNNKSWMESEFRVYSSANNCTFEYVSQPFLMDLEGKQGNFKNLREFVFKNIDGYFKIYSKHTPINLVRDLPPGFSALEPLVDLPIGINITRFQTLLALHRSYLTPGDSSSGWTAGAAAYYVGYLQPRTFLLKYNENGTITDAVDCALDPLSETKCTLKSFTVEKGIYQTSNFRVQPTDSIVRFPNITNLCPFGEVFNATTFASVYAWNRKRISNCVADYSVLYNSTSFSTFKCYGVSPTKLNDLCFTNVYADSFVITGDEVRQIAPGQTGKIADYNYKLPDDFTGCVIAWNSKHIDAKEGGNFNYLYRLFRKANLKPFERDISTEIYQAGSKPCNGQTGLNCYYPLYRYGFYPTDGVGHQPYRVVVLSFELLNAPATVCGPKKSTNLVKNKCVNFNFNGLTGTGVLTESNKKFLPFQQFGRDIADTTDAVRDPQTLEILDITPCSFGGVSVITPGTNASNQVAVLYQDVNCTEVPVAIHADQLTPTWRVYSTGSNVFQTRAGCLIGAEHVNNSYECDIPIGAGICASYQTQTNSRSVASQSIIAYTMSLGAENSVAYSNNSIACPTNFTISVTTEILPVSMTKTSVDCTMYICGDSTECSNLLLQYGSFCTQLNRALTGIAVEQDKNTQEVFAQVKQIYKTPPIKDFGGFNFSQILPDPSKPSKRSFIEDLLFNKVTLADAGFIKQYGDCLGDIAARDLICAQKFNGLTVLPPLLTDEMIAQYTSALLAGTITSGWTFGAGAALQIPFAMQMAYRFNGIGVTQNVLYENQKLIANQFNSAIGKIQDSLSSTASALGKLQDVVNQNAQALNTLVKQLSSNFGAISSVLNDILSRLDKVEAEVQIDRLITGRLQSLQTYVTQQLIRAAEIRASANLAATKMSECVLGQSKRVDFCGKGYHLMSFPQSAPHGVVFLHVTYVPAQEKNFTTAPAICHDGKAHFPREGVFVSNGTHWFVTQRNFCEPQIITTDNTFVSGSCDVVIGIVNNTVYDPLQPELDSFKEELDKYFKNHTSPDVDLGDISGINASVVNIQKEIDRLNEVAKNLNESLIDLQELGKYEQYIK

SEQ ID NO: 2018 - protein, 1211 aa, Artificial Sequence
  SARS-CoV-2/Wuhan/HBCDC-HB-01/2019__EPI_ISL_402132 spike protein (1-1211)(I714C_Y1110C)
MFVFLVLLPLVSSQCVNLTTRTQLPPAYTNSITRGVYYPDKVFRSSVLHSTQDLFLPFFSNVTWFHAIHVSGTNGTKRFDNPVLPFNDGVYFASTEKSNIIRGWIFGTTLDSKTQSLLIVNNATNVVIKVCEFQFCNDPFLGVYYHKNNKSWMESEFRVYSSANNCTFEYVSQPFLMDLEGKQGNFKNLREFVFKNIDGYFKIYSKHTPINLVRDLPQGFSALEPLVDLPIGINITRFQTLLALHRSYLTPGDSSSGWTAGAAAYYVGYLQPRTFLLKYNENGTITDAVDCALDPLSETKCTLKSFTVEKGIYQTSNFRVQPTESIVRFPNITNLCPFGEVFNATRFASVYAWNRKRISNCVADYSVLYNSASFSTFKCYGVSPTKLNDLCFTNVYADSFVIRGDEVRQIAPGQTGKIADYNYKLPDDFTGCVIAWNSNNLDSKVGGNYNYLYRLFRKSNLKPFERDISTEIYQAGSTPCNGVEGFNCYFPLQSYGFQPTNGVGYQPYRVVVLSFELLHAPATVCGPKKSTNLVKNKCVNFNFNGLTGTGVLTESNKKFLPFQQFGRDIADTTDAVRDPQTLEILDITPCSFGGVSVITPGTNTSNQVAVLYQDVNCTEVPVAIHADQLTPTWRVYSTGSNVFQTRAGCLIGAEHVNNSYECDIPIGAGICASYQTQTNSPRRARSVASQSIIAYTMSLGAENSVAYSNNSIACPTNFTISVTTEILPVSMTKTSVDCTMYICGDSTECSNLLLQYGSFCTQLNRALTGIAVEQDKNTQEVFAQVKQIYKTPPIKDFGGFNFSQILPDPSKPSKRSFIEDLLFNKVTLADAGFIKQYGDCLGDIAARDLICAQKFNGLTVLPPLLTDEMIAQYTSALLAGTITSGWTFGAGAALQIPFAMQMAYRFNGIGVTQNVLYENQKLIANQFNSAIGKIQDSLSSTASALGKLQDVVNQNAQALNTLVKQLSSNFGAISSVLNDILSRLDKVEAEVQIDRLITGRLQSLQTYVTQQLIRAAEIRASANLAATKMSECVLGQSKRVDFCGKGYHLMSFPQSAPHGVVFLHVTYVPAQEKNFTTAPAICHDGKAHFPREGVFVSNGTHWFVTQRNFCEPQIITTDNTFVSGNCDVVIGIVNNTVYDPLQPELDSFKEELDKYFKNHTSPDVDLGDISGINASVVNIQKEIDRLNEVAKNLNESLIDLQELGKYEQYIK

SEQ ID NO: 2019 - protein, 1211 aa, Artificial Sequence
  SARS-CoV-2/Guangdong/20SF028/2020__EPI_ISL_403936 spike protein (1-1211)(I714C_Y1110C)
MFVFLVLLPLVSSQCVNLTTRTQLPPAYTNSFTRGVYYPDKVFRSSVLYSTQDLFLPFFSNVTWFHAIHVSGTNGTKRFDNPVLPFNDGVYFASTEKSNIIRGWIFGTTLDSKTQSLLIVNNATNVVIKVCEFQFCNDPFLGVYYHKNNKSWMESEFRVYSSANNCTFEYVSQPFLMDLEGKQGNFKNLREFVFKNIDGYFKIYSKHTPINLVRDLPQGFSALEPLVDLPIGINITRFQTLLALHRSYLTPGDSSSGWTAGAAAYYVGYLQPRTFLLKYNENGTITDAVDCALDPLSETKCTLKSFTVEKGIYQTSNFRVQPTESIVRFPNITNLCPFGEVFNATRFASVYAWNRKRISNCVADYSVLYNSASFSTFKCYGVSPTKLNDLCFTNVYADSFVIRGDEVRQIAPGQTGKIADYNYKLPDDFTGCVIAWNSNNLDSKVGGNYNYLYRLFRKSNLKPFERDISTEIYQAGSTPCNGVEGFNCYFPLQSYGFQPTNGVGYQPYRVVVLSFELLHAPATVCGPKKSTNLVKNKCVNFNFNGLTGTGVLTESNKKFLPFQQFGRDIADTTDAVRDPQTLEILDITPCSFGGVSVITPGTNTSNQVAVLYQDVNCTEVPVAIHADQLTPTWRVYSTGSNVFQTRAGCLIGAEHVNNSYECDIPIGAGICASYQTQTNSPRRARSVASQSIIAYTMSLGAENSVAYSNNSIACPTNFTISVTTEILPVSMTKTSVDCTMYICGDSTECSNLLLQYGSFCTQLNRALTGIAVEQDKNTQEVFAQVKQIYKTPPIKDFGGFNFSQILPDPSKPSKRSFIEDLLFNKVTLADAGFIKQYGDCLGDIAARDLICAQKFNGLTVLPPLLTDEMIAQYTSALLAGTITSGWTFGAGAALQIPFAMQMAYRFNGIGVTQNVLYENQKLIANQFNSAIGKIQDSLSSTASALGKLQDVVNQNAQALNTLVKQLSSNFGAISSVLNDILSRLDKVEAEVQIDRLITGRLQSLQTYVTQQLIRAAEIRASANLAATKMSECVLGQSKRVDFCGKGYHLMSFPQSAPHGVVFLHVTYVPAQEKNFTTAPAICHDGKAHFPREGVFVSNGTHWFVTQRNFCEPQIITTDNTFVSGNCDVVIGIVNNTVYDPLQPELDSFKEELDKYFKNHTSPDVDLGDISGINASVVNIQKEIDRLNEVAKNLNESLIDLQELGKYEQYIK

SEQ ID NO: 2020 - protein, 1211 aa, Artificial Sequence
  SARS-CoV-2/Shenzhen/SZTH-001/2020__EPI_ISL_406592 spike protein (1-1211)(I714C_Y1110C)
MFVFLVLLPLVSSQCVNLTTRTQLPPAYTNSFTRGVYYPDKVFRSSVLHSTQDLFLPFFSNVTWFHAIHVSGTNGTKRFDNPVLPFNDGVYFASTEKSNIIRGWIFGTTLDSKTQSLLIVNNATNVVIKVCEFQFCNDPFLGVYYHKNNKSWMESEFRVYSSANNCTFEYVSQPFLMDLEGKQGNFKNLREFVFKNIDGYFKIYSKHTPINLVRDLPQGFSALEPLVDLPIGINITRFQTLLALHRSYLTPGDSSSGWTAGAAAYYVGYLQPRTFLLKYNENGTITDAVDCALDPLSETKCTLKSFTVEKGIYQTSNFRVQPTESIVRFPNITNLCPFGEVFNATRFASVYAWNRKRISNCVADYSVLYNSASFSTFKCYGVSPTKLNDLCFTNVYADSFVIRGDEVRQIAPGQTGKIADYNYKLPDDFTGCVIAWNSNNLDSKVGGNYNYLYRLFRKSNLKPFERDISTEIYQAGSTPCNGVEGFNCYFPLQSYGFQPTNGVGYQPYRVVVLSFELLHAPATVCGPKKSTNLVKNKCVNFNFNGLTGTGVLTESNKKFLPFQQFGRDIADTTDAVRDPQTLEILDITPCSFGGVSVITPGTNTSNQVAVLYQDVNCTEVPVAIHADQLTPTWRVYSTGSNVFQTRAGCLIGAEHVNNSYECDIPIGAGICASYQTQTNSPRRARSVASQSIIAYTMSLGAENSVAYSNNSIACPTNFTISVTTEILPVSMTKTSVDCTMYICGDSTECSNLLLQYGSFCTQLNRALTGIAVEQDKNTQEVFAQVKQIYKTPPIKDFGGFNFSQILPDPSKPSKRSFIEDLLFNKVTLADAGFIKQYGDCLGDIAARDLICAQKFNGLTVLPPLLTDEMIAQYTSALLAGTITSGWTFGAGAALQIPFAMQMAYRFNGIGVTQNVLYENQKLIANQFNSAIGKIQDSLSSTASALGKLQDVVNQNAQALNTLVKQLSSNFGAISSVLNDILSRLDKVEAEVQIDRLITGRLQSLQTYVTQQLIRAAEIRASANLAATKMSECVLGQSKRVDFCGKGYHLMSFPQSAPHGVVFLHVTYVPAQEKNFTTAPAICHDGKAHFPREGVFVSNGTHWFVTQRNFCEPQIITTDNTFVSGNCDVLIGIVNNTVYDPLQPELDSFKEELDKYFKNHTSPDVDLGDISGINASVVNIQKEIDRLNEVAKNLNESLIDLQELGKYEQYIK

SEQ ID NO: 2021 - protein, 1211 aa, Artificial Sequence
  SARS-CoV-2/Shenzhen/SZTH-004/2020__EPI_ISL_406595 spike protein (1-1211)(I714C_Y1110C)
MFVFLVLLPLVSSQCVNLTTRTQLPPAYTNSFTRGVYYPDKVFRSSVLHSTQDLFLPFFSNVTWFHAIHVSGTNGTKRFDNPVLPFNDGVYFASTEKSNIIRGWIFGTTLDSKTQSLLIVNNATNVVIKVCEFQFCNDPFLGVYYHKNNKSWMESEFRVYSSANNCTFEYVSQPFLMDLEGKQGNFKNLREFVFKNIDGYFKIYSKHTPINLVRDLPQGFSALEPLVDLPIGINITRFQTLLALHRSYLTPGDSSSGWTAGAAAYYVGYLQPRTFLLKYNENGTITDAVDCALDPLSETKCTLKSFTVEKGIYQTSNFRVQPTESIVRFPNITNLCPFGEVFNATRFASVYAWDRKRISNCVAYYSVLYNSASFSTFKCYGVSPTKLNDLCFTNVYADSFVIRGDEVRQIAPGQTGKIADYNYKLPDDFTGCVIAWNSNNLDSKVGGNYNYLYRLFRKSNLKPFERDISTEIYQAGSTPCNGVEGFNCYFPLQSYGFQPTNGVGYQPYRVVVLSFELLHAPATVCGPKKSTNLVKNKCVNFNFNGLTGTGVLTESNKKFLPFQQFGRDIADTTDAVRDPQTLEILDITPCSFGGVSVITPGTNTSNQVAVLYQDVNCTEVPVAIHADQLTPTWRVYSTGSNVFQTRAGCLIGAEHVNNSYECDIPIGAGICASYQTQTNSPRRARSVASQSIIAYTMSLGAENSVAYSNNSIACPTNFTISVTTEILPVSMTKTSVDCTMYICGDSTECSNLLLQYGSFCTQLNRALTGIAVEQDKNTQEVFAQVKQIYKTPPIKDFGGFNFSQILPDPSKPSKRSFIEDLLFNKVTLADAGFIKQYGDCLGDIAARDLICAQKFNGLTVLPPLLTDEMIAQYTSALLAGTITSGWTFGAGAALQIPFAMQMAYRFNGIGVTQNVLYENQKLIANQFNSAIGKIQDSLSSTASALGKLQDVVNQNAQALNTLVKQLSSNFGAISSVLNDILSRLDKVEAEVQIDRLITGRLQSLQTYVTQQLIRAAEIRASANLAATKMSECVLGQSKRVDFCGKGYHLMSFPQSAPHGVVFLHVTYVPAQEKNFTTAPAICHDGKAHFPREGVFVSNGTHWFVTQRNFCEPQIITTDNTFVSGNCDVVIGIVNNTVYDPLQPELDSFKEELDKYFKNHTSPDVDLGDISGINASVVNIQKEIDRLNEVAKNLNESLIDLQELGKYEQYIK

SEQ ID NO: 2022 - protein, 1211 aa, Artificial Sequence
  SARS-CoV-2/France/IDF0372/2020__EPI_ISL_406596 spike protein (1-1211)(I714C_Y1110C)
MFVFLVLLPLVSSQCVNLTTRTQLPPAYTNSFTRGVYYPDKVFRSSVLHSTQDLFLPFFSNVTWFHAIHVSGTNGTKRFDNPVLPFNDGVYFASTEKSNIIRGWIFGTTLDSKTQSLLIVNNATNVVIKVCEFQFCNDPFLGVYYHKNNKSWMESEFRVYSSANNCTFEYVSQPFLMDLEGKQGNFKNLREFVFKNIDGYFKIYSKHTPINLVRDLPQGFSALEPLVDLPIGINITRFQTLLALHRSYLTPGDSSSGWTAGAAAYYVGYLQPRTFLLKYNENGTITDAVDCALDPLSETKCTLKSFTVEKGIYQTSNFRVQPTESIVRFPNITNLCPFGEVFNATRFASVYAWNRKRISNCVADYSFLYNSASFSTFKCYGVSPTKLNDLCFTNVYADSFVIRGDEVRQIAPGQTGKIADYNYKLPDDFTGCVIAWNSNNLDSKVGGNYNYLYRLFRKSNLKPFERDISTEIYQAGSTPCNGVEGFNCYFPLQSYGFQPTNGVGYQPYRVVVLSFELLHAPATVCGPKKSTNLVKNKCVNFNFNGLTGTGVLTESNKKFLPFQQFGRDIADTTDAVRDPQTLEILDITPCSFGGVSVITPGTNTSNQVAVLYQDVNCTEVPVAIHADQLTPTWRVYSTGSNVFQTRAGCLIGAEHVNNSYECDIPIGAGICASYQTQTNSPRRARSVASQSIIAYTMSLGAENSVAYSNNSIACPTNFTISVTTEILPVSMTKTSVDCTMYICGDSTECSNLLLQYGSFCTQLNRALTGIAVEQDKNTQEVFAQVKQIYKTPPIKDFGGFNFSQILPDPSKPSKRSFIEDLLFNKVTLADAGFIKQYGDCLGDIAARDLICAQKFNGLTVLPPLLTDEMIAQYTSALLAGTITSGWTFGAGAALQIPFAMQMAYRFNGIGVTQNVLYENQKLIANQFNSAIGKIQDSLSSTASALGKLQDVVNQNAQALNTLVKQLSSNFGAISSVLNDILSRLDKVEAEVQIDRLITGRLQSLQTYVTQQLIRAAEIRASANLAATKMSECVLGQSKRVDFCGKGYHLMSFPQSAPHGVVFLHVTYVPAQEKNFTTAPAICHDGKAHFPREGVFVSNGTHWFVTQRNFCEPQIITTDNTFVSGNCDVVIGIVNNTVYDPLQPELDSFKEELDKYFKNHTSPDVDLGDISGINASVVNIQKEIDRLNEVAKNLNESLIDLQELGKYEQYIK

SEQ ID NO: 2023 - protein, 1211 aa, Artificial Sequence
  SARS-CoV-2/Australia/VIC01/2020__EPI_ISL_406844 spike protein (1-1211)(I714C_Y1110C)
MFVFLVLLPLVSSQCVNLTTRTQLPPAYTNSFTRGVYYPDKVFRSSVLHSTQDLFLPFFSNVTWFHAIHVSGTNGTKRFDNPVLPFNDGVYFASTEKSNIIRGWIFGTTLDSKTQSLLIVNNATNVVIKVCEFQFCNDPFLGVYYHKNNKSWMESEFRVYSSANNCTFEYVSQPFLMDLEGKQGNFKNLREFVFKNIDGYFKIYSKHTPINLVRDLPQGFSALEPLVDLPIGINITRFQTLLALHRRYLTPGDSSSGWTAGAAAYYVGYLQPRTFLLKYNENGTITDAVDCALDPLSETKCTLKSFTVEKGIYQTSNFRVQPTESIVRFPNITNLCPFGEVFNATRFASVYAWNRKRISNCVADYSVLYNSASFSTFKCYGVSPTKLNDLCFTNVYADSFVIRGDEVRQIAPGQTGKIADYNYKLPDDFTGCVIAWNSNNLDSKVGGNYNYLYRLFRKSNLKPFERDISTEIYQAGSTPCNGVEGFNCYFPLQSYGFQPTNGVGYQPYRVVVLSFELLHAPATVCGPKKSTNLVKNKCVNFNFNGLTGTGVLTESNKKFLPFQQFGRDIADTTDAVRDPQTLEILDITPCSFGGVSVITPGTNTSNQVAVLYQDVNCTEVPVAIHADQLTPTWRVYSTGSNVFQTRAGCLIGAEHVNNSYECDIPIGAGICASYQTQTNSPRRARSVASQSIIAYTMSLGAENSVAYSNNSIACPTNFTISVTTEILPVSMTKTSVDCTMYICGDSTECSNLLLQYGSFCTQLNRALTGIAVEQDKNTQEVFAQVKQIYKTPPIKDFGGFNFSQILPDPSKPSKRSFIEDLLFNKVTLADAGFIKQYGDCLGDIAARDLICAQKFNGLTVLPPLLTDEMIAQYTSALLAGTITSGWTFGAGAALQIPFAMQMAYRFNGIGVTQNVLYENQKLIANQFNSAIGKIQDSLSSTASALGKLQDVVNQNAQALNTLVKQLSSNFGAISSVLNDILSRLDKVEAEVQIDRLITGRLQSLQTYVTQQLIRAAEIRASANLAATKMSECVLGQSKRVDFCGKGYHLMSFPQSAPHGVVFLHVTYVPAQEKNFTTAPAICHDGKAHFPREGVFVSNGTHWFVTQRNFCEPQIITTDNTFVSGNCDVVIGIVNNTVYDPLQPELDSFKEELDKYFKNHTSPDVDLGDISGINASVVNIQKEIDRLNEVAKNLNESLIDLQELGKYEQYIK

SEQ ID NO: 2024 - protein, 1211 aa, Artificial Sequence
  SARS-CoV-2/Germany/BavPat1/2020__EPI_ISL_406862 spike protein (1-1211)(I714C_Y1110C)
MFVFLVLLPLVSSQCVNLTTRTQLPPAYTNSFTRGVYYPDKVFRSSVLHSTQDLFLPFFSNVTWFHAIHVSGTNGTKRFDNPVLPFNDGVYFASTEKSNIIRGWIFGTTLDSKTQSLLIVNNATNVVIKVCEFQFCNDPFLGVYYHKNNKSWMESEFRVYSSANNCTFEYVSQPFLMDLEGKQGNFKNLREFVFKNIDGYFKIYSKHTPINLVRDLPQGFSALEPLVDLPIGINITRFQTLLALHRSYLTPGDSSSGWTAGAAAYYVGYLQPRTFLLKYNENGTITDAVDCALDPLSETKCTLKSFTVEKGIYQTSNFRVQPTESIVRFPNITNLCPFGEVFNATRFASVYAWNRKRISNCVADYSVLYNSASFSTFKCYGVSPTKLNDLCFTNVYADSFVIRGDEVRQIAPGQTGKIADYNYKLPDDFTGCVIAWNSNNLDSKVGGNYNYLYRLFRKSNLKPFERDISTEIYQAGSTPCNGVEGFNCYFPLQSYGFQPTNGVGYQPYRVVVLSFELLHAPATVCGPKKSTNLVKNKCVNFNFNGLTGTGVLTESNKKFLPFQQFGRDIADTTDAVRDPQTLEILDITPCSFGGVSVITPGTNTSNQVAVLYQGVNCTEVPVAIHADQLTPTWRVYSTGSNVFQTRAGCLIGAEHVNNSYECDIPIGAGICASYQTQTNSPRRARSVASQSIIAYTMSLGAENSVAYSNNSIACPTNFTISVTTEILPVSMTKTSVDCTMYICGDSTECSNLLLQYGSFCTQLNRALTGIAVEQDKNTQEVFAQVKQIYKTPPIKDFGGFNFSQILPDPSKPSKRSFIEDLLFNKVTLADAGFIKQYGDCLGDIAARDLICAQKFNGLTVLPPLLTDEMIAQYTSALLAGTITSGWTFGAGAALQIPFAMQMAYRFNGIGVTQNVLYENQKLIANQFNSAIGKIQDSLSSTASALGKLQDVVNQNAQALNTLVKQLSSNFGAISSVLNDILSRLDKVEAEVQIDRLITGRLQSLQTYVTQQLIRAAEIRASANLAATKMSECVLGQSKRVDFCGKGYHLMSFPQSAPHGVVFLHVTYVPAQEKNFTTAPAICHDGKAHFPREGVFVSNGTHWFVTQRNFCEPQIITTDNTFVSGNCDVVIGIVNNTVYDPLQPELDSFKEELDKYFKNHTSPDVDLGDISGINASVVNIQKEIDRLNEVAKNLNESLIDLQELGKYEQYIK

SEQ ID NO: 2025 - protein, 1211 aa, Artificial Sequence
  SARS-CoV-2/Wuhan/HBCDC-HB-02/2020__EPI_ISL_412978 spike protein (1-1211)(I714C_Y1110C)
MFVFLVLLPLVSSQCVNLTTRTQLPPAYTNSFTRGVYYPDKVFRSSVLHSTQDLFLPFFSNVTWFHAIHVSGTNGTKRFDNPVLPFNDGVYFASTEKSNIIRGWIFGTTLDSKTQSLLIVNNATNVVIKVCEFQFCNDPFLGVYYHKNNKSWMESEFRVYSSANNCTFEYVSQPFLMDLEGKQGNFKNLREFVFKNIDGYFKIYSKHTPINLVRDLPQGFSALEPLVDLPIGINITRFQTLLALHRSYLTPGDSSSGWTAGAAAYYVGYLQPRTFLLKYNENGTITDAVDCALDPLSETKCTLKSFTVEKGIYQTSNFRVQPTESIVRFPNITNLCPFGEVFNATRFASVYAWNRKRISNCVADYSVLYNSASFSTFKCYGVSPTKLNDLCFTNVYADSFVIRGDEVRQIAPGQTGKIADYNYKLPDDFTGCVIAWNSNNLDSKVGGNYNYLYRLFRKSNLKPFERDISTEIYQAGSTPCNGVEGFNCYFPLQSYGFQPTNGVGYQPYRVVVLSFELLHAPATVCGPKKSTNLVKNKCVNFNFNGLTGTGVLTESNKKFLPFQQFGRDIADTTDAVRDPQTLEILDITPCSFGGVSVITPGTNTSNQVAVLYQDVNCTEVPVAIHADQLTPTWRVYSTGSNVFQTRAGCLIGAEHVNNSYECDIPIGAGICASYQTQTNSPRRARSVASQSIIAYTMSLGAENSVAYSNNSIACPTNFTISVTTEILPVSMTKTSVDCTMYICGDSTECSNFLLQYGSFCTQLNRALTGIAVEQDKNTQEVFAQVKQIYKTPPIKDFGGFNFSQILPDPSKPSKRSFIEDLLFNKVTLADAGFIKQYGDCLGDIAARDLICAQKFNGLTVLPPLLTDEMIAQYTSALLAGTITSGWTFGAGAALQIPFAMQMAYRFNGIGVTQNVLYENQKLIANQFNSAIGKIQDSLSSTASALGKLQDVVNQNAQALNTLVKQLSSNFGAISSVLNDILSRLDKVEAEVQIDRLITGRLQSLQTYVTQQLIRAAEIRASANLAATKMSECVLGQSKRVDFCGKGYHLMSFPQSAPHGVVFLHVTYVPAQEKNFTTAPAICHDGKAHFPREGVFVSNGTHWFVTQRNFCEPQIITTDNTFVSGNCDVVIGIVNNTVYDPLQPELDSFKEELDKYFKNHTSPDVDLGDISGINASVVNIQKEIDRLNEVAKNLNESLIDLQELGKYEQYIK

SEQ ID NO: 2026 - protein, 1211 aa, Artificial Sequence
  SARS-CoV-2/Australia/QLD02/2020__EPI_ISL_407896 spike protein (1-1211)(I714C_Y1110C)
MFVFLVLLPLVSSQCVNLTTRTQLPPAYTNSFTRGVYYPDKVFRSSVLHSTQDLFLPFFSNVTWFHAIHVSGTNGTKRFDNPVLPFNDGVYFASTEKSNIIRGWIFGTTLDSKTQSLLIVNNATNVVIKVCEFQFCNDPFLGVYYHKNNKSWMESEFRVYSSANNCTFEYVSQPFLMDLEGKQGNFKNLREFVFKNIDGYFKIYSKHTPINLVRDLPQGFSALEPLVDLPIGINITRFQTLLALHRSYLTPGDSSSGWTAGAAAYYVGYLQPRTFLLKYNENGTITDAVDCALDPLSETKCTLKSFTVEKGIYQTSNFRVQPTESIVRFPNITNLCPFGEVFNATRFASVYAWNRKRISNCVADYSVLYNSASFSTFKCYGVSPTKLNDLCFTNVYADSFVIRGDEVRQIAPGQTGKIADYNYKLPDDFTGCVIAWNSNNLDSKVGGNYNYLYRLFRKSNLKPFERDISTEIYQAGSTPCNGVEGFNCYFPLQSYGFQPTNGVGYQPYRVVVLSFELLHAPATVCGPKKSTNLVKNKCVNFNFNGLTGTGVLTESNKKFLPFQQFGRDIADTTDAVRDPQTLEILDITPCSFGGVSVITPGTNTSNQVAVLYQDVNCTEVPVAIHADQLTPTWRVYSTGSNVFQTRAGCLIGAEHVNNSYECDIPIGAGICASYQTQTNSPRRARSVASQSIIAYTMSLGAENSVAYSNNSIACPTNFTISVTTEILPVSMTKTSVDCTMYICGDSTECSNLLLQYGSFCTQLNRALTGIAVEQDKNTQEVFAQVKQIYKTPPIKDFGGFNFSQILPDPSKPSKRSFIEDLLFNKVTLADAGFIKQYGDCLGDIAARDLICAQKFNGLTVLPPLLTDEMIAQYTSALLAGTITSGWTFGAGAALQIPFAMQMAYRFNGIGVTQNVLYENQKLIANQFNSAIGKIQDSLSSTASALGKLQDVVNQNAQALNTLVKQLSSNFGAISSVLNDILSRLDKVEAEVQIDRLITGRLQSLQTYVTQQLIRAAEIRASANLAATKMSECVLGQSKRVDFCGKGYHLMSFPQSAPHGVVFLHVTYVPAQEKNFTTAPAICHDGKAHFPREGVFVSNGTHWFVTQRNFCEPQIITTDNTFVSGNCDVVIGIVNNTVYDPLQLELDSFKEELDKYFKNHTSPDVDLGDISGINASVVNIQKEIDRLNEVAKNLNESLIDLQELGKYEQYIK

SEQ ID NO: 2027 - protein, 1211 aa, Artificial Sequence
  SARS-CoV-2/India/1-31/2020__EPI_ISL_413523 spike protein (1-1211)(I714C_Y1110C)
MFVFLVLLPLVSSQCVNLTTRTQLPPAYTNSFTRGVYYPDKVFRSSVLHSTQDLFLPFFSNVTWFHAIHVSGTNGTKRFDNPVLPFNDGVYFASTEKSNIIRGWIFGTTLDSKTQSLLIVNNATNVVIKVCEFQFCNDPFLGVYYHKNNKSWMESEFRVYSSANNCTFEYVSQPFLMDLEGKQGNFKNLREFVFKNIDGYFKIYSKHTPINLVRDLPQGFSALEPLVDLPIGINITRFQTLLALHRSYLTPGDSSSGWTAGAAAYYVGYLQPRTFLLKYNENGTITDAVDCALDPLSETKCTLKSFTVEKGIYQTSNFRVQPTESIVRFPNITNLCPFGEVFNATRFASVYAWNRKRISNCVADYSVLYNSASFSTFKCYGVSPTKLNDLCFTNVYADSFVIRGDEVRQIAPGQTGKIADYNYKLPDDFTGCVIAWNSNNLDSKVGGNYNYLYRLFRKSNLKPFERDISTEIYQAGSTPCNGVEGFNCYFPLQSYGFQPTNGVGYQPYRVVVLSFELLHAPATVCGPKKSTNLVKNKCVNFNFNGLTGTGVLTESNKKFLPFQQFGRDIADTTDAVRDPQTLEILDITPCSFGGVSVITPGTNTSNQVAVLYQDVNCTEVPVAIHADQLTPTWRVYSTGSNVFQTRAGCLIGAEHVNNSYECDIPIGAGICASYQTQTNSPRRARSVASQSIIAYTMSLGAENSVAYSNNSIACPTNFTISVTTEILPVSMTKTSVDCTMYICGDSTECSNLLLQYGSFCTQLNRALTGIAVEQDKNTQEVFAQVKQIYKTPPIKDFGGFNFSQILPDPSKPSKRSFIEDLLFNKVTLADAGFIKQYGDCLGDIAARDLICAQKFNGLTVLPPLLTDEMIAQYTSALLAGTITSGWTFGAGAALQIPFAMQMAYRFNGIGVTQNVLYENQKLIANQFNSVIGKIQDSLSSTASALGKLQDVVNQNAQALNTLVKQLSSNFGAISSVLNDILSRLDKVEAEVQIDRLITGRLQSLQTYVTQQLIRAAEIRASANLAATKMSECVLGQSKRVDFCGKGYHLMSFPQSAPHGVVFLHVTYVPAQEKNFTTAPAICHDGKAHFPREGVFVSNGTHWFVTQRNFCEPQIITTDNTFVSGNCDVVIGIVNNTVYDPLQPELDSFKEELDKYFKNHTSPDVDLGDISGINASVVNIQKEIDRLNEVAKNLNESLIDLQELGKYEQYIK

SEQ ID NO: 2028 - protein, 1211 aa, Artificial Sequence
  SARS-CoV-2/Guangdong/GD2020087-P0008/2020__EPI_ISL_413863 spike protein (1-1211)(I714C_Y1110C)
MFVFLVLLPLVSSQCVNLTTRTQLPPAYTNSFTRGVYYPDKVFRSSVLHSTQDLFLPFFSNVTWFHAIHVSGTNGTKRFDNPVLPFNDGVYFASTEKSNIIRGWIFGTTLDSKTQSLLIVNNATNVVIKVCEFQFCNDPFLGVYYHKNNKSWMESEFRVYSSANNCTFEYVSQPFLMDLEGKQGNFKNLREFVFKNIDGYFKIYSKHTPINLVRDLPQGFSALEPLVDLPIGINITRFQTLLALHRSYLTPGDSSSGWTAGAAAYYVGYLQPRTFLLKYNENGTITDAVDCALDPLSETKCTLKSFTVEKGIYQTSNFRVQPTESIVRFPNITNLCPFGEVFNATRFASVYAWNRKRISNCVADYSVLYNSASFSTFKCYGVSPTKLNDLCFTNVYADSFVIRGDEVREIAPGQTGKIADYNYKLPDDFTGCVIAWNSNNLDSKVGGNYNYLYRLFRKSNLKPFERDISTEIYQAGSTPCNGVEGFNCYFPLQSYGFQPTNGVGYQPYRVVVLSFELLHAPATVCGPKKSTNLVKNKCVNFNFNGLTGTGVLTESNKKFLPFQQFGRDIADTTDAVRDPQTLEILDITPCSFGGVSVITPGTNTSNQVAVLYQDVNCTEVPVAIHADQLTPTWRVYSTGSNVFQTRAGCLIGAEHVNNSYECDIPIGAGICASYQTQTNSPRRARSVASQSIIAYTMSLGAENSVAYSNNSIACPTNFTISVTTEILPVSMTKTSVDCTMYICGDSTECSNLLLQYGSFCTQLNRALTGIAVEQDKNTQEVFAQVKQIYKTPPIKDFGGFNFSQILPDPSKPSKRSFIEDLLFNKVTLADAGFIKQYGDCLGDIAARDLICAQKFNGLTVLPPLLTDEMIAQYTSALLAGTITSGWTFGAGAALQIPFAMQMAYRFNGIGVTQNVLYENQKLIANQFNSAIGKIQDSLSSTASALGKLQDVVNQNAQALNTLVKQLSSNFGAISSVLNDILSRLDKVEAEVQIDRLITGRLQSLQTYVTQQLIRAAEIRASANLAATKMSECVLGQSKRVDFCGKGYHLMSFPQSAPHGVVFLHVTYVPAQEKNFTTAPAICHDGKAHFPREGVFVSNGTHWFVTQRNFCEPQIITTDNTFVSGNCDVVIGIVNNTVYDPLQPELDSFKEELDKYFKNHTSPDVDLGDISGINASVVNIQKEIDRLNEVAKNLNESLIDLQELGKYEQYIK

SEQ ID NO: 2029 - protein, 1211 aa, Artificial Sequence
  SARS-CoV-2/Sweden/01/2020__EPI_ISL_411951 spike protein (1-1211)(I714C_Y1110C)
MFVFLVLLPLVSSQCVNLTTRTQLPPAYTNSFTRGVYYPDKVFRSSVLHSTQDLFLPFFSNVTWFHAIHVSGTNGTKRFDNPVLPFNDGVYFASTEKSNIIRGWIFGTTLDSKTQSLLIVNNATNVVIKVCEFQFCNDPFLGVYYHKNNKSWMESEFRVYSSANNCTFEYVSQPFLMDLEGKQGNFKNLREFVFKNIDGYFKIYSKHTPINLVRDLPQGFSALEPLVDLPIGINITRFQTLLALHRSYLTPGDSSSGWTAGAAAYYVGYLQPRTFLLKYNENGTITDAVDCALDPLSETKCTLKSFTVEKGIYQTSNFRVQPTESIVRFPNITNLCPFGEVFNATRFASVYAWNRKRISNCVADYSVLYNSASFSTFKCYGVSPTKLNDLCFTNVYADSFVIRGDEVRQIAPGQTGKIADYNYKLPDDFTGCVIAWNSNNLDSKVGGNYNYLYRLFRKSNLKPFERDISTEIYQAGSTPCNGVEGFNCYFPLQSYGFQPTNGVGYQPYRVVVLSFELLHAPATVCGPKKSTNLVKNKCVNFNFNGLTGTGVLTESNKKFLPFQQFGRDIADTTDAVRDPQTLEILDITPCSFGGVSVITPGTNTSNQVAVLYQDVNCTEVPVAIHADQLTPTWRVYSTGSNVFQTRAGCLIGAEHVNNSYECDIPIGAGICASYQTQTNSPRRARSVASQSIIAYTMSLGAENSVAYSNNSIACPTNFTISVTTEILPVSMTKTSVDCTMYICGDSTECSNLLLQYGSFCTQLNRALTGIAVEQDKNTQEVFAQVKQIYKTPPIKDCGGFNFSQILPDPSKPSKRSFIEDLLFNKVTLADAGFIKQYGDCLGDIAARDLICAQKFNGLTVLPPLLTDEMIAQYTSALLAGTITSGWTFGAGAALQIPFAMQMAYRFNGIGVTQNVLYENQKLIANQFNSAIGKIQDSLSSTASALGKLQDVVNQNAQALNTLVKQLSSNFGAISSVLNDILSRLDKVEAEVQIDRLITGRLQSLQTYVTQQLIRAAEIRASANLAATKMSECVLGQSKRVDFCGKGYHLMSFPQSAPHGVVFLHVTYVPAQEKNFTTAPAICHDGKAHFPREGVFVSNGTHWFVTQRNFCEPQIITTDNTFVSGNCDVVIGIVNNTVYDPLQPELDSFKEELDKYFKNHTSPDVDLGDISGINASVVNIQKEIDRLNEVAKNLNESLIDLQELGKYEQYIK

SEQ ID NO: 2030 - protein, 1211 aa, Artificial Sequence
  SARS-CoV-2/Tianmen/HBCDC-HB-07/2020__EPI_ISL_412983 spike protein (1-1211)(I714C_Y1110C)
MFVFLVLLPLVSSQCVNLTTRTQLPPAYTNSFTRGVYYPDKVFRSSVLHSTQDLFLPFFSNVTWFHAIHVSGTNGTKRFDNPVLPFNDGVYFASTEKSNIIRGWIFGTTLDSKTQSLLIVNNATNVVIKVCEFQFCNDPFLGVYYHKNNKSWMESEFRVYSSANNCTFEYVSQPFLMDLEGKQGNFKNLREFVFKNIDGYFKIYSKHTPINLVRDLPQGFSALEPLVDLPIGINITRFQTLLALHRSYLTPGDSSSGWTAGAAAYYVGYLQPRTFLLKYNENGTITDAVDCALDPLSETKCTLKSFTVEKGIYQTSNFRVQPTESIVRFPNITNLCPFGEVFNATRFASVYAWNRKRISNCVADYSVLYNSASFSTFKCYGVSPTKLNDLCFTNVYADSFVIRGDEVRQIAPGQTGKIADYNYKLPDDFTGCVIAWNSNNLDSKVGGNYNYLYRLFRKSNLKPFERDISTEIYQAGSTPCNGVEGFNCYFPLQSYGFQPTNGVGYQPYRVVVLSFELLHAPATVCGPKKSTNLVKNKCVNFNFNGLTGTGVLTESNKKFLPFQQFGRDIADTTDAVRDPQTLEILDITPCSFGGVSVITPGTNTSNQVAVLYQDLNCTEVPVAIHADQLTPTWRVYSTGSNVFQTRAGCLIGAEHVNNSYECDIPIGAGICASYQTQTNSPRRARSVASQSIIAYTMSLGAENSVAYSNNSIACPTNFTISVTTEILPVSMTKTSVDCTMYICGDSTECSNLLLQYGSFCTQLNRALTGIAVEQDKNTQEVFAQVKQIYKTPPIKDFGGFNFSQILPDPSKPSKRSFIEDLLFNKVTLADAGFIKQYGDCLGDIAARDLICAQKFNGLTVLPPLLTDEMIAQYTSALLAGTITSGWTFGAGAALQIPFAMQMAYRFNGIGVTQNVLYENQKLIANQFNSAIGKIQDSLSSTASALGKLQDVVNQNAQALNTLVKQLSSNFGAISSVLNDILSRLDKVEAEVQIDRLITGRLQSLQTYVTQQLIRAAEIRASANLAATKMSECVLGQSKRVDFCGKGYHLMSFPQSAPHGVVFLHVTYVPAQEKNFTTAPAICHDGKAHFPREGVFVSNGTHWFVTQRNFCEPQIITTDNTFVSGNCDVVIGIVNNTVYDPLQPELDSFKEELDKYFKNHTSPDVDLGDISGINASVVNIQKEIDRLNEVAKNLNESLIDLQELGKYEQYIK

SEQ ID NO: 2031 - protein, 1211 aa, Artificial Sequence
  SARS-CoV-2/Hong Kong/case42_VM20002493/2020__EPI_ISL_414527 spike protein (1-1211)(I714C_Y1110C)
MFVFLVLLPLVSSQCVNLTTRTQLPPAYTNSFTRGVYYPDKVFRSSVLHSTQDLFLPFFSNVTWFHAIHVSGTNGTKRFDNPVLPFNDGVYFASTEKSNIIRGWIFGTTLDSKTQSLLIVNNATNVVIKVCEFQFCNDPFLGVYYHKNNKSWMESEFRVYSSANNCTFEYVSQPFLMDLEGKQGNFKNLREFVFKNIDGYFKIYSKHTPINLVRDLPQGFSALEPLVDLPIGINITRFQTLLALHRSYLTPGDSSSGWTAGAAAYYVGYLQPRTFLLKYNENGTITDAVDCALDPLSETKCTLKSFTVEKGIYQTSNFRVQPTESIVRFPNITNLCPFGEVFNATRFASVYAWNRKRISNCVADYSVLYNSASFSTFKCYGVSPTKLNDLCFTNVYADSFVIRGDEVRQIAPGQTGKIADYNYKLPDDFTGCVIAWNSNNLDSKVGGNYNYLYRLFRKSNLKPFERDISTEIYQAGSTPCNGVEGFNCYFPLQSYGFQPTNGVGYQPYRVVVLSFELLHAPATVCGPKKSTNLVKNKCVNFNFNGLTGTGVLTESNKKFLPFQQFGRDIADTTDAVRDPQTLEILDITPCSFGGVSVITPGTNTSNQVAVLYQDVNCTEVPVAIHADQLTPTWRVYSTGSNVFQTRAGCLIGAEHVNNSYECDIPIGAGICASYQTQTNSPRRARSVASQSIIAYTMSLGAENSVAYSNNSIACPTNFAISVTTEILPVSMTKTSVDCTMYICGDSTECSNLLLQYGSFCTQLNRALTGIAVEQDKNTQEVFAQVKQIYKTPPIKDFGGFNFSQILPDPSKPSKRSFIEDLLFNKVTLADAGFIKQYGDCLGDIAARDLICAQKFNGLTVLPPLLTDEMIAQYTSALLAGTITSGWTFGAGAALQIPFAMQMAYRFNGIGVTQNVLYENQKLIANQFNSAIGKIQDSLSSTASALGKLQDVVNQNAQALNTLVKQLSSNFGAISSVLNDILSRLDKVEAEVQIDRLITGRLQSLQTYVTQQLIRAAEIRASANLAATKMSECVLGQSKRVDFCGKGYHLMSFPQSAPHGVVFLHVTYVPAQEKNFTTAPAICHDGKAHFPREGVFVSNGTHWFVTQRNFCEPQIITTDNTFVSGNCDVVIGIVNNTVYDPLQPELDSFKEELDKYFKNHTSPDVDLGDISGINASVVNIQKEIDRLNEVAKNLNESLIDLQELGKYEQYIK

SEQ ID NO: 2032 - protein, 1211 aa, Artificial Sequence
  SARS-CoV-2/USA/CruiseA-23/2020__EPI_ISL_414482 spike protein (1-1211)(I714C_Y1110C)
MFVFLVLLPLVSSQCVNLTTRTQLPPAYTNSFTRGVYYPDKVFRSSVLHSTQDLFLPFFSNVTWFHAIHVSGTNGTKRFDNPVLPFNDGVYFASTEKSNIIRGWIFGTTLDSKTQSLLIVNNATNVVIKVCEFQFCNDPFLGVYYHKNNKSWMESEFRVYSSANNCTFEYVSQPFLMDLEVKQGNFKNLREFVFKNIDGYFKIYSKHTPINLVRDLPQGFSALEPLVDLPIGINITRFQTLLALHRSYLTPGDSSSGWTAGAAAYYVGYLQPRTFLLKYNENGTITDAVDCALDPLSETKCTLKSFTVEKGIYQTSNFRVQPTESIVRFPNITNLCPFGEVFNATRFASVYAWNRKRISNCVADYSVLYNSASFSTFKCYGVSPTKLNDLCFTNVYADSFVIRGDEVRQIAPGQTGKIADYNYKLPDDFTGCVIAWNSNNLDSKVGGNYNYLYRLFRKSNLKPFERDISTEIYQAGSTPCNGVEGFNCYFPLQSYGFQPTNGVGYQPYRVVVLSFELLHAPATVCGPKKSTNLVKNKCVNFNFNGLTGTGVLTESNKKFLPFQQFGRDIADTTDAVRDPQTLEILDITPCSFGGVSVITPGTNTSNQVAVLYQDVNCTEVPVAIHADQLTPTWRVYSTGSNVFQTRAGCLIGAEHVNNSYECDIPIGAGICASYQTQTNSPRRARSVASQSIIAYTMSLGAENSVAYSNNSIACPTNFTISVTTEILPVSMTKTSVDCTMYICGDSTECSNLLLQYGSFCTQLNRALTGIAVEQDKNTQEVFAQVKQIYKTPPIKDFGGFNFSQILPDPSKPSKRSFIEDLLFNKVTLADAGFIKQYGDCLGDIAARDLICAQKFNGLTVLPPLLTDEMIAQYTSALLAGTITSGWTFGAGAALQIPFAMQMAYRFNGIGVTQNVLYENQKLIANQFNSAIGKIQDSLSSTASALGKLQDVVNQNAQALNTLVKQLSSNFGAISSVLNDILSRLDKVEAEVQIDRLITGRLQSLQTYVTQQLIRAAEIRASANLAATKMSECVLGQSKRVDFCGKGYHLMSFPQSAPHGVVFLHVTYVPAQEKNFTTAPAICHDGKAHFPREGVFVSNGTHWFVTQRNFCEPQIITTDNTFVSGNCDVVIGIVNNTVYDPLQPELDSFKEELDKYFKNHTSPDVDLGDISGINASVVNIQKEIDRLNEVAKNLNESLIDLQELGKYEQYIK

SEQ ID NO: 2033 - protein, 1211 aa, Artificial Sequence
  SARS-CoV-2/Hong Kong/case85_VM20002868/2020__EPI_ISL_414519 spike protein (1-1211)(I714C_Y1110C)
MFVFLVLVPLVSSQCVNLTTRTQLPPAYTNSFTRGVYYPDKVFRSSVLHSTQDLFLPFFSNVTWFHAIHVSGTNGTKRFDNPVLPFNDGVYFASTEKSNIIRGWIFGTTLDSKTQSLLIVNNATNVVIKVCEFQFCNDPFLGVYYHKNNKSWMESEFRVYSSANNCTFEYVSQPFLMDLEGKQGNFKNLREFVFKNIDGYFKIYSKHTPINLVRDLPQGFSALEPLVDLPIGINITRFQTLLALHRSYLTPGDSSSGWTAGAAAYYVGYLQPRTFLLKYNENGTITDAVDCALDPLSETKCTLKSFTVEKGIYQTSNFRVQPTESIVRFPNITNLCPFGEVFNATRFASVYAWNRKRISNCVADYSVLYNSASFSTFKCYGVSPTKLNDLCFTNVYADSFVIRGDEVRQIAPGQTGKIADYNYKLPDDFTGCVIAWNSNNLDSKVGGNYNYLYRLFRKSNLKPFERDISTEIYQAGSTPCNGVEGFNCYFPLQSYGFQPTNGVGYQPYRVVVLSFELLHAPATVCGPKKSTNLVKNKCVNFNFNGLTGTGVLTESNKKFLPFQQFGRDIADTTDAVRDPQTLEILDITPCSFGGVSVITPGTNTSNQVAVLYQDVNCTEVPVAIHADQLTPTWRVYSTGSNVFQTRAGCLIGAEHVNNSYECDIPIGAGICASYQTQTNSPRRARSVASQSIIAYTMSLGAENSVAYSNNSIACPTNFTISVTTEILPVSMTKTSVDCTMYICGDSTECSNLLLQYGSFCTQLNRALTGIAVEQDKNTQEVFAQVKQIYKTPPIKDFGGFNFSQILPDPSKPSKRSFIEDLLFNKVTLADAGFIKQYGDCLGDIAARDLICAQKFNGLTVLPPLLTDEMIAQYTSALLAGTITSGWTFGAGAALQIPFAMQMAYRFNGIGVTQNVLYENQKLIANQFNSAIGKIQDSLSSTASALGKLQDVVNQNAQALNTLVKQLSSNFGAISSVLNDILSRLDKVEAEVQIDRLITGRLQSLQTYVTQQLIRAAEIRASANLAATKMSECVLGQSKRVDFCGKGYHLMSFPQSAPHGVVFLHVTYVPAQEKNFTTAPAICHDGKAHFPREGVFVSNGTHWFVTQRNFCEPQIITTDNTFVSGNCDVVIGIVNNTVYDPLQPELDSFKEELDKYFKNHTSPDVDLGDISGINASVVNIQKEIDRLNEVAKNLNESLIDLQELGKYEQYIK

SEQ ID NO: 2034 - protein, 1211 aa, Artificial Sequence; identical to SEQ ID NO: 2024
  SARS-CoV-2/England/200990660/2020__EPI_ISL_414523 spike protein (1-1211)(I714C_Y1110C)

SEQ ID NO: 2035 - protein, 1211 aa, Artificial Sequence
  SARS-CoV-2/Australia/NSW09/2020__EPI_ISL_413595 spike protein (1-1211)(I714C_Y1110C)
MFVFLVLLPLVSSQCVNLTTRTQLPPAYTNSFTRGVYYPDKVFRSSVLHSTQDLFLPFFSNVTWFHAIHVSGTNGTKRFDNPVLPFNDGVYFASTEKSNIIRGWIFGTTLDSKTQSLLIVNNATNVVIKVCEFQFCNDPFLGVYYHKNNKSWMESEFRVYSSANNCTFEYVSQPFLMDLEGKQGNFKNLREFVFKNIDGYFKIYSKHTPINLVRDLPQGFSALEPLVDLPIGINITRFQTLLALHRSYLTPGDSSSGWTAGAAAYYVGYLQPRTFLLKYNENGTITDAVDCALDPLSETKCTLKSFTVEKGIYQTSNFRVQPTESIVRFPNITNLCPFGEVFNATRFASVYAWNRKRISNCVADYSVLYNSASFSTFKCYGVSPTKLNDLCFTNVYADSFVIRGDEVRQIAPGQTGKIADYNYKLPDDFTGCVIAWNSNNLDSKVGGNYNYLYRLFRKSNLKPFERDISTEIYQAGSTPCNGVEGFNCYFPLQSYGFQPTNGVGYQPYRVVVLSFELLHAPATVCGPKKSTNLVKNKCVNFNFNGLTGTGVLTESNKKFLPFQQFGRDIADTTDAVRDPQTLEILDITPCSFGGVSVITPGTNTSNQVAVLYQDVNCTEVPVAIHADQLTPTWRVYSTGSNVFQTRAGCLIGAEHVNNSYECDIPIGAGICASYQTQTNSPRRARSVASQSIIAYTMSLGAENSVAYSNNSIACPTNFTISVTTEILPVSMTKTSVDCTMYICGDSTECSNLLLQYGSFCTQLNRALTGIAVEQDKNTQEVFAQVKQIYKTPPIKDFGGFNFSQILPDPSKPSKRSFIEDLLFNKVTLADAGFIKQYGDCLGDIAARDLICAQKFNGLTVLPPLLTDEMIAQYTSALLAGTITSGWTFGAGAALQIPFAMQMAYRFNGIGVTQNVLYENQKLIANQFNSAIGKIQDSLSFTASALGKLQDVVNQNAQALNTLVKQLSSNFGAISSVLNDILSRLDKVEAEVQIDRLITGRLQSLQTYVTQQLIRAAEIRASANLAATKMSECVLGQSKRVDFCGKGYHLMSFPQSAPHGVVFLHVTYVPAQEKNFTTAPAICHDGKAHFPREGVFVSNGTHWFVTQRNFCEPQIITTDNTFVSGNCDVVIGIVNNTVYDPLQPELDSFKEELDKYFKNHTSPDVDLGDISGINASVVNIQKEIDRLNEVAKNLNESLIDLQELGKYEQYIK

SEQ ID NO: 2036 - protein, 1211 aa, Artificial Sequence; identical to SEQ ID NO: 2016
  SARS-CoV-2/Australia/NSW10/2020__EPI_ISL_413596 spike protein (1-1211)(I714C_Y1110C)

SEQ ID NO: 2037 - protein, 1211 aa, Artificial Sequence
  SARS-CoV-2/Switzerland/1000477797/2020__EPI_ISL_413023 spike protein (1-1211)(I714C_Y1110C)
MFVFLVLLPLVSSQCVNLTTRTQLPPAYTNSFTRGVYYPDKVFRSSVLHSTQDLFLPFFSNVTWFHAIHVSGTNGTKRFDNPVLPFNDGVYFASTEKSNIIRGWIFGTTLDSKTQSLLIVNNATNVVIKVCEFQFCNDPFLGVYYHKNNKSWMESEFRVYSSANNCTFEYVSQPFLMDLEGKQGNFKNLREFVFKNIDGYFNIYSKHTPINLVRDLPQGFSALEPLVDLPIGINITRFQTLLALHRSYLTPGDSSSGWTAGAAAYYVGYLQPRTFLLKYNENGTITDAVDCALDPLSETKCTLKSFTVEKGIYQTSNFRVQPTESIVRFPNITNLCPFGEVFNATRFASVYAWNRKRISNCVADYSVLYNSASFSTFKCYGVSPTKLNDLCFTNVYADSFVIRGDEVRQIAPGQTGKIADYNYKLPDDFTGCVIAWNSNNLDSKVGGNYNYLYRLFRKSNLKPFERDISTEIYQAGSTPCNGVEGFNCYFPLQSYGFQPTNGVGYQPYRVVVLSFELLHAPATVCGPKKSTNLVKNKCVNFNFNGLTGTGVLTESNKKFLPFQQFGRDIADTTDAVRDPQTLEILDITPCSFGGVSVITPGTNTSNQVAVLYQGVNCTEVPVAIHADQLTPTWRVYSTGSNVFQTRAGCLIGAEHVNNSYECDIPIGAGICASYQTQTNSPRRARSVASQSIIAYTMSLGAENSVAYSNNSIACPTNFTISVTTEILPVSMTKTSVDCTMYICGDSTECSNLLLQYGSFCTQLNRALTGIAVEQDKNTQEVFAQVKQIYKTPPIKDFGGFNFSQILPDPSKPSKRSFIEDLLFNKVTLADAGFIKQYGDCLGDIAARDLICAQKFNGLTVLPPLLTDEMIAQYTSALLAGTITSGWTFGAGAALQIPFAMQMAYRFNGIGVTQNVLYENQKLIANQFNSAIGKIQDSLSSTASALGKLQDVVNQNAQALNTLVKQLSSNFGAISSVLNDILSRLDKVEAEVQIDRLITGRLQSLQTYVTQQLIRAAEIRASANLAATKMSECVLGQSKRVDFCGKGYHLMSFPQSAPHGVVFLHVTYVPAQEKNFTTAPAICHDGKAHFPREGVFVSNGTHWFVTQRNFCEPQIITTDNTFVSGNCDVVIGIVNNTVYDPLQPELDSFKEELDKYFKNHTSPDVDLGDISGINASVVNIQKEIDRLNEVAKNLNESLIDLQELGKYEQYIK

SEQ ID NO: 2038 - protein, 1211 aa, Artificial Sequence
  SARS-CoV-2/Belgium/BA-02291/2020__EPI_ISL_415159 spike protein (1-1211)(I714C_Y1110C)
MFVFLVLLPLVSSQCVNLTTRTQLPPAYTNSFTRGVYYPDKVFRSSVLHSTQDLFLPFFSNVTWFHAIHVSGTNGTKRFDNPVLPFNDGVYFASTEKSNIIRGWIFGTTLDSKTQSLLIVNNATNVVIKVCEFQFCNDPFLGVYYHKNNKSWMESEFRVYSSANNCTFEYVSQPFLMDLEGKQGNFKNLREFVFKNIDGYFKIYSKHTPINLVRDLPQGFSALEPLVDLPIGINITRFQTLLALHRSYLTPGDSSSGWTAGAAAYYVGYLQPRTFLLKYNENGTITDAVDCALDPLSETKCTLKSFTVEKGIYQTSNFRVQPTESIVRFPNITNLCPFGEVFNATRFASVYAWNRKRISNCVADYSVLYNSASFSTFKCYGVSPTKLNDLCFTNVYADSFVIRGDEVRQIAPGQTGKIADYNYKLPDDFTGCVIAWNSNNLDSKVGGNYNYLYRLFRRSNLKPFERDISTEIYQAGSTPCNGVEGFNCYFPLQSYGFQPTNGVGYQPYRVVVLSFELLPAPATVCGPKKSTNLVKNKCVNFNFNGLTGTGVLTESNKKFLPFQQFGRDIADTTDAVRDPQTLEILDITPCSFGGVSVITPGTNTSNQVAVLYQGVNCTEVPVAIHADQLTPTWRVYSTGSNVFQTRAGCLIGAEHVNNSYECDIPIGAGICASYQTQTNSPRRARSVASQSIIAYTMSLGAENSVAYSNNSIACPTNFTISVTTEILPVSMTKTSVDCTMYICGDSTECSNLLLQYGSFCTQLNRALTGIAVEQDKNTQEVFAQVKQIYKTPPIKDFGGFNFSQILPDPSKPSKRSFIEDLLFNKVTLADAGFIKQYGDCLGDIAARDLICAQKFNGLTVLPPLLTDEMIAQYTSALLAGTITSGWTFGAGAALQIPFAMQMAYRFNGIGVTQNVLYENQKLIANQFNSAIGKIQDSLSSAAPALGKLQDVVNQNAQALNTLVKQLSSNFGAISSVLNDILSRLDKVEAEVQIDRLITGRLQSLQTYVTQQLIRAAEIRASANLAATKMSECVLGQSKRVDFCGKGYHLMSFPQSAPHGVVFLHVTYVPAQEKNFTTAPAICHDGKAHFPREGVFVSNGTHWFVTQRNFCEPQIITTDNTFVSGNCDVVIGIVNNTVYDPLQPELDSFKEELDKYFKNHTSPDVDLGDISGINASVVNIQKEIDRLNEVAKNLNESLIDLQELGKYEQYIK

SEQ ID NO: 2039 - protein, 1211 aa, Artificial Sequence
  SARS-CoV-2/USA/WA8-UW5/2020__EPI_ISL_413486 spike protein (1-1211)(I714C_Y1110C)
MFVFLVLLPLVSSQCVNLTTRTQLPPAYTNSFTRGVYYPDKVFRSSVLHSTQDLFLPFFSNVTWFHAIHVSGTNGTKRFDNPVLPFNDGVYFASTEKSNIIRGWIFGTTLDSKTQSLLIVNNATNVVIKVCEFQFCNDPFLGVYYHKNNKSWMESEFRVYSSANNCTFEYVSQPFLMDLEGKQGNFKNLREFVFKNIDGYFKIYSKHTPINLVRDLPQGFSALEPLVDLPIGINITRFQTLLALHRSYLTPGDSSSGWTAGAAAYYVGYLQPRTFLLKYNENGTITDAVDCALDPLSETKCTLKSFTVEKGIYQTSNFRVQPTESIVRFPNITNLCPFGEVFNATRFASVYAWNRKRISNCVADYSVLYNSASFSTFKCYGVSPTKLNDLCFTNVYADSFVIRGDEVRQIAPGQTGKIADYNYKLPDDFTGCVIAWNSNNLDSKVGGNYNYLYRLFRKSNLKPFERDISTEIYQAGSTPCNGVEGFNCYFPLQSYGFQPTNGVGYQPYRVVVLSFELLHAPATVCGPKKSTNLVKNKCVNFNFNGLTGTGVLTESNKKFLPFQQFGRDIADTTDAVRDPQTLEILDITPCSFGGVSVITPGTNTSNQVAVLYQDVNCTEVPVAIHADQLTPTWRVYSTGSNVFQTRAGCLIGAEYVNNSYECDIPIGAGICASYQTQTNSPRRARSVASQSIIAYTMSLGAENSVAYSNNSIACPTNFTISVTTEILPVSMTKTSVDCTMYICGDSTECSNLLLQYGSFCTQLNRALTGIAVEQDKNTQEVFAQVKQIYKTPPIKDFGGFNFSQILPDPSKPSKRSFIEDLLFNKVTLADAGFIKQYGDCLGDIAARDLICAQKFNGLTVLPPLLTDEMIAQYTSALLAGTITSGWTFGAGAALQIPFAMQMAYRFNGIGVTQNVLYENQKLIANQFNSAIGKIQDSLSSTASALGKLQDVVNQNAQALNTLVKQLSSNFGAISSVLNDILSRLDKVEAEVQIDRLITGRLQSLQTYVTQQLIRAAEIRASANLAATKMSECVLGQSKRVDFCGKGYHLMSFPQSAPHGVVFLHVTYVPAQEKNFTTAPAICHDGKAHFPREGVFVSNGTHWFVTQRNFCEPQIITTDNTFVSGNCDVVIGIVNNTVYDPLQPELDSFKEELDKYFKNHTSPDVDLGDISGINASVVNIQKEIDRLNEVAKNLNESLIDLQELGKYEQYIK

SEQ ID NO: 2040 - protein, 1211 aa, Artificial Sequence
  SARS-CoV-2/England/20102000506/2020__EPI_ISL_415147 spike protein (1-1211)(I714C_Y1110C)
MFVFLVLLPLVSSQCVNLTTRTQLPPAYTNSFTRGVYYPDKVFRSSVLHSTQDLFLPFFSNVTWFHAIHVSGTNGTKRFDNPVLPFNDGVYFASTEKSNIIRGWIFGTTLDSKTQSLLIVNNATNVVIKVCEFQFCNDPFLGVYYHKNNKSWMESEFRVYSSANNCTFEYVSQPFLMDLEGKQGNFKNLREFVFKNIDGYFKIYSKHTPINLVRDLPQGFSALEPLVDLPIGINITRFQTLLALHRSYLTPGDSSSGWTAGAAAYYVGYLQPRTFLLKYNENGTITDAVDCALDPLSETKCTLKSFTVEKGIYQTSNFRVQPTESIVRFPNITNLCPFGEVFNATRFASVYAWNRKRISNCVADYSVLYNSASFSTFKCYGVSPTKLNDLCFTNVYADSFVIRGDEVRQIAPGQTGKIADYNYKLPDDFTGCVIAWNSNNLDSKVGGNYNYLYRLFRKSNLKPFERDISTEIYQAGSTPCNGVEGFNCYFPLQSYGFQPTNGVGYQPYRVVVLSFELLHAPATVCGPKKSTNLVKNKCVNFNFNGLTGTGVLTESNKKFLPFQQFGRDIADTTDAVRDPQTLEILDITPCSFGGVSVITPGTNTSNQVAVLYQGVNCTEVPVAIHADQLTPTWRVYSTGSNVFQTRAGCLIGAEHVNNSYECDIPIGAGICASYQTQTNSPRRARSVASQSIIAYTMSLGAENSVAYSNNSIACPTNFTISVTTEILPVSMTKTSVDCTMYICGDSTECSNLLLQYGSFCTQLNRALTGIAVEQDKNTQEVFAQVKQIYKTPPIKDFGGFNFSQILPDPSKPSKRSFIEDLLFNKVTLADAGFIKQYGYCLGDIAARDLICAQKFNGLTVLPPLLTDEMIAQYTSALLAGTITSGWTFGAGAALQIPFAMQMAYRFNGIGVTQNVLYENQKLIANQFNSAIGKIQDSLSSTASALGKLQDVVNQNAQALNTLVKQLSSNFGAISSVLNDILSRLDKVEAEVQIDRLITGRLQSLQTYVTQQLIRAAEIRASANLAATKMSECVLGQSKRVDFCGKGYHLMSFPQSAPHGVVFLHVTYVPAQEKNFTTAPAICHDGKAHFPREGVFVSNGTHWFVTQRNFCEPQIITTDNTFVSGNCDVVIGIVNNTVYDPLQPELDSFKEELDKYFKNHTSPDVDLGDISGINASVVNIQKEIDRLNEVAKNLNESLIDLQELGKYEQYIK

SEQ ID NO: 2041 - protein, 1211 aa, Artificial Sequence
  SARS-CoV-2/Belgium/VAG-03013/2020__EPI_ISL_415155 spike protein (1-1211)(I714C_Y1110C)
MFVFLVLLPLVSSQCVNLTTRTQLPPAYTNSFTRGVYYPDKVFRSSVLHSTQDLFLPFFSNVTWFHAIHVSGTNGTKRFDNPVLPFNDGVYFASTEKSNIIRGWIFGTTLDSKTQSLLIVNNATNVVIKVCEFQFCNDPFLGVYYHKNNKSWMESEFRVYSSANNCTFEYVSQPFLMDLEGKQGNFKNLREFVFKNIDGYFKIYSKHTPINLVRDLPQGFSALEPLVDLPIGINITRFQTLLALHRSYLTPGDSSSGWTAGAAAYYVGYLQPRTFLLKYNENGTITDAVDCALDPLSETKCTLKSFTVEKGIYQTSNFRVQPTESIVRFPNITNLCPFGEVFNATRFASVYAWNRKRISNCVADYSVLYNSASFSTFKCYGVSPTKLNDLCFTNVYADSFVIRGDEVRQIAPGQTGKIADYNYKLPDDFTGCVIAWNSNNLDSKVGGNYNYLYRLFRKSNLKPFERDISTEIYQAGSTPCNGVEGFNCYFPLQSYGFQPTNGVGYQPYRVVVLSFELLHAPATVCGPKKSTNLVKNKCVNFNFNGLTGTGVLTESNKKFLPFQQFGRDIADTTDAVRDPQTLEILDITPCSFGGVSVITPGTNTSNQVAVLYQGVNCTEVPVAIHADQLTPTWRVYSTGSNVFQTRAGCLIGAEHVNNSYECDIPIGAGICASYQTQTNSPRRARSVASQSIIAYTMSLGAENSVAYSNNSIACPTNFTISVTTEILPVSMTKTSVDCTMYICGDSTECSNLLLQYGSFCTQLNRALTGIAVEQDKNTQEVFAQVKQIYKTPPIKDFGGFNFSQILPDPSKPSKRSFIEDLLFNKVTLADAGFIKQYGDCLGDIAARDLICAQKFNGLTVLPPLLTDEMIAQYTSALLAGTITSGWTFGAGAALQIPFAMQMAYRFNGIGVTQNVLYENQKLIANQFNSAIGKIQDSLSSTATALGKLQDVVNQNAQALNTLVKQLSSNFGAISSVLNDILSRLDKVEAEVQIDRLITGRLQSLQTYVTQQLIRAAEIRASANLAATKMSECVLGQSKRVDFCGKGYHLMSFPQSAPHGVVFLHVTYVPAQEKNFTTAPAICHDGKAHFPREGVFVSNGTHWFVTQRNFCEPQIITTDNTFVSGNCDVVIGIVNNTVYDPLQPELDSFKEELDKYFKNHTSPDVDLGDISGINASVVNIQKEIDRLNEVAKNLNESLIDLQELGKYEQYIK

SEQ ID NO: 2042 - protein, 1211 aa, Artificial Sequence
  SARS-CoV-2/Belgium/BC-03016/2020__EPI_ISL_415157 spike protein (1-1211)(I714C_Y1110C)
MFVFLVLLPLVSSQCVNLTTRTQLPPAYTNSFTRGVYYPDKVFRSSVLHSTQDLFLPFFSNVTWFHAIHVSGTNGTKRFDNPVLPFNDGVYFASTEKSNIIRGWIFGTTLDSKTQSLLIVNNATNVVIKVCEFQFCNDPFLGVYYHKNNKSWMESEFRVYSSANNCTFEYVSQPFLMDLEGKQGNFKNLREFVFKNIDGYFKIYSKHTPINLVRDLPQGFSALEPLVDLPIGINITRFQTLLALHRSYLTPGDSSSGWTAGAAAYYVGYLQPRTFLLKYNENGTITDAVDCALDPLSETKCTLKSFTVEKGIYQTSNFRVQPTESIVRFPNITNLCPFGEVFNATRFASVYAWNRKRISNCVADYSVLYNSASFSTFKCYGVSPTKLNDLCFTNVYADSFVIRGDEVRQIAPGQTGKIADYNYKLPDDFTGCVIAWNSNNLDSKVGGNYNYLYRLFRKSNLKPFERDISTEIYQAGSTPCNGVEGFNCYFPLQSYGFQPTNGVGYQPYRVVVLSFELLHAPATVCGPKKSTNLVKNKCVNFNFNGLTGTGVLTESNKKFLPFQQFGRDIADTTDAVRDPQTLEILDITPCSFGGVSVITPGTNTSNQVAVLYQGVNCTEVPVAIHADQLTPTWRVYSTGSNVFQTRAGCLIGAEHVNNSYECDIPIGAGICASYQTQTNSPRRARSVASQSIIAYTMSLGAENSVAYSNNSIACPTNFTISVTTEILPVSMTKTSVDCTMYICGDSTECSNLLLQYGSFCTQLNRALTGIAVEQDKNTQEVFAQVKQIYKTPPIKDFGGFNFSQILPDPSKPSKRSFIEDLLFNKVTLADAGFIKQYGDCLGDIAARDLICAQKFNGLTVLPPLLTDEMIAQYTSALLAGTITSGWTFGAGAALQIPFAMQMAYRFNGIGVTQNVLYENQKLIANQFNSAIGKIQDSLSSTAPALGKLQDVVNQNAQALNTLVKQLSSNFGAISSVLNDILSRLDKVEAEVQIDRLITGRLQSLQTYVTQQLIRAAEIRASANLAATKMSECVLGQSKRVDFCGKGYHLMSFPQSAPHGVVFLHVTYVPAQEKNFTTAPAICHDGKAHFPREGVFVSNGTHWFVTQRNFCEPQIITTDNTFVSGNCDVVIGIVNNTVYDPLQPELDSFKEELDKYFKNHTSPDVDLGDISGINASVVNIQKEIDRLNEVAKNLNESLIDLQELGKYEQYIK

SEQ ID NO: 2043 - protein, 1211 aa, Artificial Sequence
  SARS-CoV-2/Germany/BavPat3/2020__EPI_ISL_414521 spike protein (1-1211)(I714C_Y1110C)
MFVFLVLLPLVSSQCVNLTTRTQLPPAYTNSFTRGVYYPDKVFRSSVLHSTQDLFLPFFSNVTWFHAIHVSGTNGTKRFDNPVLPFNDGVYFASTEKSNIIRGWIFGTTLDSKTQSLLIVNNATNVVIKVCEFQFCNDPFLGVYYHKNNKSWMESEFRVYSSANNCTFEYVSQPFLMDLEGKQGNFKNLREFVFKNIDGYFKIYSKHTPINLVRDLPQGFSALEPLVDLPIGINITRFQTLLALHRSYLTPGDSSSGWTAGAAAYYVGYLQPRTFLLKYNENGTITDAVDCALDPLSETKCTLKSFTVEKGIYQTSNFRVQPTESIVRFPNITNLCPFGEVFNATRFASVYAWNRKRISNCVADYSVLYNSASFSTFKCYGVSPTKLNDLCFTNVYADSFVIRGDEVRQIAPGQTGKIADYNYKLPDDFTGCVIAWNSNNLDSKVGGNYNYLYRLFRKSNLKPFERDISTEIYQAGSTPCNGVEGFNCYFPLQSYGFQPTNGVGYQPYRVVVLSFELLHAPATVCGPKKSTNLVKNKCVNFNFNGLTGTGVLTESNKKFLPFQQFGRDIADTTDAVRDPQTLEILDITPCSFGGVSVITPGTNTSNQVAVLYQDVNCTEVPVAIHADQLTPTWRVYSTGSNVFQTRAGCLIGAEHVNNSYECDIPIGAGICASYQTQTNSPRRARSVASQSIIAYTMSLGAENSVAYSNNSIACPTNFTISVTTEILPVSMTKTSVDCTMYICGDSTECSNLLLQYGSFCTQLNRALTGIAVEQDKNTQQVFAQVKQIYKTPPIKDFGGFNFSQILPDPSKPSKRSFIEDLLFNKVTLADAGFIKQYGDCLGDIAARDLICAQKFNGLTVLPPLLTDEMIAQYTSALLAGTITSGWTFGAGAALQIPFAMQMAYRFNGIGVTQNVLYENQKLIANQFNSAIGKIQDSLSSTASALGKLQDVVNQNAQALNTLVKQLSSNFGAISSVLNDILSRLDKVEAEVQIDRLITGRLQSLQTYVTQQLIRAAEIRASANLAATKMSECVLGQSKRVDFCGKGYHLMSFPQSAPHGVVFLHVTYVPAQEKNFTTAPAICHDGKAHFPREGVFVSNGTHWFVTQRNFCEPQIITTDNTFVSGNCDVVIGIVNNTVYDPLQPELDSFKEELDKYFKNHTSPDVDLGDISGINASVVNIQKEIDRLNEVAKNLNESLIDLQELGKYEQYIK

SEQ ID NO: 2044 - protein, 1211 aa, Artificial Sequence
  SARS-CoV-2/France/HF1805/2020__EPI_ISL_414628 spike protein (1-1211)(I714C_Y1110C)
MFVFLVLLPLVSSQCVNLTTRTQLPPAYTNSFTRGVYYPDKVFRSSVLHSTQDLFLPFFSNVTWFHAIHVSGTNGTKRFDNPVLPFNDGVYFASTEKSNIIRGWIFGTTLDSKTQSLLIVNNATNVVIKVCEFQFCNDPFLGVYYHKNNKSWMESEFRVYSSANNCTFEYVSQPFLMDLEGKQGNFKNLREFVFKNIDGYFKIYSKHTPINLVRDLPQGFSALEPLVDLPIGINITRFQTLLALHRSYLTPGDSSSGWTAGAAAYYVGYLQPRTFLLKYNENGTITDAVDCALDPLSETKCTLKSFTVEKGIYQTSNFRVQPTESIVRFPNITNLCPFGEVFNATRFASVYAWNRKRISNCVADYSVLYNSASFSTFKCYGVSPTKLNDLCFTNVYADSFVIRGDEVRQIAPGQTGKIADYNYKLPDDFTGCVIAWNSNNLDSKVGGNYNYLYRLFRKSNLKPFERDISTEIYQAGSTPCNGVEGFNCYFPLQSYGFQPTNGVGYQPYRVVVLSFELLHAPATVCGPKKSTNLVKNKCVNFNFNGLTGTGVLTESNKKFLPFQQFGRDIADTTDAVRDPQTLEILDITPCSFGGVSVITPGTNTSNQVAVLYQGVNCTEVPVAIHADQLTPTWRVYSTGSNVFQTRAGCLIGAEHVNNSYECDIPIGAGICASYQTQTNSPRRARSVASQSIIAYTMSLGAENSVAYSNNSIACPTNFTISVTTEILPVSMTKTSVDCTMYICGDSTECSNLLLQYGSFCTQLNRALTGIAVEQDKNTQEVFAQVKQIYKTPPIKDFGGFNFSQILPDPSKPSKRSFIEDLLFNKVTLADAGFIKQYGDCLGDIAARDLICAQKFNGLTVLPPLLTDEMIAQYTSALLAGTITSGWTFGAGAALQIPFAMQMAYRFNGIGVTQNVLYENQKLIANQFNSAIGKIQDSLSSTASALGKLQDVVNQNAQALNTLVKQLSSNFGAISSVLNDILSRLDKVEAEVQIDRLITGRLQSLQTYVTQQLIRAAEIRASANLAATKMSECVLGQSKRVDFCGKGYHLMSFPQSAPHGVVFLHVTYVPAQEKNFTTAPAICHDGKAHFPREGVFVSNGTHWFVTQRNFCEPQIITTDNTFVSGNCDVVIGVVNNTVYDPLQPELDSFKEELDKYFKNHTSPDVDLGDISGINASVVNIQKEIDRLNEVAKNLNESLIDLQELGKYEQYIK

SEQ ID NO: 2045 - protein, 1211 aa, Artificial Sequence
  SARS-CoV-2/Netherlands/ZuidHolland_9/2020__EPI_ISL_414445 spike protein (1-1211)(I714C_Y1110C)
MFVFLVLLPLVSSQCVNLTTRTQLPPAYTNSFTRGVYYPDKVFRSSVLHSTQDLFLPFFSNVTWFHAIHVSGTNGTKRFDNPVLPFNDGVYFASTEKSNIIRGWIFGTTLDSKTQSLLIVNNATNVVIKVCEFQFCNDPFLGVYYHKNNKSWMESEFRVYSSANNCTFEYVSQPFLMDLEGKQGNFKNLREFVFKNIDGYFKIYSKHTPINLVRDLPQGFSALEPLVDLPIGINITRFQTLLALHRSYLTPGDSSSGWTAGAAAYYVGYLQPRTFLLKYNENGTITDAVDCALDPLSETKCTLKSFTVEKGIYQTSNFRVQPTESIVRFPNITNLCPFGEVFNATRFASVYAWNRKRISNCVADYSVLYNSASFSTFKCYGVSPTKLNDLCFTNVYADSFVIRGDEVRQIAPGQTGKIADYNYKLPDDFTGCVIAWNSNNLDSKVGGNYNYLYRLFRKSNLKPFERDISTEIYQAGSTPCNGVEGFNCYFPLQSYGFQPTNGVGYQPYRVVVLSFELLHAPATVCGPKKSTNLVKNKCVNFNFNGLTGTGVLTESNKKFLPFQQFGRDIADTTDAVRDPQTLEILDITPCSFGGVSVITPGTNTSNQVAVLYQGVNCTEVPVAIHADQLTPTWRVYSTGSNVFQTRAGCLIGAEHVNNSYECDIPIGAGICASYQTQTNSPRRARSVASQSIIAYTMSLGAENSVAYSNNSIACPTNFTISVTTEILPVSMTKTSVDCTMYICGDSTECSNLLLQYGSFCTQLNRALTGIAVEQDKNTQEVFAQVKQIYKTPPIKDFGGFNFSQILPDPSKPSKRSFIEDLLFNKVTLADAGFIKQYGDCLGDIAARDLICVQKFNGLTVLPPLLTDEMIAQYTSALLAGTITSGWTFGAGAALQIPFAMQMAYRFNGIGVTQNVLYENQKLIANQFNSAIGKIQDSLSSTASALGKLQDVVNQNAQALNTLVKQLSSNFGAISSVLNDILSRLDKVEAEVQIDRLITGRLQSLQTYVTQQLIRAAEIRASANLAATKMSECVLGQSKRVDFCGKGYHLMSFPQSAPHGVVFLHVTYVPAQEKNFTTAPAICHDGKAHFPREGVFVSNGTHWFVTQRNFCEPQIITTDNTFVSGNCDVVIGIVNNTVYDPLQPELDSFKEELDKYFKNHTSPDVDLGDISGINASVVNIQKEIDRLNEVAKNLNESLIDLQELGKYEQYIK

SEQ ID NO: 2046 - protein, 1211 aa, Artificial Sequence
  SARS-CoV-2/Finland/FIN03032020A/2020__EPI_ISL_413602 spike protein (1-1211)(I714C_Y1110C)
MFVFLVLLPLVSSQCVNLTTRTQLPPAYTNSFTRGVYYPDKVFRSSVLHSTQDLFLPFFSNVTWFHAIHVSGTNGTKRFDNPVLPFNDGVYFASTEKSNIIRGWIFGTTLDSKTQSLLIVNNATNVVIKVCEFQFCNDPFLGVYYHKNNKSWMESEFRVYSSANNCTFEYVSQPFLMDLEGKQGNFKNLREFVFKNIDGYFKIYSKHTPINLVRDLPQGFSALEPLVDLPIGINITRFQTLLALHRSYLTPGDSSSGWTAGAAAYYVGYLQPRTFLLKYNENGTITDAVDCALDPLSETKCTLKSFTVEKGIYQTSNFRVQPTESIVRFPNITNLCPFGEVFNATRFASVYAWNRKRISNCVADYSVLYNSASFSTFKCYGVSPTKLNDLCFTNVYADSFVIRGDEVRQIAPGQTGKIADYNYKLPDDFTGCVISWNSNNLDSKVGGNYNYLYRLFRKSNLKPFERDISTEIYQAGSTPCNGVEGFNCYFPLQSYGFQPTNGVGYQPYRVVVLSFELLHAPATVCGPKKSTNLVKNKCVNFNFNGLTGTGVLTESNKKFLPFQQFGRDIADTTDAVRDPQTLEILDITPCSFGGVSVITPGTNTSNQVAVLYQGVNCTEVPVAIHADQLTPTWRVYSTGSNVFQTRAGCLIGAEHVNNSYECDIPIGAGICASYQTQTNSPRRARSVASQSIIAYTMSLGAENSVAYSNNSIACPTNFTISVTTEILPVSMTKTSVDCTMYICGDSTECSNLLLQYGSFCTQLNRALTGIAVEQDKNTQEVFAQVKQIYKTPPIKDFGGFNFSQILPDPSKPSKRSFIEDLLFNKVTLADAGFIKQYGDCLGDIAARDLICAQKFNGLTVLPPLLTDEMIAQYTSALLAGTITSGWTFGAGAALQIPFAMQMAYRFNGIGVTQNVLYENQKLIANQFNSAIGKIQDSLSSTASALGKLQDVVNQNAQALNTLVKQLSSNFGAISSVLNDILSRLDKVEAEVQIDRLITGRLQSLQTYVTQQLIRAAEIRASANLAATKMSECVLGQSKRVDFCGKGYHLMSFPQSAPHGVVFLHVTYVPAQEKNFTTAPAICHDGKAHFPREGVFVSNGTHWFVTQRNFCEPQIITTDNTFVSGNCDVVIGIVNNTVYDPLQPELDSFKEELDKYFKNHTSPDVDLGDISGINASVVNIQKEIDRLNEVAKNLNESLIDLQELGKYEQYIK

SEQ ID NO: 2047 - protein, 1211 aa, Artificial Sequence
  SARS-CoV-2/France/GE1977/2020__EPI_ISL_414632 spike protein (1-1211)(I714C_Y1110C)
MFVFLVLLPLVSSQCVNLTTRTQLPPAYTNSFTRGVYYPDKVFRSSVLHSTQDLFLPFFSNVTWFHAIHVSGTNGTKRFDNPVLPFNDGVYFASTEKSNIIRGWIFGTTLDSKTQSLLIVNNATNVVIKVCEFQFCNDPFLGVYYHKNNKSWMESEFRVYSSANNCTFEYVSQPFLMDLEGKQGNFKNLREFVFKNIDGYFKIYSKHTPINLVRDLPQGFSALEPLVDLPIGINITRFQTLLALHRSYLTPGDSSSGWTAGAAAYYVGYLQPRTFLLKYNENGTITDAVDCALDPLSETKCTLKSFTVEKGIYQTSNFRVQPTESIVRFPNITNLCPFGEVFNATRFASVYAWNRKRISNCVADYSVLYNSASFSTFKCYGVSPTKLNDLCFTNVYADSFVIRGDEVRQIAPGQTGKIADYNYKLPDDFTGCVIAWNSNNLDSKVGGNYNYLYRLFRKSNLKPFERDISTEIYQAGSTPCNGVEGFNCYFPLQSYGFQPTNGVGYQPYRVVVLSFELLHAPATVCGPKKSTNLVKNKCVNFNFNGLTGTGVLTESNKKFLPFQQFGRDIADTTDAVRDPQTLEILDITPCSFGGVSVITPGTNTSNQVAVLYQGVNCTEVPVAIHADQLTPTWRVYSTGSNVFQTRAGCLIGAEHVNNSYECDIPIGAGICASYQTQTNSPRRARSVASQSIIAYTMSLGAENSVAYSNNSIACPTNFTISVTTEILPVSMTKTSVDCTMYICGDSTECSNLLLQYGSFCTQLNRALTGIAVEQDKNTQEVFAQVKQIYKTPPIKDFGGFNFSQILPDPSKPSKRSFIEDLLFNKVTLADAGFIKQYGDCLGDIAARDLICAQKFNGLTVLPPLLTDEMIAQYTSALLAGTITSGWTFGAGAALQIPFAMQMAYRFNGIGVTQNVLYENQKLIANQFNSAIGKIQDSLFSTASALGKLQDVVNQNAQALNTLVKQLSSNFGAISSVLNDILSRLDKVEAEVQIDRLITGRLQSLQTYVTQQLIRAAEIRASANLAATKMSECVLGQSKRVDFCGKGYHLMSFPQSAPHGVVFLHVTYVPAQEKNFTTAPAICHDGKAHFPREGVFVSNGTHWFVTQRNFCEPQIITTDNTFVSGNCDVVIGIVNNTVYDPLQPELDSFKEELDKYFKNHTSPDVDLGDISGINASVVNIQKEIDRLNEVAKNLNESLIDLQELGKYEQYIK

SEQ ID NO: 2048 - protein, 1211 aa, Artificial Sequence
  SARS-CoV-2/Finland/FIN-313/2020__EPI_ISL_414641 spike protein (1-1211)(I714C_Y1110C)
MFVFLVLLPLVSSQCVNLTTRTQLPPAYTNSFTRGVYYPDKVFRSSVLHSTQDLFLPFFSNVTWFHAIHVSGTNGTKRFDNPVLPFNDGVYFASTEKSNIIRGWIFGTTLDSKTQSLLIVNNATNVVIKVCEFQFCNDPFLGVYYHKNNKSWMESEFRVYSSANNCTFEYVSQPFLMDLEGKQGNFKNLREFVFKNIDGYFKIYSKHTPINLVRDLPQGFSALEPLVDLPIGINITRFKTLLALHRSYLTPGDSSSGWTAGAAAYYVGYLQPRTFLLKYNENGTITDAVDCALDPLSETKCTLKSFTVEKGIYQTSNFRVQPTESIVRFPNITNLCPFGEVFNATRFASVYAWNRKRISNCVADYSVLYNSASFSTFKCYGVSPTKLNDLCFTNVYADSFVIRGDEVRQIAPGQTGKIADYNYKLPDDFTGCVIAWNSNNLDSKVGGNYNYLYRLFRKSNLKPFERDISTEIYQAGSTPCNGVEGFNCYFPLQSYGFQPTNGVGYQPYRVVVLSFELLHAPATVCGPKKSTNLVKNKCVNFNFNGLTGTGVLTESNKKFLPFQQFGRDIADTTDAVRDPQTLEILDITPCSFGGVSVITPGTNTSNQVAVLYQGVNCTEVPVAIHADQLTPTWRVYSTGSNVFQTRAGCLIGAEHVNNSYECDIPIGAGICASYQTQTNSPRRARSVASQSIIAYTMSLGAENSVAYSNNSIACPTNFTISVTTEILPVSMTKTSVDCTMYICGDSTECSNLLLQYGSFCTQLNRALTGIAVEQDKNTQEVFAQVKQIYKTPPIKDFGGFNFSQILPDPSKPSKRSFIEDLLFNKVTLADAGFIKQYGDCLGDIAARDLICAQKFNGLTVLPPLLTDEMIAQYTSALLAGTITSGWTFGAGAALQIPFAMQMAYRFNGIGVTQNVLYENQKLIANQFNSAIGKIQDSLSSTASALGKLQDVVNQNAQALNTLVKQLSSNFGAISSVLNDILSRLDKVEAEVQIDRLITGRLQSLQTYVTQQLIRAAEIRASANLAATKMSECVLGQSKRVDFCGKGYHLMSFPQSAPHGVVFLHVTYVPAQEKNFTTAPAICHDGKAHFPREGVFVSNGTHWFVTQRNFCEPQIITTDNTFVSGNCDVVIGIVNNTVYDPLQPELDSFKEELDKYFKNHTSPDVDLGDISGINASVVNIQKEIDRLNEVAKNLNESLIDLQELGKYEQYIK

SEQ ID NO: 2049 - protein, 1211 aa, Artificial Sequence
  SARS-CoV-2/Netherlands/ZuidHolland_2/2020__EPI_ISL_414556 spike protein (1-1211)(I714C_Y1110C)
MFVFLVLLPLVSSQCVNLTTRTQLPPAYTNSFTRGVYYPDKVFRSSVLHSTQDLFLPFFSNVTWFHAIHVSGTNGTKRFDNPVLPFNDGVYFASTEKSNIIRGWIFGTTLDSKTQSLLIVNNATNVVIKVCEFQFCNDPFLGVYYHKNNKSWMESEFRVYSSANNCTFEYVSQPFLMDLEGKQGNFKNLREFVFKNIDGYFKIYSKHTPINLVRDLPQGFSALEPLVDLPIGINITRFQTLLALHRSYLTPGDSSSGWTAGAAAYYVGYLQPRTFLLKYNENGTITDAVDCALDPLSETKCTLKSFTVEKGIYQTSNFRVQPTESIVRFPNITNLCPFGEVFNATRFASVYAWNRKRISNCVADYSVLYNSASFSTFKCYGVSPTKLNDLCFTNVYADSFVIRGDEVRQIAPGQTGKIADYNYKLPDDFTGCVIAWNSNNLDSKVGGNYNYLYRLFRKSNLKPFERDISTEIYQAGSTPCNGVEGFNCYFPLQSYGFQPTNGVGYQPYRVVVLSFELLHAPATVCGPKKSTNLVKNKCVNFNFNGLTGTGVLTESNKKFLPFQQFGRDIADTTDAVRDPQTLEILDITPCSFGGVSVITPGTNTSNQVAVLYQGVNCTEVPVAIHADQLTPTWRVYSTGSNVFQTRAGCLIGAEHVNNSYECDIPIGAGICASYQTQTNSPRRARSVASQSIIAYTMSLGAENSVAYSNNSIACPTNFTISVTTEILPVSMTKTSVDCTMYICGDSTECSNLLLQYGSFCTQLNRALTGIALEQDKNTQEVFAQVKQIYKTPPIKDFGGFNFSQILPDPSKPSKRSFIEDLLFNKVTLADAGFIKQYGDCLGDIAARDLICAQKFNGLTVLPPLLTDEMIAQYTSALLAGTITSGWTFGAGAALQIPFAMQMAYRFNGIGVTQNVLYENQKLIANQFNSAIGKIQDSLSSTASALGKLQDVVNQNAQALNTLVKQLSSNFGAISSVLNDILSRLDKVEAEVQIDRLITGRLQSLQTYVTQQLIRAAEIRASANLAATKMSECVLGQSKRVDFCGKGYHLMSFPQSAPHGVVFLHVTYVPAQEKNFTTAPAICHDGKAHFPREGVFVSNGTHWFVTQRNFCEPQIITTDNTFVSGNCDVVIGIVNNTVYDPLQPELDSFKEELDKYFKNHTSPDVDLGDISGINASVVNIQKEIDRLNEVAKNLNESLIDLQELGKYEQYIK

SEQ ID NO: 2050 - protein, 1211 aa, Artificial Sequence
  SARS-CoV-2/USA/WA-UW31/2020__EPI_ISL_414618 spike protein (1-1211)(I714C_Y1110C)
MFVFLVLLPLVSSQCVNLTTRTQLPPAYTNSFTRGVYYPDKVFRSSVLHSTQDLFLPFFSNVTWFHAIHVSGTNGTKRFDNPVLPFNDGVYFASTEKSNIIRGWIFGTTLDSKTQSLLIVNNATNVVIKVCEFQFCNDPFLGVYYHKNNKSWMESEFRVYSSANNCTFEYVSQPFLMDLEGKQGNFKNLREFVFKNIDGYFKIYSKHTPINLVRDLPQGFSALEPLVDLPIGINITRFQTLLALHRSYLTPGDSSSGWTAGAAAYYVGYLQPRTFLLKYNENGTITDAVDCALDPLSETKCTLKSFTVEKGIYQTSNFRVQPTESIVRFPNITNLCPFGEVFNATRFASVYAWNRKRISNCVADYSVLYNSASFSTFKCYGVSPTKLNDLCFTNVYADSFVIRGDEVRQIAPGQTGKIADYNYKLPDDFTGCVIAWNSNNLDSKVGGNYNYLYRLFRKSNLKPFERDISTEIYQAGSTPCNGAEGFNCYFPLQSYGFQPTNGVGYQPYRVVVLSFELLHAPATVCGPKKSTNLVKNKCVNFNFNGLTGTGVLTESNKKFLPFQQFGRDIADTTDAVRDPQTLEILDITPCSFGGVSVITPGTNTSNQVAVLYQDVNCTEVPVAIHADQLTPTWRVYSTGSNVFQTRAGCLIGAEHVNNSYECDIPIGAGICASYQTQTNSPRRARSVASQSIIAYTMSLGAENSVAYSNNSIACPTNFTISVTTEILPVSMTKTSVDCTMYICGDSTECSNLLLQYGSFCTQLNRALTGIAVEQDKNTQEVFAQVKQIYKTPPIKDFGGFNFSQILPDPSKPSKRSFIEDLLFNKVTLADAGFIKQYGDCLGDIAARDLICAQKFNGLTVLPPLLTDEMIAQYTSALLAGTITSGWTFGAGAALQIPFAMQMAYRFNGIGVTQNVLYENQKLIANQFNSAIGKIQDSLSSTASALGKLQDVVNQNAQALNTLVKQLSSNFGAISSVLNDILSRLDKVEAEVQIDRLITGRLQSLQTYVTQQLIRAAEIRASANLAATKMSECVLGQSKRVDFCGKGYHLMSFPQSAPHGVVFLHVTYVPAQEKNFTTAPAICHDGKAHFPREGVFVSNGTHWFVTQRNFCEPQIITTDNTFVSGNCDVVIGIVNNTVYDPLQPELDSFKEELDKYFKNHTSPDVDLGDISGINASVVNIQKEIDRLNEVAKNLNESLIDLQELGKYEQYIK

SEQ ID NO: 2051 - protein, 1211 aa, Artificial Sequence
  SARS-CoV-2/South Korea/SNU01/2020__EPI_ISL_411929 spike protein (1-1211)(I714C_Y1110C)
MFVFLVLLPLVSSQCVNLTTRTQLPPAYTNSFTRGVYYPDKVFRSSVLHSTQDLFLPFFSNVTWFHAIHVSGTNGTKRFDNPVLPFNDGVYFASTEKSNIIRGWIFGTTLDSKTQSLLIVNNATNVVIKVCEFQFCNDPFLGVYYHKNNKSWMESEFRVYSSANNCTFEYVSQPFLMDLEGKQGNFKNLREFVFKNIDGYFKIYSKHTPINLVRDLPQGFWALEPLVDLPIGINITRFQTLLALHRSYLTPGDSSSGWTAGAAAYYVGYLQPRTFLLKYNENGTITDAVDCALDPLSETKCTLKSFTVEKGIYQTSNFRVQPTESIVRFPNITNLCPFGEVFNATRFASVYAWNRKRISNCVADYSVLYNSASFSTFKCYGVSPTKLNDLCFTNVYADSFVIRGDEVRQIAPGQTGKIADYNYKLPDDFTGCVIAWNSNNLDSKVGGNYNYLYRLFRKSNLKPFERDISTEIYQAGSTPCNGVEGFNCYFPLQSYGFQPTNGVGYQPYRVVVLSFELLHAPATVCGPKKSTNLVKNKCVNFNFNGLTGTGVLTESNKKFLPFQQFGRDIADTTDAVRDPQTLEILDITPCSFGGVSVITPGTNTSNQVAVLYQDVNCTEVPVAIHADQLTPTWRVYSTGSNVFQTRAGCLIGAEHVNNSYECDIPIGAGICASYQTQTNSPRRARSVASQSIIAYTMSLGAENSVAYSNNSIACPTNFTISVTTEILPVSMTKTSVDCTMYICGDSTECSNLLLQYGSFCTQLNRALTGIAVEQDKNTQEVFAQVKQIYKTPPIKDFGGFNFSQILPDPSKPSKRSFIEDLLFNKVTLADAGFIKQYGDCLGDIAARDLICAQKFNGLTVLPPLLTDEMIAQYTSALLAGTITSGWTFGAGAALQIPFAMQMAYRFNGIGVTQNVLYENQKLIANQFNSAIGKIQDSLSSTASALGKLQDVVNQNAQALNTLVKQLSSNFGAISSVLNDILSRLDKVEAEVQIDRLITGRLQSLQTYVTQQLIRAAEIRASANLAATKMSECVLGQSKRVDFCGKGYHLMSFPQSAPHGVVFLHVTYVPAQEKNFTTAPAICHDGKAHFPREGVFVSNGTHWFVTQRNFCEPQIITTDNTFVSGNCDVVIGIVNNTVYDPLQPELDSFKEELDKYFKNHTSPDVDLGDISGINASVVNIQKEIDRLNEVAKNLNESLIDLQELGKYEQYIK

SEQ ID NO: 2052 - protein, 1211 aa, Artificial Sequence
  SARS-CoV-2/China/WF0004/2020__EPI_ISL_413694 spike protein (1-1211)(I714C_Y1110C)
MFVFLVLLPLVSSQCVNLTTRTQLPPAYTNSFTRGVYYPDKVFRSSVLHSTQDLFLPFFSNVTWFHAIHVSGTNGTKRFDNPVLPFNDGVYFASTEKSNIIRGWIFGTTLDSKTQSLLIVNNATNVVIKVCEFQFCNDPFLGVYYHKNNKSWTESEFRVYSSANNCTFEYVSQPFLMDLEGKQGNFKNLREFVFKNIDGYFKIYSKHTPINLVRDLPQGFSALEPLVDLPIGINITRFQTLLALHRSYLTPGDSSSGWTAGAAAYYVGYLQPRTFLLKYNENGTITDAVDCALDPLSETKCTLKSFTVEKGIYQTSNFRVQPTESIVRFPNITNLCPFGEVFNATRFASVYAWNRKRISNCVADYSVLYNSASFSTFKCYGVSPTKLNDLCFTNVYADSFVIRGDEVRQIAPGQTGKIADYNYKLPDDFTGCVIAWNSNNLDSKVGGNYNYLYRLFRKSNLKPFERDISTEIYQAGSTPCNGVEGFNCYFPLQSYGFQPTNGVGYQPYRVVVLSFELLHAPATVCGPKKSTNLVKNKCVNFNFNGLTGTGVLTESNKKFLPFQQFGRDIADTTDAVRDPQTLEILDITPCSFGGVSVITPGTNTSNQVAVLYQDVNCTEVPVAIHADQLTPTWRVYSTGSNVFQTRAGCLIGAEHVNNSYECDIPIGAGICASYQTQTNSPRRARSVASQSIIAYTMSLGAENSVAYSNNSIACPTNFTISVTTEILPVSMTKTSVDCTMYICGDSTECSNLLLQYGSFCTQLNRALTGIAVEQDKNTQEVFAQVKQIYKTPPIKDFGGFNFSQILPDPSKPSKRSFIEDLLFNKVTLADAGFIKQYGDCLGDIAARDLICAQKFNGLTVLPPLLTDEMIAQYTSALLAGTITSGWTFGAGAALQIPFAMQMAYRFNGIGVTQNVLYENQKLIANQFNSAIGKIQDSLSSTASALGKLQDVVNQNAQALNTLVKQLSSNFGAISSVLNDILSRLDKVEAEVQIDRLITGRLQSLQTYVTQQLIRAAEIRASANLAATKMSECVLGQSKRFDFCGKGYHLMSFPQSAPHGVVFLHVTYVPAQEKNFTTAPAICHDGKAHFPREGVFVSNGTHWFVTQRNFCEPQIITTDNTFVSGNCDVVIGIVNNTVYDPLQPELDSFKEELDKYFKNHTSPDVDLGDISGINASVVNIQKEIDRLNEVAKNLNESLIDLQELGKYEQYIK

SEQ ID NO: 2053 - protein, 1211 aa, Artificial Sequence
  SARS-CoV-2/China/WF0028/2020__EPI_ISL_413791 spike protein (1-1211)(I714C_Y1110C)
MFVFLVLLPLVSSQCVNLTTRTQLPPAYTNSFTRGVYYPDKVFRSSVLHSTQDLFLPFFSNVTWFHAIHVSGTNGTKRFDNPVLPFNDGVYFASTEKSNIIRGWIFGTTLDSKTQSLLIVNNATNVVIKVCEFQFCNDPFLGVYYHKNNKSWMESEFRVYSSANNCTFEYVSQPFLMDLEGKQGNFKNLREFVFKNIDGYFKIYSKHTPINLVRDLPQGFSALEPLVDLPIGINITRFQTLLALHRSYLTPGDSSSGWTAGAAAYYVGYLQPRTFLLKYNENGTITDAVDCALDPLSETKCTLKSFTVEKGIYQTSNFRVQPTESIVRFPNITNLCPFGEVFNATRFASVYAWNRKRISNCVADYSVLYNSASFSTFKCYGVSPTKLNDLCFTNVYADSFVIRGDEVRQIAPGQTGKIADYNYKLPDDFTGCVIAWNSNNLDSKVGGNYNYLYRLFRKSNLKPFERDISTEIYQAGSTPCNGVEGFNCYFPLQSYGFQPTNGVGYQPYRVVVLSFELLHAPATVCGPKKSTNLVKNKCVNFNFNGLTGTGVLTESNKKFLPFQQFGRDIADTTDAVRDPQTLEILDITPCSFGGVSVITPGTNTSNQVAVLYQDVNCTEVPVAIHADQLTPTWRVYSTGSNVFQTRAGCLIGAEHVNNSYECDIPIGAGICASYQTQTNSPRRARSVASQSIIAYTMSLGAENSVAYSNNSIACPTNFTISVTTEILPVSMTKTSVDCTMYICGDSTECSNLLLQYGSFCTQLNRALTGIAVEQDKNTQEVFAQVKQIYKTPPIKDFGGFNFSQILPDPSKPSKRSFIEDLLFNKVTLADAGFIKQYGDCLGDIAARDLICAQKFNGLTVLPPLLTDEMIAQYTSALLAGTITSGWTFGAGAALQIPFAMQMAYRFNGIGVTQNVLYENQKLIANQFNSAIGKIQDSLSSTASALGKLQDVVNQNAQALNTLVKQLSSNFGAISSVLNDILSRLDKVEAEVQIDRLITGRLQSLQTYVTQQLIRAAEIRASANLAATKMSECVLGQSKRVDFCGKGYHLMSFPQSAPHGVVFLHVTYVPAQEKNFTTAPAICHDGKAHFPREGVFVSNGTHWFVTQRNFCEPQIITTDNTFVSGNCDVVIGIVNNTVYDPLQPELESFKEELDKYFKNHTSPDVDLGDISGINASVVNIQKEIDRLNEVAKNLNESLIDLQELGKYEQYIK

SEQ ID NO: 2054 - protein, 1211 aa, Artificial Sequence
  SARS-CoV-2/2019-nCoV/USA-CruiseA-18/2020__MT159716.1 spike protein (1-1211)(I714C_Y1110C)
MFVFLVLLPLVSSQCVNLTTRTQLPPAYTNSFTRGVYYPDKVFRSSVLHSTQDLFLPFFSNVTWFHAIHVSGTNGTKRFDNPVLPFNDGVYFASTEKSNIIRGWIFGTTLDSKTQSLLIVNNATNVVIKVCEFQFCNDPFLGVYYHKNNKSWMESELRVYSSANNCTFEYVSQPFLMDLEGKQGNFKNLREFVFKNIDGYFKIYSKHTPINLVRDLPQGFSALEPLVDLPIGINITRFQTLLALHRSYLTPGDSSSGWTAGAAAYYVGYLQPRTFLLKYNENGTITDAVDCALDPLSETKCTLKSFTVEKGIYQTSNFRVQPTESIVRFPNITNLCPFGEVFNATRFASVYAWNRKRISNCVADYSVLYNSASFSTFKCYGVSPTKLNDLCFTNVYADSFVIRGDEVRQIAPGQTGKIADYNYKLPDDFTGCVIAWNSNNLDSKVGGNYNYLYRLFRKSNLKPFERDISTEIYQAGSTPCNGVEGFNCYFPLQSYGFQPTNGVGYQPYRVVVLSFELLHAPATVCGPKKSTNLVKNKCVNFNFNGLTGTGVLTESNKKFLPFQQFGRDIADTTDAVRDPQTLEILDITPCSFGGVSVITPGTNTSNQVAVLYQDVNCTEVPVAIHADQLTPTWRVYSTGSNVFQTRAGCLIGAEHVNNSYECDIPIGAGICASYQTQTNSPRRARSVASQSIIAYTMSLGAENSVAYSNNSIACPTNFTISVTTEILPVSMTKTSVDCTMYICGDSTECSNLLLQYGSFCTQLNRALTGIAVEQDKNTQEVFAQVKQIYKTPPIKDFGGFNFSQILPDPSKPSKRSFIEDLLFNKVTLADAGFIKQYGDCLGDIAARDLICAQKFNGLTVLPPLLTDEMIAQYTSALLAGTITSGWTFGAGAALQIPFAMQMAYRFNGIGVTQNVLYENQKLIANQFNSAIGKIQDSLSSTASALGKLQDVVNQNAQALNTLVKQLSSNFGAISSVLNDILSRLDKVEAEVQIDRLITGRLQSLQTYVTQQLIRAAEIRASANLAATKMSECVLGQSKRVDFCGKGYHLMSFPQSAPHGVVFLHVTYVPAQEKNFTTAPAICHDGKAHFPREGVFVSNGTHWFVTQRNFCEPQIITTDNTFVSGNCDVVIGIVNNTVYDPLQPELDSFKEELDKYFKNHTSPDVDLGDISGINASVVNIQKEIDRLNEVAKNLNESLIDLQELGKYEQYIK

SEQ ID NO: 2055 - protein, 1211 aa, Artificial Sequence
  SARS-CoV-2/SARS-CoV-2/Yunnan-01/human/2020/CHN__MT049951.1 spike protein (1-1211)(I714C_Y1110C)
MFVFLVLLPLVSSQCVNLTTRTQLPPANTNSFTRGVYYPDKVFRSSVLHSTQDLFLPFFSNVTWFHAIHVSGTNGTKRFDNPVLPFNDGVYFASTEKSNIIRGWIFGTTLDSKTQSLLIVNNATNVVIKVCEFQFCNDPFLGVYYHKNNKSWMESEFRVYSSANNCTFEYVSQPFLMDLEGKQGNFKNLREFVFKNIDGYFKIYSKHTPINLVRDLPQGFSALEPLVDLPIGINITRFQTLLALHRSYLTPGDSSSGWTAGAAAYYVGYLQPRTFLLKYNENGTITDAVDCALDPLSETKCTLKSFTVEKGIYQTSNFRVQPTESIVRFPNITNLCPFGEVFNATRFASVYAWNRKRISNCVADYSVLYNSASFSTFKCYGVSPTKLNDLCFTNVYADSFVIRGDEVRQIAPGQTGKIADYNYKLPDDFTGCVIAWNSNNLDSKVGGNYNYLYRLFRKSNLKPFERDISTEIYQAGSTPCNGVEGFNCYFPLQSYGFQPTNGVGYQPYRVVVLSFELLHAPATVCGPKKSTNLVKNKCVNFNFNGLTGTGVLTESNKKFLPFQQFGRDIADTTDAVRDPQTLEILDITPCSFGGVSVITPGTNTSNQVAVLYQDVNCTEVPVAIHADQLTPTWRVYSTGSNVFQTRAGCLIGAEHVNNSYECDIPIGAGICASYQTQTNSPRRARSVASQSIIAYTMSLGAENSVAYSNNSIACPTNFTISVTTEILPVSMTKTSVDCTMYICGDSTECSNLLLQYGSFCTQLNRALTGIAVEQDKNTQEVFAQVKQIYKTPPIKDFGGFNFSQILPDPSKPSKRSFIEDLLFNKVTLADAGFIKQYGDCLGDIAARDLICAQKFNGLTVLPPLLTDEMIAQYTSALLAGTITSGWTFGAGAALQIPFAMQMAYRFNGIGVTQNVLYENQKLIANQFNSAIGKIQDSLSSTASALGKLQDVVNQNAQALNTLVKQLSSNFGAISSVLNDILSRLDKVEAEVQIDRLITGRLQSLQTYVTQQLIRAAEIRASANLAATKMSECVLGQSKRVDFCGKGYHLMSFPQSAPHGVVFLHVTYVPAQEKNFTTAPAICHDGKAHFPREGVFVSNGTHWFVTQRNFCEPQIITTDNTFVSGNCDVVIGIVNNTVYDPLQPELDSFKEELDKYFKNHTSPDVDLGDISGINASVVNIQKEIDRLNEVAKNLNESLIDLQELGKYEQYIK

SEQ ID NO: 2056 - protein, 1211 aa, Artificial Sequence
  SARS-CoV-2/USA/WA-UW292/2020__EPI_ISL_418077 spike protein (1-1211)(I714C_Y1110C)
MFVFLVLLPLVSSQCVNLTTRTQLPPAYTNSFTRGVYYPDKVFRSSVLHSTQDLFLPFFSNVTWFHAIHVSGTNGTKRFDNPVLPFNDGVYFASTEKSNIIRGWIFGTTLDSKTQSLLIVNNATNVVIKVCEFQFCNDPFLGVYYHKNNKSWMESEFRVYSSANNCTFEYVSQPFLMDLEGKQGNFKNLREFVFKNIDGYFKIYSKHTPINLVRDLPQGFSALEPLVDLPIGINITRFQTLLALHRSYLTPGDSSSGWTAGAAAYYVGYLQPRTFLLKYNENGTITDAVDCALDPLSETKCTLKSFTVEKGIYQTSNFRVQPTESIVRFPNITNLCPFGEVFNATRFASVYAWNRKRISNCVADYSVLYNSASFSTFKCYGVSPTKLNDLCFTNVYADSFVIRGDEVRQIAPGQTGKIADYNYKLPDDFTGCVIAWNSNNLDSKVGGNYNYLYRLFRKSNLKPFERDISTEIYQASSTPCNGVEGFNCYFPLQSYGFQPTNGVGYQPYRVVVLSFELLHAPATVCGPKKSTNLVKNKCVNFNFNGLTGTGVLTESNKKFLPFQQFGRDIADTTDAVRDPQTLEILDITPCSFGGVSVITPGTNTSNQVAVLYQDVNCTEVPVAIHADQLTPTWRVYSTGSNVFQTRAGCLIGAEHVNNSYECDIPIGAGICASYQTQTNSPRRARSVASQSIIAYTMSLGAENSVAYSNNSIACPTNFTISVTTEILPVSMTKTSVDCTMYICGDSTECSNLLLQYGSFCTQLNRALTGIAVEQDKNTQEVFAQVKQIYKTPPIKDFGGFNFSQILPDPSKPSKRSFIEDLLFNKVTLADAGFIKQYGDCLGDIAARDLICAQKFNGLTVLPPLLTDEMIAQYTSALLAGTITSGWTFGAGAALQIPFAMQMAYRFNGIGVTQNVLYENQKLIANQFNSAIGKIQDSLSSTASALGKLQDVVNQNAQALNTLVKQLSSNFGAISSVLNDILSRLDKVEAEVQIDRLITGRLQSLQTYVTQQLIRAAEIRASANLAATKMSECVLGQSKRVDFCGKGYHLMSFPQSAPHGVVFLHVTYVPAQEKNFTTAPAICHDGKAHFPREGVFVSNGTHWFVTQRNFCEPQIITTDNTFVSGNCDVVIGIVNNTVYDPLQPELDSFKEELDKYFKNHTSPDVDLGDISGINASVVNIQKEIDRLNEVAKNLNESLIDLQELGKYEQYIK

SEQ ID NO: 2057 - protein, 1211 aa, Artificial Sequence
  SARS-CoV-2/Iceland/192/2020__EPI_ISL_417819 spike protein (1-1211)(I714C_Y1110C)
MFVFFVLLPLVSSQCVNLTTRTQLPPAYTNSFTRGVYYPDKVFRSSVLHSTQDLFLPFFSNVTWFHAIHVSGTNGTKRFDNPVLPFNDGVYFASTEKSNIIRGWIFGTTLDSKTQSLLIVNNATNVVIKVCEFQFCNDPFLGVYYHKNNKSWMESEFRVYSSANNCTFEYVSQPFLMDLEGKQGNFKNLREFVFKNIDGYFKIYSKHTPINLVRDLPQGFSALEPLVDLPIGINITRFQTLLALHRSYLTPGDSSSGWTAGAAAYYVGYLQPRTFLLKYNENGTITDAVDCALDPLSETKCTLKSFTVEKGIYQTSNFRVQPTESIVRFPNITNLCPFGEVFNATRFASVYAWNRKRISNCVADYSVLYNSASFSTFKCYGVSPTKLNDLCFTNVYADSFVIRGDEVRQIAPGQTGKIADYNYKLPDDFTGCVIAWNSNNLDSKVGGNYNYLYRLFRKSNLKPFERDISTEIYQAGSTPCNGVEGFNCYFPLQSYGFQPTNGVGYQPYRVVVLSFELLHAPATVCGPKKSTNLVKNKCVNFNFNGLTGTGVLTESNKKFLPFQQFGRDIADTTDAVRDPQTLEILDITPCSFGGVSVITPGTNTSNQVAVLYQGVNCTEVPVAIHADQLTPTWRVYSTGSNVFQTRAGCLIGAEHVNNSYECDIPIGAGICASYQTQTNSPRRARSVASQSIIAYTMSLGAENSVAYSNNSIACPTNFTISVTTEILPVSMTKTSVDCTMYICGDSTECSNLLLQYGSFCTQLNRALTGIAVEQDKNTQEVFAQVKQIYKTPPIKDFGGFNFSQILPDPSKPSKRSFIEDLLFNKVTLADAGFIKQYGDCLGDIAARDLICAQKFNGLTVLPPLLTDEMIAQYTSALLAGTITSGWTFGAGAALQIPFAMQMAYRFNGIGVTQNVLYENQKLIANQFNSAIGKIQDSLSSTASALGKLQDVVNQNAQALNTLVKQLSSNFGAISSVLNDILSRLDKVEAEVQIDRLITGRLQSLQTYVTQQLIRAAEIRASANLAATKMSECVLGQSKRVDFCGKGYHLMSFPQSAPHGVVFLHVTYVPAQEKNFTTAPAICHDGKAHFPREGVFVSNGTHWFVTQRNFCEPQIITTDNTFVSGNCDVVIGIVNNTVYDPLQPELDSFKEELDKYFKNHTSPDVDLGDISGINASVVNIQKEIDRLNEVAKNLNESLIDLQELGKYEQYIK

SEQ ID NO: 2058 - protein, 1211 aa, Artificial Sequence
  SARS-CoV-2/Belgium/ULG-6939/2020__EPI_ISL_417020 spike protein (1-1211)(I714C_Y1110C)
MFVFLVLLPLVSSQCVNLTTRTQLPPAYTNSFTRGVYYPDKVFRSSVLHSTQDLFLPFFSNVTWFHAIHVSGTNGTKRFDNPVLPFNDGVYFASTEKSNIIRGWIFGTTLDSKTQSLLIVNNATNVVIKVCEFQFCNDPFLGVYYHKNNKSWMESEFRVYSSANNCTFEYVSQPFLMDLEGKQGNFKNLREFVFKNIDGYFKIYSKHTPINLVRDLPQGFSALEPLVDLPIGINITRFQTLLALHRSYLTPGDSSSGWTAGAAAYYVGYLQPRTFLLKYNENGTITDAVDCALDPLSETKCTLKSFTVEKGIYQTSNFRVQPTESIVRFPNITNLCPFGEVFNATRFASVYAWNRKRISNCVADYSVLYNSASFSTFKCYGVSPTKLNDLCFTNVYADSFVIRGDEVRQIAPGQTGKIADYNYKLPDDFTGCVIAWNSNNLDSKVGGNYNYLYRLFRKSNLKPFERDISTEIYQAGSTPCNGVEGFNCYFPLQSYGFQPTNGVGYQPYRVVVLSFELLHAPATVCGPKKSTNLVKNKCVNFNFNGLTGTGVLTESNKKFLPFQQFGRDIADTTDAVRDPQTLEILDITPCSFGGVSVITPGTNTSNQVAVLYQGVNCTEVPVAIHADQLTPTWRVYSTGSNVFQTRAGCLIGAEHVNNSYECDIPIGAGICASYQTQTNSPRRARSVASQSIIAYTMSLGAENSVVYSNNSIACPTNFTISVTTEILPVSMTKTSVDCTMYICGDSTECSNLLLQYGSFCTQLNRALTGIAVEQDKNTQEVFAQVKQIYKTPPIKDFGGFNFSQILPDPSKPSKRSFIEDLLFNKVTLADAGFIKQYGDCLGDIAARDLICAQKFNGLTVLPPLLTDEMIAQYTSALLAGTITSGWTFGAGAALQIPFAMQMAYRFNGIGVTQNVLYENQKLIANQFNSAIGKIQDSLSSTASALGKLQDVVNQNAQALNTLVKQLSSNFGAISSVLNDILSRLDKVEAEVQIDRLITGRLQSLQTYVTQQLIRAAEIRASANLAATKMSECVLGQSKRVDFCGKGYHLMSFPQSAPHGVVFLHVTYVPAQEKNFTTAPAICHDGKAHFPREGVFVSNGTHWFVTQRNFCEPQIITTDNTFVSGNCDVVIGIVNNTVYDPLQPELDSFKEELDKYFKNHTSPDVDLGDISGINASVVNIQKEIDRLNEVAKNLNESLIDLQELGKYEQYIK

SEQ ID NO: 2059 - protein, 1211 aa, Artificial Sequence
  SARS-CoV-2/France/HF2496/2020__EPI_ISL_418231 spike protein (1-1211)(I714C_Y1110C)
MFVFLVLLPLVSSQCVNLTTRTQLPPAYTNSFTRGVYYPDKVFRSSVLHSTQDLFLPFFSNVTWFHAIHVSGTNGTKRFDNPVLPFNDGVYFASTEKSNIIRGWIFGTTLDSKTQSLLIVNNATNVVIKVCEFQFCNDPFLGVYYHKNNKSWMESEFRVYSSANNCTFEYVSQPFLMDLEGKQGNFKNLREFVFKNIDGYFKIYSKHTPINLVRDLPQGFSALEPLVDLPIGINITRFQTLLALHRSYLTPGDSSSGWTAGAAAYYVGYLQPRTFLLKYNENGTITDAVDCALDPLSETKCTLKSFTVEKGIYQTSNFRVQPTESIVRFPNITNLCPFGEVFNATRFASVYAWNRKRISNCVADYSVLYNSASFSTFKCYGVSPTKLNDLCFTNVYADSFVIRGDEVRQIAPGQTGKIADYNYKLPDDFTGCVIAWNSNNLDSKVGGNYNYLYRLFRKSNLKPFERDISTEIYQAGSTPCNGVEGFNCYFPLQSYGFQPTNGVGYQPYRVVVLSFELLHAPATVCGPKKSTNLVKNKCVNFNFNGLTGTGVLTESNKKFLPFQQFGRDIADTTDAVRDPQTLEILDITPCSFGGVSVITPGTNTSNQVAVLYQGVNCTEVPVAIHADQLTPTWRVYSTGSNVFQTRAGCLIGAEHVNNSYECDIPIGAGICASYQTQTNSPRRARSVASQSIIAYTMSLGAENSVAYSNNSIACPTNFTISVTTEILPVSMTKTSVDCTMYICGDSTECSNLLLQYGSFCTQLNRALTGIAVEQDKNTQEVFAQVKQIYKTPPIKDFGGFNFSQILPDPSKPSKRSFIEDLLFNKVTLADAGFIKQYGDCLGDIVARDLICAQKFNGLTVLPPLLTDEMIAQYTSALLAGTITSGWTFGAGAALQIPFAMQMAYRFNGIGVTQNVLYENQKLIANQFNSAIGKIQDSLSSTASALGKLQDVVNQNAQALNTLVKQLSSNFGAISSVLNDILSRLDKVEAEVQIDRLITGRLQSLQTYVTQQLIRAAEIRASANLAATKMSECVLGQSKRVDFCGKGYHLMSFPQSAPHGVVFLHVTYVPAQEKNFTTAPAICHDGKAHFPREGVFVSNGTHWFVTQRNFCEPQIITTDNTFVSGNCDVVIGIVNNTVYDPLQPELDSFKEELDKYFKNHTSPDVDLGDISGINASVVNIQKEIDRLNEVAKNLNESLIDLQELGKYEQYIK

SEQ ID NO: 2060 - protein, 1211 aa, Artificial Sequence
  SARS-CoV-2/USA/WA-UW291/2020__EPI_ISL_418076 spike protein (1-1211)(I714C_Y1110C)
MFVFLVLLPLVSSQCVNLTTRTQLPPAYTNSFTRGVYYPDKVFRSSVLHSTQDLFLPFFSNVTWFHAIHVSGTNGTKRFDNPVLPFNDGVYFASTEKSNIIRGWIFGTTLDSKTQSLLIVNNATNVVIKVCEFQFCNDPFLGVYYHKNNKSWMESEFRVYSSANNCTFEYVSQPFLMDLEGKQGNFKNLREFVFKNIDGYFKIYSKHTPINLVRDLPQGFSALEPLVDLPIGINITRFQTLLALHRSYLTPGDSSSGWTAGAAAYYVGYLQPRTFLLKYNENGTITDAVDCALDPLSETKCTLKSFTVEKGIYQTSNFRVQPTESIVRFPNITNLCPFGEVFNATRFASVYAWNRKRISNCVADYSVLYNSASFSTFKCYGVSPTKLNDLCFTNVYADSFVIRGDEVRQIAPGQTGKIADYNYKLPDDFTGCVIAWNSNNLDSKVGGNYNYLYRLFRKSNLKPFERDISTEIYQAGSTPCNGVEGFNCYFPLQSYGFQPTNGVGYQPYRVVVLSFELLHAPATVCGPKKSTNLVKNKCVNFNFNGLTGTGVLTESNKKFLPFQQFGRDIADTTDAVRDPQTLEILDITPCSFGGVSVITPGTNTSNQVAVLYQGVNCTEVPVAIHADQLTPTWRVYSTGSNVFQTRAGCLIGAEHVNNSYECDIPIGAGICASYQTQTNSPRRARSVASQSIIAYTMSLGAENSVAYSNNSIACPTNFTISVTTEILPVSMTKTSVDCTMYICGDSTECSNLLLQYGSFCTQLNRALTGIAVEQDKNTQEVFAQVKQIYKTPPIKDFGGFNFSQILPDPSKPSKRSFIEDLLFNKVTLADAGFIKQYGDCLGDIAARDLICAQKFNGLTVLPPLLTDEMIAQYTSALLAGTITSGWTFGAGAALQIPFAMQMAYRFNGIGVTQNVLYENQKLIANQFNSAIGKIQYSLSSTASALGKLQDVVNQNAQALNTLVKQLSSNFGAISSVLNDILSRLDKVEAEVQIDRLITGRLQSLQTYVTQQLIRAAEIRASANLAATKMSECVLGQSKRVDFCGKGYHLMSFPQSAPHGVVFLHVTYVPAQEKNFTTAPAICHDGKAHFPREGVFVSNGTHWFVTQRNFCEPQIITTDNTFVSGNCDVVIGIVNNTVYDPLQPELDSFKEELDKYFKNHTSPDVDLGDISGINASVVNIQKEIDRLNEVAKNLNESLIDLQELGKYEQYIK

SEQ ID NO: 2061 - protein, 1211 aa, Artificial Sequence; identical to SEQ ID NO: 2024
  SARS-CoV-2/Portugal/PT0034/2020__EPI_ISL_418019 spike protein (1-1211)(I714C_Y1110C)

SEQ ID NO: 2062 - protein, 1211 aa, Artificial Sequence
  SARS-CoV-2/Iceland/202/2020__EPI_ISL_417750 spike protein (1-1211)(I714C_Y1110C)
MFVFLVLLPLVSSQCVNLTTRTQLPPAYTNSFTRGVYYPDKVFRSSVLHSTQDLFLPFFSNVTWFHAIHVSGTNGTKRFDNPVLPFNDGVYFASTEKSNIIRGWIFGTTLDSKTQSLLIVNNATNVVIKVCEFQFCNDPFLGVYYHKNNKSWMESEFRVYSSANNCTFEYVSQPFLMDLEGKQGNFKNLREFVFKNIDGYFKIYSKHTPINLVRDLPQGFSALEPLVDLPIGINITRFQTLLALHRSYLTPGDSSSGWTAGAAAYYVGYLQPRTFLLKYNENGTITDAVDCALDPLSETKCTLKSFTVEKGIYQTSNFRVQPTESIVRFPNITNLCPFGEVFNATRFASVYAWNRKRISNCVADYSVLYNSASFSTFKCYGVSPTKLNDLCFTNVYADSFVIRGDEVRQIAPGQTGKIADYNYKLPDDFTGCVIAWNSNNLDSKVGGNYNYLYRLFRKSNLKPFERDISTEIYQAGSTPCNGVEGFNCYFPLQSYGFQPTNGVGYQPYRVVVLSFELLHAPATVCGPKKSTNLVKNKCVNFNFNGLTGTGVLTESNKKFLPFQQFGRDIADTTDAVRDPQTLEILDITPCSFGGVSVITPGTNTSNQVAVLYQDVNCTEVPVAIHADQLTPTWRVYSTGSNVFQTRAGCLIGAEHVNNSYECDIPIGAGICASYQTQTNSPRRARSVASQSIIAYTMSLGAENSVAYSNNSIACPTNFTISVTTEILPVSMTKTSVDCTMYICGDSTECSNLLLQYGSFCTQLNRALTGIAVEQDKNTQEVFAQVKQIYKTPPIKDFGGFNFSQILPDPSKPSKRSFIEDLLFNKVTLADAGFIKQYGDCLGDIAARDLICAQKFNGLTVLPPLLTDEMIAQYTSALLAGTITSGWTFGAGAALQIPFAMQMAYRFNGIGVTQNVLYENQKLIANQFNSAIGKIQDSLSSTASALGKLQDVVNQNAQALNTLVKQLSSNFGAISSVLNDILSRLDKVEAEVQIDRLITGRLQSLQTYVTQQLIRAAEIRASANLAATKMSECVLGQSKRVDFCGKGYHLMSFPQSAPHGVVFLHVTYVPAQEKNFTTAPAICHDGKAHFPREGVFVSNGTHWFVTQRNFCEPQIITTDNTFVSGNCDVVIGIVNNTVYDPLQPELDSFKEELDKYFKNHTSPDVDLGDIPGINASVVNIQKEIDRLNEVAKNLNESLIDLQELGKYEQYIK

SEQ ID NO: 2063 - protein, 1211 aa, Artificial Sequence
  SARS-CoV-2/USA/WA-UW261/2020__EPI_ISL_418046 spike protein (1-1211)(I714C_Y1110C)
MFVFLVLLPLVSSQCVNLTTRTQLPPAYTNSFTRGVYYPDKVFRSSVLHSTQDLFLPFFSNVTWFHAIHVSGTNGTKRFDNPVLPFNDGVYFASTEKSNIIRGWIFGTTLDSKTQSLLIVNNATNVVIKVCEFQFCNDPFLGVYYHKNNKSWMESEFRVYSSANNCTFEYVSQPFLMDLEGKQGNFKNLREFVFKNIDGYFKIYSKHTPINLVRDLPQGFSALEPLVDLPIGINITRFQTLLALHRSYLTPGDSSSGWTAGAAAYYVGYLQPRTFLLKYNENGTITDAVDCALDPLSETKCTLKSFTVEKGIYQTSNFRVQPTESIVRFPNITNLCPFGEVFNATRFTSVYAWNRKRISNCVADYSVLYNSASFSTFKCYGVSPTKLNDLCFTNVYADSFVIRGDEVRQIAPGQTGKIADYNYKLPDDFTGCVIAWNSNNLDSKVGGNYNYLYRLFRKSNLKPFERDISTEIYQAGSTPCNGVEGFNCYFPLQSYGFQPTNGVGYQPYRVVVLSFELLHAPATVCGPKKSTNLVKNKCVNFNFNGLTGTGVLTESNKKFLPFQQFGRDIADTTDAVRDPQTLEILDITPCSFGGVSVITPGTNTSNQVAVLYQDVNCTEVPVAIHADQLTPTWRVYSTGSNVFQTRAGCLIGAEHVNNSYECDIPIGAGICASYQTQTNSPRRARSVASQSIIAYTMSLGAENSVAYSNNSIACPTNFTISVTTEILPVSMTKTSVDCTMYICGDSTECSNLLLQYGSFCTQLNRALTGIAVEQDKNTQEVFAQVKQIYKTPPIKDFGGFNFSQILPDPSKPSKRSFIEDLLFNKVTLADAGFIKQYGDCLGDIAARDLICAQKFNGLTVLPPLLTDEMIAQYTSALLAGTITSGWTFGAGAALQIPFAMQMAYRFNGIGVTQNVLYENQKLIANQFNSAIGKIQDSLSSTASALGKLQDVVNQNAQALNTLVKQLSSNFGAISSVLNDILSRLDKVEAEVQIDRLITGRLQSLQTYVTQQLIRAAEIRASANLAATKMSECVLGQSKRVDFCGKGYHLMSFPQSAPHGVVFLHVTYVPAQEKNFTTAPAICHDGKAHFPREGVFVSNGTHWFVTQRNFCEPQIITTDNTFVSGNCDVVIGIVNNTVYDPLQPELDSFKEELDKYFKNHTSPDVDLGDISGINASVVNIQKEIDRLNEVAKNLNESLIDLQELGKYEQYIK

SEQ ID NO: 2064 - protein, 1211 aa, Artificial Sequence
  SARS-CoV-2/Portugal/PT0035/2020__EPI_ISL_418020 spike protein (1-1211)(I714C_Y1110C)
MFVFLVLLPLVSSQCVNLTTRTQLPPAYTNSFTRGVYYPDKVFRSSVLHSTQDLFLPFFSNVTWFHAIHVSGTNGTKRFDNPVLPFNDGVYFASTEKSNIIRGWIFGTTLDSKTQSLLIVNNATNVVIKVCEFQFCNDPFLGVYYHKNNKSWMESEFRVYSSANNCTFEYVSQPFLMDLEGKQGNFKNLREFVFKNIDGYFKIYSKHTPINLVRDLPQGFSALEPLVDLPIGINITRFQTLLALHRSYLTPGDSSSGWTAGAAAYYVGYLQPRTFLLKYNENGTITDAVDCALDPLSETKCTLKSFTVEKGIYQTSNFRVQPTESIVRFPNITNLCPFGEVFNATRFASVYAWNRKRISNCVADYSVLYNSASFSTFKCYGVSPTKLNDLCFTNVYADSFVIRGDEVRQIAPGQTGKIADYNYKLPDDFTGCVIAWNSNNLDSKVGGNYNYLYRLFRKSNLKPFERDISTEIYQAGSTPCNGVEGFNCYFPLQSYGFQPTNGVGYQPYRVVVLSFELLHAPATVCGPKKSTNLVKNKCVNFNFNGLTGTGVLTESNKKFLPFQQFGRDIADTTDAVRDPQTLEILDITPCSFGGVSVITPGTNTSNQVAVLYQDVNCTEVPVAIHADQLTPTWRVYSTGSNVFQTRAGCLIGAEHVNNSYECDIPIGAGICASYQTQTNSPRRARSVASQSIIAYTMSLGAENSVAYSNNSIACPTNFTISVTTEILPVSMTKTSVDCTMYICGDSTECSNLLLQYGSFCTQLNRALTGIAVEQDKNTQEVFAQVKQIYKTPPIKDFGGFNFSQILPDPSKPSKRSFIEDLLFNKVTLADAGFIKQYGDCLGDISARDLICAQKFNGLTVLPPLLTDEMIAQYTSALLAGTITSGWTFGAGAALQIPFAMQMAYRFNGIGVTQNVLYENQKLIANQFNSAIGKIQDSLSSTASALGKLQDVVNQNAQALNTLVKQLSSNFGAISSVLNDILSRLDKVEAEVQIDRLITGRLQSLQTYVTQQLIRAAEIRASANLAATKMSECVLGQSKRVDFCGKGYHLMSFPQSAPHGVVFLHVTYVPAQEKNFTTAPAICHDGKAHFPREGVFVSNGTHWFVTQRNFCEPQIITTDNTFVSGNCDVVIGIVNNTVYDPLQPELDSFKEELDKYFKNHTSPDVDLGDISGINASVVNIQKEIDRLNEVAKNLNESLIDLQELGKYEQYIK

SEQ ID NO: 2065 - protein, 1211 aa, Artificial Sequence
  SARS-CoV-2/USA/NY-NYUMC7/2020__EPI_ISL_418192 spike protein (1-1211)(I714C_Y1110C)
MFVFLVLLPLVSSQCVNLTTRTQLPPAYTNSFTRGVYYPDKVFRSSVLHSTQDLFLPFFSNVTWFHAIHVSGTNGTKRFDNPVLPFNDGVYFASTEKSNIIRGWIFGTTLDSKTQSLLIVNNATNVVIKVCEFQFCNDPFLGVYHHKNNKSWMESEFRVYSSANNCTFEYVSQPFLMDLEGKQGNFKNLREFVFKNIDGYFKIYSKHTPINLVRDLPQGFSALEPLVDLPIGINITRFQTLLALHRSYLTPGDSSSGWTAGAAAYYVGYLQPRTFLLKYNENGTITDAVDCALDPLSETKCTLKSFTVEKGIYQTSNFRVQPTESIVRFPNITNLCPFGEVFNATRFASVYAWNRKRISNCVADYSVLYNSASFSTFKCYGVSPTKLNDLCFTNVYADSFVIRGDEVRQIAPGQTGKIADYNYKLPDDFTGCVIAWNSNNLDSKVGGNYNYLYRLFRKSNLKPFERDISTEIYQAGSTPCNGVEGFNCYFPLQSYGFQPTNGVGYQPYRVVVLSFELLHAPATVCGPKKSTNLVKNKCVNFNFNGLTGTGVLTESNKKFLPFQQFGRDIADTTDAVRDPQTLEILDITPCSFGGVSVITPGTNTSNQVAVLYQGVNCTEVPVAIHADQLTPTWRVYSTGSNVFQTRAGCLIGAEHVNNSYECDIPIGAGICASYQTQTNSPRRARSVASQSIIAYTMSLGAENSVAYSNNSIACPTNFTISVTTEILPVSMTKTSVDCTMYICGDSTECSNLLLQYGSFCTQLNRALTGIAVEQDKNTQEVFAQVKQIYKTPPIKDFGGFNFSQILPDPSKPSKRSFIEDLLFNKVTLADAGFIKQYGDCLGDIAARDLICAQKFNGLTVLPPLLTDEMIAQYTSALLAGTITSGWTFGAGAALQIPFAMQMAYRFNGIGVTQNVLYENQKLIANQFNSAIGKIQDSLSSTASALGKLQDVVNQNAQALNTLVKQLSSNFGAISSVLNDILSRLDKVEAEVQIDRLITGRLQSLQTYVTQQLIRAAEIRASANLAATKMSECVLGQSKRVDFCGKGYHLMSFPQSAPHGVVFLHVTYVPAQEKNFTTAPAICHDGKAHFPREGVFVSNGTHWFVTQRNFCEPQIITTDNTFVSGNCDVVIGIVNNTVYDPLQPELDSFKEELDKYFKNHTSPDVDLGDISGINASVVNIQKEIDRLNEVAKNLNESLIDLQELGKYEQYIK

SEQ ID NO: 2066 - protein, 1211 aa, Artificial Sequence
  SARS-CoV-2/Iceland/189/2020__EPI_ISL_417709 spike protein (1-1211)(I714C_Y1110C)
MFVFLVLLPLVSSQCVNLTTRTQLPPAYTNSFTRGVYYPDKVFRSSVLHSTQDLFLPFFSNVTWFHAIHVSGTNGTKRFDNPVLPFNDGVYFASTEKSNIIRGWIFGTTLDSKTQSLLIVNNATNVVIKVCEFQFCNDPFLGVYYHKNNKSWMESEFRVYSSANNCTFEYVSQPFLMDLEGKQGNFKNLREFVFKNIDGYFKIYSKHTPINLVRDLPQGFSALEPLVDLPIGINITRFQTLLALHRSYLTPGDSSSGWTAGAAAYYVGYLQPRTFLLKYNENGTITDAVDCALDPLSETKCTLKSFTVEKGIYQTSNFRVQPTESIVRFPNITNLCPFGEVFNATRFASVYAWNRKRISNCVADYSVLYNSASFSTFKCYGVSPTKLNDLCFTNVYADSFVIRGDEVRQIAPGQTGKIADYNYKLPDDFTGCVIAWNSNNLDSKVGGNYNYLYRLFRKSNLKPFERDISTEIYQAGSTPCNGVEGFNCYFPLQSYGFQPTNGVGYQPYRVVVLSFELLHAPATVCGPKKSTNLVKNKCVNFNFNGLTGTGVLTESNKKFLPFQQFGRDIADTTDAVRDPQTLEILDITPCSFGGVSVITPGTNTSNQVAVLYQGVNCTEVPVAIHADQLTPTWRVYSTGSNVFQTRAGCLIGAEHVNNSYECDIPIGAGICASYQTQTNSPRRARSVASQSIIAYTMSLGAENSVAYSNNSIACPTNFTISVTTEILPVSMTKTSVDCTMYICGDSTECSNLLLQYGSFCTQLNRALTGIAVEQDKNTQEVFAQVKQIYKTPPIKDFGGFNFSQILPDPSKPSKRSFIEDLLFNKVTLADAGFTKQYGDCLGDIAARDLICAQKFNGLTVLPPLLTDEMIAQYTSALLAGTITSGWTFGAGAALQIPFAMQMAYRFNGIGVTQNVLYENQKLIANQFNSAIGKIQDSLSSTASALGKLQDVVNQNAQALNTLVKQLSSNFGAISSVLNDILSRLDKVEAEVQIDRLITGRLQSLQTYVTQQLIRAAEIRASANLAATKMSECVLGQSKRVDFCGKGYHLMSFPQSAPHGVVFLHVTYVPAQEKNFTTAPAICHDGKAHFPREGVFVSNGTHWFVTQRNFCEPQIITTDNTFVSGNCDVVIGIVNNTVYDPLQPELDSFKEELDKYFKNHTSPDVDLGDISGINASVVNIQKEIDRLNEVAKNLNESLIDLQELGKYEQYIK

SEQ ID NO: 2067 - protein, 1211 aa, Artificial Sequence
  SARS-CoV-2/Australia/NSW56/2020__EPI_ISL_417408 spike protein (1-1211)(I714C_Y1110C)
MFVFLVLLPLVSSQCVNLTTRTQLPPAYTNSFTRGVYYPDKVFRSSVLHSTQDLFLPFFSNVTWFHAIHVSGTNGTKRFDNPVLPFNDGVYFASTEKSNIIRGWIFGTTLDSKTQSLLIVNNATNVVIKVCEFQFCNDPFLGVYYHKNNKSWMESEFRVYSSANNCTFEYVSQPFLMDLEGKQGNFKNLREFVFKNIDGYFKIYSKHTPINLVRDLPQGFSALEPLVDLPIGINITRFQTLLALHRSYLTPGDSSSGWTAGAAAYYVGYLQPRTFLLKYNENGTITDAVDCALDPLSETKCTLKSFTVEKGIYQTSNFRVQPTESIVRFPNITNLCPFGEVFNATRFASVYAWNRKRISNCVADYSVLYNSASFSTFKCYGVSPTKLNDLCFTNVYADSFVIRGDEVRQIAPGQTGKIADYNYKLPDDFTGCVIAWNSNNLDSKVGGNYNYLYRLFRKSNLKPFERDISTEIYQAGSTPCNGVEGFNCYFPLQSYGFQPTNGVGYQPYRVVVLSFELLHAPATVCGPKKSTNLVKNKCVNFNFNGLTGTGVLTESNKKFLPFQQFGRDIADTTDAVRDPQTLEILDITPCSFGGVSVITPGTNTSNQVAVLYQDVNCTEVPVAIHADQLTPTWRVYSTGSNVFQTRAGCLIGAEHVNNSYECDIPIGAGICASYQTQTNSPRRARSVASQSIIAYTMSLGAENSVAYSNNSIACPTNFTISVTTEILPVSMTKTSVDCTMYICGDSTECSNLLLQYGSFCTQLNRALTGIAVEQDKNTQEVFAQVKQIYKTPPIKDFGGFNFSQILPDSSKPSKRSFIEDLLFNKVTLADAGFIKQYGDCLGDIAARDLICAQKFNGLTVLPPLLTDEMIAQYTSALLAGTITSGWTFGAGAALQIPFAMQMAYRFNGIGVTQNVLYENQKLIANQFNSAIGKIQDSLSSTASALGKLQDVVNQNAQALNTLVKQLSSNFGAISSVLNDILSRLDKVEAEVQIDRLITGRLQSLQTYVTQQLIRAAEIRASANLAATKMSECVLGQSKRVDFCGKGYHLMSFPQSAPHGVVFLHVTYVPAQEKNFTTAPAICHDGKAHFPREGVFVSNGTHWFVTQRNFCEPQIITTDNTFVSGNCDVVIGIVNNTVYDPLQPELDSFKEELDKYFKNHTSPDVDLGDISGINASVVNIQKEIDRLNEVAKNLNESLIDLQELGKYEQYIK

SEQ ID NO: 2068 - protein, 1211 aa, Artificial Sequence
  SARS-CoV-2/Iceland/280/2020__EPI_ISL_417608 spike protein (1-1211)(I714C_Y1110C)
MFVFLVLLPLVSSQCVNLTTRTQLPPAYTNSFTRGVYYPDKVFRSSVLHSTQDLFLPFFSNVTWFHAIHVSGTNGTKRFDNPVLPFNDGVYFASTEKSNIIRGWIFGTTLDSKTQSLLIVNNATNVVIKVCEFQFCNDPFLGVYYHKNNKSWMESEFRVYSSANNCTFEYVSQPFLMDLEGKQGNFKNLREFVFKNIDGYFKIYSKHTPINLVRDLPQGFSALEPLVDLPIGINITRFQTLLALHRSYLTPGDSSSGWTAGAAAYYVGYLQPRTFLLKYNENGTITDAVDCALDPLSETKCTLKSFTVEKGIYQTSNFRVQPTESIVRFPNITNLCPFGEVFNATRFASVYAWNRKRISNCVADYSVLYNSASFSTFKCYGVSPTKLNDLCFTNVYADSFVIRGDEVRQIAPGQTGKIADYNYKLPDDFTGCVIAWNSNNLDSKVGGNYNYLYRLFRKSNLKPFERDISTEIYQAGSTPCNGVEGFNCYFPLQSYGFQPTNGVGYQPYRVVVLSFELLHAPATVCGPKKSTNLVKNKCVNFNFNGLTGTGVLTESNKKFLPFQQFGRDIADTTDAVRDPQTLEILDITPCSFGGVSVITPGTNTSNQVAVLYQGVNCTEVPVAIHADQLTPTWRVYSTGSNVFQTRAGCLIGAEHVNNSYECDIPIGAGICASYHTQTNSPRRARSVASQSIIAYTMSLGAENSVAYSNNSIACPTNFTISVTTEILPVSMTKTSVDCTMYICGDSTECSNLLLQYGSFCTQLNRALTGIAVEQDKNTQEVFAQVKQIYKTPPIKDFGGFNFSQILPDPSKPSKRSFIEDLLFNKVTLADAGFIKQYGDCLGDIAARDLICAQKFNGLTVLPPLLTDEMIAQYTSALLAGTITSGWTFGAGAALQIPFAMQMAYRFNGIGVTQNVLYENQKLIANQFNSAIGKIQDSLSSTASALGKLQDVVNQNAQALNTLVKQLSSNFGAISSVLNDILSRLDKVEAEVQIDRLITGRLQSLQTYVTQQLIRAAEIRASANLAATKMSECVLGQSKRVDFCGKGYHLMSFPQSAPHGVVFLHVTYVPAQEKNFTTAPAICHDGKAHFPREGVFVSNGTHWFVTQRNFCEPQIITTDNTFVSGNCDVVIGIVNNTVYDPLQPELDSFKEELDKYFKNHTSPDVDLGDISGINASVVNIQKEIDRLNEVAKNLNESLIDLQELGKYEQYIK

SEQ ID NO: 2069 - protein, 1211 aa, Artificial Sequence; identical to SEQ ID NO: 2024
  SARS-CoV-2/Iceland/247/2020__EPI_ISL_417575 spike protein (1-1211)(I714C_Y1110C)

SEQ ID NO: 2070 - protein, 1211 aa, Artificial Sequence
  SARS-CoV-2/Iceland/238/2020__EPI_ISL_417566 spike protein (1-1211)(I714C_Y1110C)
MFVFLVLLPLVSSQCVNLTTRTQLPPAYTNSFTRGVYYPDKVFRSSVLHSTQDLFLPFFSNVTWFHAIHVSGTNGTKRFDNPVLPFNDGVYFASTEKSNIIRGWIFGTTLDSKTQSLLIVNNATNVVIKVCEFQFCNDPFLGVYYHKNNKSWMESEFRVYSSANNCTFEYVSQPFLMDLEGKQGNFKNLREFVFKNIDGYFKIYSKHTPINLVRDLPQGFSALEPLVDLPIGINITRFQTLLALHRSYLTPGDSSSGWTAGAAAYYVGYLQPRTFLLKYNENGTITDAVDCALDPLSETKCTLKSFTVEKGIYQTSNFRVQPTESIVRFPNITNLCPFGEVFNATRFASVYAWNRKRISNCVADYSVLYNSASFSTFKCYGVSPTKLNDLCFTNVYADSFVIRGDEVRQIAPGQTGKIADYNYKLPDDFTGCVIAWNSNNLDSKVGGNYNYLYRLFRKSNLKPFERDISTEIYQAGSTPCNGVEGFNCYFPLQSYGFQPTNGVGYQPYRVVVLSFELLHAPATVCGPKKSTNLVKNKCVNFNFNGLTGTGVLTESNKKFLPFQQFGRDIADTTDAVRDPQTLEILDITPCSFGGVSVITPGTNTSNQVAVLYQGVNCTEVPVAIHADQLTPTWRVYSTGSNVFQTRAGCLIGAEHVNNSYECDIPIGAGICASYQTQTNSPRRARSVASQSIIAYTMSLGAENSVAYSNNSIACPTNFTISVTTEILPVSMTKTSVDCTMYICGDSTECSNLLLQYGSFCTQLNRALTGIAVEQDKNTQEVFAQVKQIYKTPPIKDFGGFNFSQILPDPSKPSKRSFIEDLLFNKVTLADVGFIKQYGDCLGDIAARDLICAQKFNGLTVLPPLLTDEMIAQYTSALLAGTITSGWTFGAGAALQIPFAMQMAYRFNGIGVTQNVLYENQKLIANQFNSAIGKIQDSLSSTASALGKLQDVVNQNAQALNTLVKQLSSNFGAISSVLNDILSRLDKVEAEVQIDRLITGRLQSLQTYVTQQLIRAAEIRASANLAATKMSECVLGQSKRVDFCGKGYHLMSFPQSAPHGVVFLHVTYVPAQEKNFTTAPAICHDGKAHFPREGVFVSNGTHWFVTQRNFCEPQIITTDNTFVSGNCDVVIGIVNNTVYDPLQPELDSFKEELDKYFKNHTSPDVDLGDISGINASVVNIQKEIDRLNEVAKNLNESLIDLQELGKYEQYIK

SEQ ID NO: 2071 - protein, 1211 aa, Artificial Sequence
  SARS-CoV-2/Greece/16/2020__EPI_ISL_418265 spike protein (1-1211)(I714C_Y1110C)
MFVFLVLLPLVSSQCVNLTTRTQLPPAYTNSFTRGVYYPDKVFRSSVLHSTQDLFLPFFSNVTWFHAIHVSGTNGTKRFDNPVLPFNDGVYFASTEKSNIIRGWIFGTTLDSKTQSLLIVNNATNVVIKVCEFQFCNDPFLGVYYHKNNKSWMESEFRVYSSANNCTFEYVSQPFLMDLEGKQGNFKNLREFVFKNVDGYFKIYSKHTPINLVRDLPQGFSALEPLVDLPIGINITRFQTLLALHRSYLTPGDSSSGWTAGAAAYYVGYLQPRTFLLKYNENGTITDAVDCALDPLSETKCTLKSFTVEKGIYQTSNFRVQPTESIVRFPNITNLCPFGEVFNATRFASVYAWNRKRISNCVADYSVLYNSASFSTFKCYGVSPTKLNDLCFTNVYADSFVIRGDEVRQIAPGQTGKIADYNYKLPDDFTGCVIAWNSNNLDSKVGGNYNYLYRLFRKSNLKPFERDISTEIYQAGSTPCNGVEGFNCYFPLQSYGFQPTNGVGYQPYRVVVLSFELLHAPATVCGPKKSTNLVKNKCVNFNFNGLTGTGVLTESNKKFLPFQQFGRDIADTTDAVRDPQTLEILDITPCSFGGVSVITPGTNTSNQVAVLYQDVNCTEVPVAIHADQLTPTWRVYSTGSNVFQTRAGCLIGAEHVNNSYECDIPIGAGICASYQTQTNSPRRARSVASQSIIAYTMSLGAENSVAYSNNSIACPTNFTISVTTEILPVSMTKTSVDCTMYICGDSTECSNLLLQYGSFCTQLNRALTGIAVEQDKNTQEVFAQVKQIYKTPPIKDFGGFNFSQILPDPSKPSKRSFIEDLLFNKVTLADAGFIKQYGDCLGDIAARDLICAQKFNGLTVLPPLLTDEMIAQYTSALLAGTITSGWTFGAGAALQIPFAMQMAYRFNGIGVTQNVLYENQKLIANQFNSAIGKIQDSLSSTASALGKLQDVVNQNAQALNTLVKQLSSNFGAISSVLNDILSRLDKVEAEVQIDRLITGRLQSLQTYVTQQLIRAAEIRASANLAATKMSECVLGQSKRVDFCGKGYHLMSFPQSAPHGVVFLHVTYVPAQEKNFTTAPAICHDGKAHFPREGVFVSNGTHWFVTQRNFCEPQIITTDNTFVSGNCDVVIGIVNNTVYDPLQPELDSFKEELDKYFKNHTSPDVDLGDISGINASVVNIQKEIDRLNEVAKNLNESLIDLQELGKYEQYIK

SEQ ID NO: 2072 - protein, 1211 aa, Artificial Sequence
  SARS-CoV-2/Iceland/319/2020__EPI_ISL_417648 spike protein (1-1211)(I714C_Y1110C)
MFVFLVLLPLVSSQCVNLTTRTQLPPAYTNSFTRGVYYPDKVFRSSVLHSTQDLFLPFFSNVTWFHAIHVSGTNGTKRFDNPVLPFNDGVYFASTEKSNIIRGWIFGTTLDSKTQSLLIVNNATNVVIKVCEFQFCNDPFLGVYYHKNNKSWMESEFRVYSSANNCTFEYVSQPFLIDLEGKQGNFKNLREFVFKNIDGYFKIYSKHTPINLVRDLPQGFSALEPLVDLPIGINITRFQTLLALHRSYLTPGDSSSGWTAGAAAYYVGYLQPRTFLLKYNENGTITDAVDCALDPLSETKCTLKSFTVEKGIYQTSNFRVQPTESIVRFPNITNLCPFGEVFNATRFASVYAWNRKRISNCVADYSVLYNSASFSTFKCYGVSPTKLNDLCFTNVYADSFVIRGDEVRQIAPGQTGKIADYNYKLPDDFTGCVIAWNSNNLDSKVGGNYNYLYRLFRKSNLKPFERDISTEIYQAGSTPCNGVEGFNCYFPLQSYGFQPTNGVGYQPYRVVVLSFELLHAPATVCGPKKSTNLVKNKCVNFNFNGLTGTGVLTESNKKFLPFQQFGRDIADTTDAVRDPQTLEILDITPCSFGGVSVITPGTNTSNQVAVLYQGVNCTEVPVAIHADQLTPTWRVYSTGSNVFQTRAGCLIGAEHVNNSYECDIPIGAGICASYQTQTNSPRRARSVASQSIIAYTMSLGAENSVAYSNNSIACPTNFTISVTTEILPVSMTKTSVDCTMYICGDSTECSNLLLQYGSFCTQLNRALTGIAVEQDKNTQEVFAQVKQIYKTPPIKDFGGFNFSQILPDPSKPSKRSFIEDLLFNKVTLADAGFIKQYGDCLGDIAARDLICAQKFNGLTVLPPLLTDEMIAQYTSALLAGTITSGWTFGAGAALQIPFAMQMAYRFNGIGVTQNVLYENQKLIANQFNSAIGKIQDSLSSTASALGKLQDVVNQNAQALNTLVKQLSSNFGAISSVLNDILSRLDKVEAEVQIDRLITGRLQSLQTYVTQQLIRAAEIRASANLAATKMSECVLGQSKRVDFCGKGYHLMSFPQSAPHGVVFLHVTYVPAQEKNFTTAPAICHDGKAHFPREGVFVSNGTHWFVTQRNFCEPQIITTDNTFVSGNCDVVIGIVNNTVYDPLQPELDSFKEELDKYFKNHTSPDVDLGDISGINASVVNIQKEIDRLNEVAKNLNESLIDLQELGKYEQYIK

SEQ ID NO: 2073 - protein, 1211 aa, Artificial Sequence
  SARS-CoV-2/Congo/94/2020__EPI_ISL_417947 spike protein (1-1211)(I714C_Y1110C)
MFVFLVLLPLVSSQCVNLTTRTQLPPAYTNSFTRGVYYPDKVFRSSVLHSTQDLFLPFFSNVTWFHAIHVSGTNGTKRFDNPVLPFNDGVYFASTEKSNIIRGWIFGTTLDSKTQSLLIVNNATNVVIKVCEFQFCNDPFLGVYYHKNNKSWMESEFRVYSSANNCTFEYVSQPFLMDLEGKQGNFKNLREFVFKNIDGYFKIYSKHTPINLVRDLPQGFSALEPLVDLPIGINITRFQTLLALHRSYLTPGDSSSGWTAGAAAYYVGYLQPRTFLLKYNENGTITDAVDCALDPLSETKCTLKSFTVEKGIYQTSNFRVQPTESIVRFPNITNLCPFGEVFNATRFASVYAWNRKRISNCVADYSVLYNSASFSTFKCYGVSPTKLNDLCFTNVYADSFVIRGDEVRQIAPGQTGKIADYNYKLPDDFTGCVIAWNSNNLDSKVGGNYNYLYRLFRKSNLKPFERDISTEIYQAGSTPCNGVEGFNCYFPLQSYGFQPTNGVGYQPYRVVVLSFELLHAPATVCGPKKSTNLVKNKCVNFNFNGLTGTGVLTESNKKFLPFQQFGRDIADTTDAVRDPQTLEILDITPCSFGGVSVITPGTNTSNQVAVLYQGVNCTEVPVAIHADQLTPTWRVYSTGSNVFQTRAGCLIGAEHVNNSYECDIPIGAGICASYQTQTNSPRRARSVASQSIIAYTMSLGAENSVAYSNNSIACPTNFTISVTTEILPVSMTKTSVDCTMYICGDSTECSNLLLQYGSFCTQLNRALTGIAVEQDKNTQEVFAQVKQIYKTPPIKDFGGFNFSQILPDPSKPSKRSFIEDILFNKVTLADAGFIKQYGDCLGDIAARDLICAQKFNGLTVLPPLLTDEMIAQYTSALLAGTITSGWTFGAGAALQIPFAMQMAYRFNGIGVTQNVLYENQKLIANQFNSAIGKIQDSLSSTASALGKLQDVVNQNAQALNTLVKQLSSNFGAISSVLNDILSRLDKVEAEVQIDRLITGRLQSLQTYVTQQLIRAAEIRASANLAATKMSECVLGQSKRVDFCGKGYHLMSFPQSAPHGVVFLHVTYVPAQEKNFTTAPAICHDGKAHFPREGVFVSNGTHWFVTQRNFCEPQIITTDNTFVSGNCDVVIGIVNNTVYDPLQPELDSFKEELDKYFKNHTSPDVDLGDISGINASVVNIQKEIDRLNEVAKNLNESLIDLQELGKYEQYIK

SEQ ID NO: 2074 - protein, 1211 aa, Artificial Sequence
  SARS-CoV-2/Congo/158/2020__EPI_ISL_417950 spike protein (1-1211)(I714C_Y1110C)
MFVFLVLLPLVSSQCVNLTTRTQLPPAYTNSFTRGVYYPDKVFRSSVLHSTQDLFLPFFSNVTWFHAIHVSGTNGTKRFDNPVLPFNDGVYFASTEKSNIIRGWIFGTTLDSKTQSLLIVNNATNVVIKVCEFQFCNDPFLGVYYHKNNKSWMESEFRVYSSANNCTFEYVSQPFLMDLEGKQGNFKNLREFVFKNIDGYFKIYSKHTPINLVRDLPQGFSALEPLVDLPIGINITRFQTLLALHRSYLTPGDSSSGWTAGAAAYYVGYLQPRTFLLKYNENGTITDAVDCALDPLSETKCTLKSFTVEKGIYQTSNFRVQPTESIVRFPNITNLCPFGEVFNATRFASVYAWNRKRISNCVADYSVLYNSASFSTFKCYGVSPTKLNDLCFTNVYADSFVIRGDEVRQIAPGQTGKIADYNYKLPDDFTGCVIAWNSNNLDSKVGGNYNYLYRLFRKSNLKPFERDISTEIYQAGSTPCNGVEGFNCYFPLQSYGFQPTNGVGYQPYRVVVLSFELLHAPATVCGPKKSTNLVKNKCVNFNFNGLTGTGVLTESNKKFLPFQQFGRDIADTTDAVRDPQTLEILDITPCSFGGVSVITPGTNTSNQVAVLYQDVNCTEVPVAIHADQLTPTWRVYSTGSNVFQTRAGCLIGAEHVNNSYECDIPIGAGICASYQTQTNSPRRARSVASQSIIAYTMSLGAENSVAYSNNSIACPTNFTISVTTEILPVSMTKTSVDCTMYICGDSTECSNLLLQYGSFCTQLNRALTGIAVEQDKNTQEVFAQVKQIYKTPPIKDFGGFNFSQILPDPSKPSKRSFIEDLLFNKVTLADAGFIKQYGDCLGDIAARDLICAQKFNGLTVLPPLLTDEMIAQYTSALLAGTITSGWTFGAGAALQIPFAMQMAYRFNGIGVTQNVLYENQKLIANQFNSAIGKIQDSLSSTASALGKLQDVVNQNAQALNTLVKQLSSNFGAISSVLNDILSRLDKVEAEVQIDRLITGRLQSLQTYVTQQLIRAAEIRASANLAATKMSECVLGQSKRVDFCGKGYHLMSFPQSAPHGVVFLHVTYVPAQEKNFTTAPAICHDGKAHFPREGVFVSNGTHWFVTQRNFCEPQIITTDNTFLSGNCDVVIGIVNNTVYDPLQPELDSFKEELDKYFKNHTSPDVDLGDISGINASVVNIQKEIDRLNEVAKNLNESLIDLQELGKYEQYIK

SEQ ID NO: 2075 - protein, 1211 aa, Artificial Sequence
  SARS-CoV-2/USA/UT-00034/2020__EPI_ISL_417977 spike protein (1-1211)(I714C_Y1110C)
MFVFLVLLPLVSSQCVNLTTRTQLPPAYTNSFTRGVYYPDKVFRSSVLHSTQDLFLPFFSNVTWFHAIHVSGTNGTKRFDNPVLPFNDGVYFASTEKSNIIRGWIFGTTLDSKTQSLLIVNNATNVVIKVCEFQFCNDPFLGVYYYKNNKSWMESEFRVYSSANNCTFEYVSQPFLMDLEGKQGNFKNLREFVFKNIDGYFKIYSKHTPINLVRDLPQGFSALEPLVDLPIGINITRFQTLLALHRSYLTPGDSSSGWTAGAAAYYVGYLQPRTFLLKYNENGTITDAVDCALDPLSETKCTLKSFTVEKGIYQTSNFRVQPTESIVRFPNITNLCPFGEVFNATRFASVYAWNRKRISNCVADYSVLYNSASFSTFKCYGVSPTKLNDLCFTNVYADSFVIRGDEVRQIAPGQTGKIADYNYKLPDDFTGCVIAWNSNNLDSKVGGNYNYLYRLFRKSNLKPFERDISTEIYQAGSTPCNGVEGFNCYFPLQSYGFQPTNGVGYQPYRVVVLSFELLHAPATVCGPKKSTNLVKNKCVNFNFNGLTGTGVLTESNKKFLPFQQFGRDIADTTDAVRDPQTLEILDITPCSFGGVSVITPGTNTSNQVAVLYQGVNCTEVPVAIHADQLTPTWRVYSTGSNVFQTRAGCLIGAEHVNNSYECDIPIGAGICASYQTQTNSPRRARSVASQSIIAYTMSLGAENSVAYSNNSIACPTNFTISVTTEILPVSMTKTSVDCTMYICGDSTECSNLLLQYGSFCTQLNRALTGIAVEQDKNTQEVFAQVKQIYKTPPIKDFGGFNFSQILPDPSKPSKRSFIEDLLFNKVTLADAGFIKQYGDCLGDIAARDLICAQKFNGLTVLPPLLTDEMIAQYTSALLAGTITSGWTFGAGAALQIPFAMQMAYRFNGIGVTQNVLYENQKLIANQFNSAIGKIQDSLSSTASALGKLQDVVNQNAQALNTLVKQLSSNFGAISSVLNDILSRLDKVEAEVQIDRLITGRLQSLQTYVTQQLIRAAEIRASANLAATKMSECVLGQSKRVDFCGKGYHLMSFPQSAPHGVVFLHVTYVPAQEKNFTTAPAICHDGKAHFPREGVFVSNGTHWFVTQRNFCEPQIITTDNTFVSGNCDVVIGIVNNTVYDPLQPELDSFKEELDKYFKNHTSPDVDLGDISGINASVVNIQKEIDRLNEVAKNLNESLIDLQELGKYEQYIK

SEQ ID NO: 2076 - protein, 1211 aa, Artificial Sequence
  SARS-CoV-2/USA/UT-00033/2020__EPI_ISL_417976 spike protein (1-1211)(I714C_Y1110C)
MFVFLVLLPLVSSQCVNLTTRTQLPPAYTNSFTRGVYYPDKVFRSSVLHSTQDLFLPFFSNVTWFHAIHVSGTNGTKRFDNPVLPFNDGVYFASTEKSNIIRGWIFGTTLDSKTQSLLIVNNATNVVIKVCEFQFCNDPFLGVYYHKNNKSWMESEFRVYSSANNCTFEYVSQPFLMDLEGKQGNFKNLREFVFKNIDGYFKIYSKHTPINLVRDLPQGFSALEPLVDLPIGINITRFQTLLALHRSYLTPGDSSSGLTAGAAAYYVGYLQPRTFLLKYNENGTITDAVDCALDPLSETKCTLKSFTVEKGIYQTSNFRVQPTESIVRFPNITNLCPFGEVFNATRFASVYAWNRKRISNCVADYSVLYNSASFSTFKCYGVSPTKLNDLCFTNVYADSFVIRGDEVRQIAPGQTGKIADYNYKLPDDFTGCVIAWNSNNLDSKVGGNYNYLYRLFRKSNLKPFERDISTEIYQAGSTPCNGVEGFNCYFPLQSYGFQPTNGVGYQPYRVVVLSFELLHAPATVCGPKKSTNLVKNKCVNFNFNGLTGTGVLTESNKKFLPFQQFGRDIADTTDAVRDPQTLEILDITPCSFGGVSVITPGTNTSNQVAVLYQGVNCTEVPVAIHADQLTPTWRVYSTGSNVFQTRAGCLIGAEHVNNSYECDIPIGAGICASYQTQTNSPRRARSVASQSIIAYTMSLGAENSVAYSNNSIACPTNFTISVTTEILPVSMTKTSVDCTMYICGDSTECSNLLLQYGSFCTQLNRALTGIAVEQDKNTQEVFAQVKQIYKTPPIKDFGGFNFSQILPDPSKPSKRSFIEDLLFNKVTLADAGFIKQYGDCLGDIAARDLICAQKFNGLTVLPPLLTDEMIAQYTSALLAGTITSGWTFGAGAALQIPFAMQMAYRFNGIGVTQNVLYENQKLIANQFNSAIGKIQDSLSSTASALGKLQDVVNQNAQALNTLVKQLSSNFGAISSVLNDILSRLDKVEAEVQIDRLITGRLQSLQTYVTQQLIRAAEIRASANLAATKMSECVLGQSKRVDFCGKGYHLMSFPQSAPHGVVFLHVTYVPAQEKNFTTAPAICHDGKAHFPREGVFVSNGTHWFVTQRNFCEPQIITTDNTFVSGNCDVVIGIVNNTVYDPLQPELDSFKEELDKYFKNHTSPDVDLGDISGINASVVNIQKEIDRLNEVAKNLNESLIDLQELGKYEQYIK

SEQ ID NO: 2077 - protein, 1211 aa, Artificial Sequence
  SARS-CoV-2/USA/WI-13/2020__EPI_ISL_417516 spike protein (1-1211)(I714C_Y1110C)
MFVFLVLLPLVSSQCVNLTTRTQLPPAYTNSFTRGVYYPDKVFRSSVLHSTQDLFLPFFSNVTWFHAIHVSGTNGTKRFDNPVLPFNDGVYFASTEKSNIIRGWIFGTTLDSKTQSLLIVNNATNVVIKVCEFQFCNDPFLGVYYHKNNKSWMESEFRVYSSANNCTFEYVSQPFLMDLEGKQGNFKNLREFVFKNIDGYFKIYSKHTPINLVRDLPQGFSALEPLVDLPIGINITRFQTLLALHRSYLTPGDSSSGWTAGAAAYYVGYLQPRTFLLKYNENGTITDAVDCALDPLSETKCTLKSFTVEKGIYQTSNFRVLPTESIVRFPNITNLCPFGEVFNATRFASVYAWNRKRISNCVADYSVLYNSASFSTFKCYGVSPTKLNDLCFTNVYADSFVIRGDEVRQIAPGQTGKIADYNYKLPDDFTGCVIAWNSNNLDSKVGGNYNYLYRLFRKSNLKPFERDISTEIYQAGSTPCNGVEGFNCYFPLQSYGFQPTNGVGYQPYRVVVLSFELLHAPATVCGPKKSTNLVKNKCVNFNFNGLTGTGVLTESNKKFLPFQQFGRDIADTTDAVRDPQTLEILDITPCSFGGVSVITPGTNTSNQVAVLYQGVNCTEVPVAIHADQLTPTWRVYSTGSNVFQTRAGCLIGAEHVNNSYECDIPIGAGICASYQTQTNSPRRARSVASQSIIAYTMSLGAENSVAYSNNSIACPTNFTISVTTEILPVSMTKTSVDCTMYICGDSTECSNLLLQYGSFCTQLNRALTGIAVEQDKNTQEVFAQVKQIYKTPPIKDFGGFNFSQILPDPSKPSKRSFIEDLLFNKVTLADAGFIKQYGDCLGDIAARDLICAQKFNGLTVLPPLLTDEMIAQYTSALLAGTITSGWTFGAGAALQIPFAMQMAYRFNGIGVTQNVLYENQKLIANQFNSAIGKIQDSLSSTASALGKLQDVVNQNAQALNTLVKQLSSNFGAISSVLNDILSRLDKVEAEVQIDRLITGRLQSLQTYVTQQLIRAAEIRASANLAATKMSECVLGQSKRVDFCGKGYHLMSFPQSAPHGVVFLHVTYVPAQEKNFTTAPAICHDGKAHFPREGVFVSNGTHWFVTQRNFCEPQIITTDNTFVSGNCDVVIGIVNNTVYDPLQPELDSFKEELDKYFKNHTSPDVDLGDISGINASVVNIQKEIDRLNEVAKNLNESLIDLQELGKYEQYIK

SEQ ID NO: 2078 - protein, 1210 aa, Artificial Sequence
  SARS-CoV-2/India/1-27/2020__EPI_ISL_413522 spike protein (1-1210)(I713C_Y1109C)
MFVFLVLLPLVSSQCVNLTTRTQLPPAYTNSFTRGVYYPDKVFRSSVLHSTQDLFLPFFSNVTWFHAIHVSGTNGTKRFDNPVLPFNDGVYFASTEKSNIIRGWIFGTTLDSKTQSLLIVNNATNVVIKVCEFQFCNDPFLGVYHKNNKSWMESEFRVYSSANNCTFEYVSQPFLMDLEGKQGNFKNLREFVFKNIDGYFKIYSKHTPINLVRDLPQGFSALEPLVDLPIGINITRFQTLLALHRSYLTPGDSSSGWTAGAAAYYVGYLQPRTFLLKYNENGTITDAVDCALDPLSETKCTLKSFTVEKGIYQTSNFRVQPTESIVRFPNITNLCPFGEVFNATRFASVYAWNRKRISNCVADYSVLYNSASFSTFKCYGVSPTKLNDLCFTNVYADSFVIRGDEVIQIAPGQTGKIADYNYKLPDDFTGCVIAWNSNNLDSKVGGNYNYLYRLFRKSNLKPFERDISTEIYQAGSTPCNGVEGFNCYFPLQSYGFQPTNGVGYQPYRVVVLSFELLHAPATVCGPKKSTNLVKNKCVNFNFNGLTGTGVLTESNKKFLPFQQFGRDIADTTDAVRDPQTLEILDITPCSFGGVSVITPGTNTSNQVAVLYQDVNCTEVPVAIHADQLTPTWRVYSTGSNVFQTRAGCLIGAEHVNNSYECDIPIGAGICASYQTQTNSPRRARSVASQSIIAYTMSLGAENSVAYSNNSIACPTNFTISVTTEILPVSMTKTSVDCTMYICGDSTECSNLLLQYGSFCTQLNRALTGIAVEQDKNTQEVFAQVKQIYKTPPIKDFGGFNFSQILPDPSKPSKRSFIEDLLFNKVTLADAGFIKQYGDCLGDIAARDLICAQKFNGLTVLPPLLTDEMIAQYTSALLAGTITSGWTFGAGAALQIPFAMQMAYRFNGIGVTQNVLYENQKLIANQFNSAIGKIQDSLSSTASALGKLQDVVNQNAQALNTLVKQLSSNFGAISSVLNDILSRLDKVEAEVQIDRLITGRLQSLQTYVTQQLIRAAEIRASANLAATKMSECVLGQSKRVDFCGKGYHLMSFPQSAPHGVVFLHVTYVPAQEKNFTTAPAICHDGKAHFPREGVFVSNGTHWFVTQRNFCEPQIITTDNTFVSGNCDVVIGIVNNTVYDPLQPELDSFKEELDKYFKNHTSPDVDLGDISGINASVVNIQKEIDRLNEVAKNLNESLIDLQELGKYEQYIK

SEQ ID NO: 2079 - protein, 1205 aa, Artificial Sequence
  SARS-CoV-2/pangolin/Guangxi/P4L/2017__EPI_ISL_410538 spike protein (1-1205)(I708C_Y1104C)
MFVFLFVLPLVSSQCVNLTTRTGIPPGYTNSSTRGVYYPDKVFRSSILHLTQDLFLPFFSNVTWFNTINYQGGFKKFDNPVLPFNDGVYFASTEKSNIIRGWIFGTTLDARTQSLLIVNNATNVVIKVCEFQFCTDPFLGVYYHNNNKTWVENEFRVYSSANNCTFEYISQPFLMDLEGKQGNFKNLREFVFKNVDGYFKIYSKHTPIDLVRDLPRGFAALEPLVDLPIGINITRFQTLLALHRSYLTPGNLESGWTTGAAAYYVGYLQQRTFLLSYNQNGTITDAVDCSLDPLSETKCTLKSLTVEKGIYQTSNFRVQPTISIVRFPNITNLCPFGEVFNASKFASVYAWNRKRISNCVADYSVLYNSTSFSTFKCYGVSPTKLNDLCFTNVYADSFVVKGDEVRQIAPGQTGVIADYNYKLPDDFTGCVIAWNSVKQDALTGGNYGYLYRLFRKSKLKPFERDISTEIYQAGSTPCNGQVGLNCYYPLERYGFHPTTGVNYQPFRVVVLSFELLNGPATVCGPKLSTTLVKDKCVNFNFNGLTGTGVLTTSKKQFLPFQQFGRDISDTTDAVRDPQTLEILDITPCSFGGVSVITPGTNTSNQVAVLYQDVNCTEVPMAIHAEQLTPAWRVYSAGANVFQTRAGCLVGAEHVNNSYECDIPVGAGICASYHSMSSLRSVNQRSIIAYTMSLGAENSVAYSNNSIACPTNFTISVTTEILPVSMTKTSVDCTMYICGDSIECSNLLLQYGSFCTQLNRALTGIAVEQDKNTQEVFAQVKQIYKTPPIKDFGGFNFSQILPDPSKPSKRSFIEDLLFNKVTLADAGFIKQYGDCLGDIAARDLICAQKFNGLTVLPPLLTDEMIAQYTSALLAGTITSGWTFGAGAALQIPFAMQMAYRFNGIGVTQNVLYENQKLIANQFNSAIGKIQDSLSSTASALGKLQDVVNQNAQALNTLVKQLSSNFGAISSVLNDILSRLDKVEAEVQIDRLITGRLQSLQTYVTQQLIRAAEIRASANLAATKMSECVLGQSKRVDFCGKGYHLMSFPQSAPHGVVFLHVTYVPAQEKNFTTAPAICHEGKAHFPREGVFVSNGTHWFITQRNFCEPQIITTDNTFVSGSCDVVIGIVNNTVYDPLQPELDSFKEELDKYFKNHTSPDVDLGDISGINASVVNIQKEIDRLNEVAKNLNESPIDLQELGKYEQYIK

SEQ ID NO: 2080 - protein, 1205 aa, Artificial Sequence
  SARS-CoV-2/pangolin/Guangxi/P5L/2017__EPI_ISL_410540 spike protein (1-1205)(I708C_Y1104C)
MFVFLFVLPLVSSQCVNLTTRTGIPPGYTNSSTRGVYYPDKVFRSSILHLTQDLFLPFFSNVTWFNTINYQGGFKKFDNPVLPFNDGVYFASTEKSNIIRGWIFGTTLDARTQSLLIVNNATNVVIKVCEFQFCTDPFLGVYYHNNNKTWVENEFRVYSSANNCTFEYISQPFLMDLEGKQGNFKNLREFVFKNVDGYFKIYSKHTPIDLVRDLPRGFAALEPLVDLPIGINITRFQTLLALHRSYLTPGKLESGWTTGAAAYYVGYLQQRTFLLSYNQNGTITDAVDCSLDPLSETKCTLKSLTVEKGIYQTSNFRVQPTISIVRFPNITNLCPFGEVFNASKFASVYAWNRKRISNCVADYSVLYNSTSFSTFKCYGVSPTKLNDLCFTNVYADSFVVKGDEVRQIAPGQTGVIADYNYKLPDDFTGCVIAWNSVKQDALTGGNYGYLYRLFRKSKLKPFERDISTEIYQAGSTPCNGQVGLNCYYPLERYGFHPTTGVNYQPFRVVVLSFELLNGPATVCGPKLSTTLVKDKCVNFNFNGLTGTGVLTTSKKQFLPFQQFGRDISDTTDAVRDPQTLEILDITPCSFGGVSVITPGTNTSNQVAVLYQDVNCTEVPMAIHAEQLTPAWRVYSAGANVFQTRAGCLVGAEHVNNSYECDIPVGAGICASYHSMSSFRSVNQRSIIAYTMSLGAENSVAYSNNSIACPTNFTISVTTEILPVSMTKTSVDCTMYICGDSIECSNLLLQYGSFCTQLNRALTGIAVEQDKNTQEVFAQVKQIYKTPPIKDFGGFNFSQILPDPSKPSKRSFIEDLLFNKVTLADAGFIKQYGDCLGDIAARDLICAQKFNGLTVLPPLLTDEMIAQYTSALLAGTITSGWTFGAGAALQIPFAMQMAYRFNGIGVTQNVLYENQKLIANQFNSAIGKIQDSLSSTASALGKLQDVVNQNAQALNTLVKQLSSNFGAISSVLNDILSRLDKVEAEVQIDRLITGRLQSLQTYVTQQLIRAAEIRASANLAATKMSECVLGQSKRVDFCGKGYHLMSFPQSAPHGVVFLHVTYVPAQEKNFTTAPAICHEGKAHFPREGVFVSNGTHWFITQRNFCEPQIITTDNTFVSGSCDVVIGIVNNTVYDPLQPELDSFKEELDKYFKNHTSPDVDLGDISGINASVVNIQKEIDRLNEVAKNLNESLIDLQELGKYEQYIK

SEQ ID NO: 2081 - protein, 1205 aa, Artificial Sequence
  SARS-CoV-2/pangolin/Guangxi/P5E/2017__EPI_ISL_410541 spike protein (1-1205)(I708C_Y1104C)
MFVFLFVLPLVSSQCVNLTTRTGIPPGYTNSSTRGVYYPDKVFRSSILHLTQDLFLPFFSNVTWFNTITYQGGSKKFDNPVLPFNDGVYFASTEKSNIIRGWIFGTTLDARTQSLLIVNNATNVVIKVCEFQFCTDPFLGVYYHNNNKTWVENEFRVYSSANNCTFEYISQPFLMDLEGKQGNFKNLREFVFKNVDGYFKIYSKHTPIDLVRDLPRGFAALEPLVDLPIGINITRFQTLLALHRSYLTPGKLESGWTTGAAAYYVGYLQQRTFLLSYNQNGTITDAVDCSLDPLSETKCTLKSLTVEKGIYQTSNFRVQPTISIVRFPNITNLCPFGEVFNASKFASVYAWNRKRISNCVADYSVLYNSTSFSTFKCYGVSPTKLNDLCFTNVYADSFVVKGDEVRQIAPGQTGVIADYNYKLPDDFTGCVIAWNSVKQDALTGDNYGYLYRLFRKSKLKPFERDISTEIYQAGSTPCNGQVGLNCYYPLERYGFHPTTGVNYQPFRVVVLSFELLNGPATVCGPKLSTTLVKDKCVNFNFNGLTGTGVLTTSKKQFLPFQQFGRDISDTTDAVRDPQTLEILDITPCSFGGVSVITPGTNTSNQVAVLYQDVNCTEVPMAIHAEQLTPAWRVYSAGANVFQTRAGCLVGAEHVNNSYECDIPVGAGICASYHSMSSFRSVNQRSIIAYTMSLGAENSVAYSNNSIACPTNFTISVTTEILPVSMTKTSVDCTMYICGDSIECSNLLLQYGSFCTQLNRALTGIAVEQDKNTQEVFAQVKQIYKTPPIKDFGGFNFSQILPDPSKPSKRSFIEDLLFNKVTLADAGFIKQYGDCLGDIAARDLICAQKFNGLTVLPPLLTDEMIAQYTSALLAGTITSGWTFGAGAALQIPFAMQMAYRFNGIGVTQNVLYENQKLIANQFNSAIGKIQDSLSSTASALGKLQDVVNQNAQALNTLVKQLSSNFGAISSVLNDILSRLDKVEAEVQIDRLITGRLQSLQTYVTQQLIRAAEIRASANLAATKMSECVLGQSKRVDFCGKGYHLMSFPQSAPHGVVFLHVTYVPAQEKNFTTAPAICHEGKAHFPREGVFVSNGTHWFITQRNFCEPQIITTDNTFVSGSCDVVIGIVNNTVYDPLQPELDSFKEELDKYFKNHTSPDVDLGDISGINASVVNIQKEIDRLNEVAKNLNESLIDLQELGKYEQYIK

SEQ ID NO: 2082 - protein, 1203 aa, Artificial Sequence
  SARS-CoV-2/pangolin/Guangxi/P1E/2017__EPI_ISL_410539 spike protein (1-1203)(I706C_Y1102C)
MFVFLFVLPLVSSQCVNLTTRTGIQPGYTNSSTRGVYYPDKVFRSSILHLTQDLFLPFFSNVTWFNTINYQGGFKKFDNPVLPFNDGVYFASTEKSNIIRGWIFGTTLDARTQSLLIVNNATNVVIKVCEFQFCTDPFLGVYYHNNNKTWVENEFRVYSSANNCTFEYISQPFLMDLEGKQGNFKNLREFVFKNVDGYFKIYSKHTPIDLVRDLPRGFAALEPLVDLPIGINITRFQTLLALHRSYLTPGKLESGWTTGAAAYYVGYLQQRTFLLSYNQNGTITDAVDCSLDPLSETKCTLKSLTVEKGIYQTSNFRVQPTISIVRFPNITNLCPFGEVFNASKFASVYAWNRKRISNCVADYSVLYNSTSFSTFKCYGVSPTKLNDLCFTNVYADSFVVKGDEVRQIAPGQTGVIADYNYKLPDDFTGCVIAWNSVKQDALTGGNYLYRLFRKSKLKPFERDISTEIYQAGSTPCNGQVGLNCYYPLERYGFHPTTGVNYQPFRVVVLSFELLNGPATVCGPKLSTTLVKDKCVNFNFNGLTGTGVLTTSKKQFLPFQQFGRDISDTTDAVRDPQTLEILDITPCSFGGVSVITPGTNTSNQVAVLYQDVNCTEVPMAIHAEQLTPAWRVYSAGANVFQTRAGCLVGAEHVNNSYECDIPVGAGICASYHSMSSLRSVNQRSIIAYTMSLGAENSVAYSNNSIACPTNFTISVTTEILPVSMTKTSVDCTMYICGDSIECSNLLLQYGSFCTQLNRALTGIAVEQDKNTQEVFAQVKQIYKTPPIKDFGGFNFSQILPDPSKPSKRSFIEDLLFNKVTLADAGFIKQYGDCLGDIAARDLICAQKFNGLTVLPPLLTDEMIAQYTSALLAGTITSGWTFGAGAALQIPFAMQMAYRFNGIGVTQNVLYENQKLIANQFNSAIGKIQDSLSSTASALGKLQDVVNQNAQALNTLVKQLSSNFGAISSVLNDILSRLDKVEAEVQIDRLITGRLQSLQTYVTQQLIRAAEIRASANLAATKMSECVLGQSKRVDFCGKGYHLMSFPQSAPHGVVFLHVTYVPAQEKNFTTAPAICHEGKAHFPREGVFVSNGTHWFITQRNFCEPQIITTDNTFVSGSCDVVIGIVNNTVYDPLQPELDSFKEELDKYFKNHTSPDVDLGDISGINASVVNIQKEIDRLNEVAKNLNESLIDLQELGKYEQYIK

SEQ ID NO: 2083 - protein, 1211 aa, Artificial Sequence
  SARS-CoV-2/Wuhan/WIV05/2019__EPI_ISL_402128 spike protein (1-1211)(P715C_P1069C)
MFVFLVLLPLVSSQCVNLTTRTQLPPAYTNSFTRGVYYPDKVFRSSVLHSTQDLFLPFFSNVTWFHAIHVSGTNGTKRFDNPVLPFNDGVYFASTEKSNIIRGWIFGTTLDSKTQSLLIVNNATNVVIKVCEFQFCNDPFLGVYYHKNNKSWMESEFRVYSSANNCTFEYVSQPFLMDLEGKQGNFKNLREFVFKNIDGYFKIYSKHTPINLVRDLPQGFSALEPLVDLPIGINITRFQTLLALHRSYLTPGDSSSGWTAGAAAYYVGYLQPRTFLLKYNENGTITDAVDCALDPLSETKCTLKSFTVEKGIYQTSNFRVQPTESIVRFPNITNLCPFGEVFNATRFASVYAWNRKRISNCVADYSVLYNSASFSTFKCYGVSPTKLNDLCFTNVYADSFVIRGDEVRQIAPGQTGKIADYNYKLPDDFTGCVIAWNSNNLDSKVGGNYNYLYRLFRKSNLKPFERDISTEIYQAGSTPCNGVEGFNCYFPLQSYGFQPTNGVGYQPYRVVVLSFELLHAPATVCGPKKSTNLVKNKCVNFNFNGLTGTGVLTESNKKFLPFQQFGRDIADTTDAVRDPQTLEILDITPCSFGGVSVITPGTNTSNQVAVLYQDVNCTEVPVAIHADQLTPTWRVYSTGSNVFQTRAGCLIGAEHVNNSYECDIPIGAGICASYQTQTNSPRRARSVASQSIIAYTMSLGAENSVAYSNNSIAICTNFTISVTTEILPVSMTKTSVDCTMYICGDSTECSNLLLQYGSFCTQLNRALTGIAVEQDKNTQEVFAQVKQIYKTPPIKDFGGFNFSQILPDPSKPSKRSFIEDLLFNKVTLADAGFIKQYGDCLGDIAARDLICAQKFNGLTVLPPLLTDEMIAQYTSALLAGTITSGWTFGAGAALQIPFAMQMAYRFNGIGVTQNVLYENQKLIANQFNSAIGKIQDSLSSTASALGKLQDVVNQNAQALNTLVKQLSSNFGAISSVLNDILSRLDKVEAEVQIDRLITGRLQSLQTYVTQQLIRAAEIRASANLAATKMSECVLGQSKRVDFCGKGYHLMSFPQSAPHGVVFLHVTYVCAQEKNFTTAPAICHDGKAHFPREGVFVSNGTHWFVTQRNFYEPQIITTDNTFVSGNCDVVIGIVNNTVYDPLQPELDSFKEELDKYFKNHTSPDVDLGDISGINASVVNIQKEIDRLNEVAKNLNESLIDLQELGKYEQYIK

SEQ ID NO: 2084 - protein, 1207 aa, Artificial Sequence
  SARS-CoV-2/bat/Yunnan/RaTG13/2013__EPI_ISL_402131 spike protein (1-1207)(P711C_P1065C)
MFVFLVLLPLVSSQCVNLTTRTQLPPAYTNSSTRGVYYPDKVFRSSVLHLTQDLFLPFFSNVTWFHAIHVSGTNGIKRFDNPVLPFNDGVYFASTEKSNIIRGWIFGTTLDSKTQSLLIVNNATNVVIKVCEFQFCNDPFLGVYYHKNNKSWMESEFRVYSSANNCTFEYVSQPFLMDLEGKQGNFKNLREFVFKNIDGYFKIYSKHTPINLVRDLPPGFSALEPLVDLPIGINITRFQTLLALHRSYLTPGDSSSGWTAGAAAYYVGYLQPRTFLLKYNENGTITDAVDCALDPLSETKCTLKSFTVEKGIYQTSNFRVQPTDSIVRFPNITNLCPFGEVFNATTFASVYAWNRKRISNCVADYSVLYNSTSFSTFKCYGVSPTKLNDLCFTNVYADSFVITGDEVRQIAPGQTGKIADYNYKLPDDFTGCVIAWNSKHIDAKEGGNFNYLYRLFRKANLKPFERDISTEIYQAGSKPCNGQTGLNCYYPLYRYGFYPTDGVGHQPYRVVVLSFELLNAPATVCGPKKSTNLVKNKCVNFNFNGLTGTGVLTESNKKFLPFQQFGRDIADTTDAVRDPQTLEILDITPCSFGGVSVITPGTNASNQVAVLYQDVNCTEVPVAIHADQLTPTWRVYSTGSNVFQTRAGCLIGAEHVNNSYECDIPIGAGICASYQTQTNSRSVASQSIIAYTMSLGAENSVAYSNNSIAICTNFTISVTTEILPVSMTKTSVDCTMYICGDSTECSNLLLQYGSFCTQLNRALTGIAVEQDKNTQEVFAQVKQIYKTPPIKDFGGFNFSQILPDPSKPSKRSFIEDLLFNKVTLADAGFIKQYGDCLGDIAARDLICAQKFNGLTVLPPLLTDEMIAQYTSALLAGTITSGWTFGAGAALQIPFAMQMAYRFNGIGVTQNVLYENQKLIANQFNSAIGKIQDSLSSTASALGKLQDVVNQNAQALNTLVKQLSSNFGAISSVLNDILSRLDKVEAEVQIDRLITGRLQSLQTYVTQQLIRAAEIRASANLAATKMSECVLGQSKRVDFCGKGYHLMSFPQSAPHGVVFLHVTYVCAQEKNFTTAPAICHDGKAHFPREGVFVSNGTHWFVTQRNFYEPQIITTDNTFVSGSCDVVIGIVNNTVYDPLQPELDSFKEELDKYFKNHTSPDVDLGDISGINASVVNIQKEIDRLNEVAKNLNESLIDLQELGKYEQYIK

SEQ ID NO: 2085 - protein, 1211 aa, Artificial Sequence
  SARS-CoV-2/Wuhan/HBCDC-HB-01/2019__EPI_ISL_402132 spike protein (1-1211)(P715C_P1069C)
MFVFLVLLPLVSSQCVNLTTRTQLPPAYTNSITRGVYYPDKVFRSSVLHSTQDLFLPFFSNVTWFHAIHVSGTNGTKRFDNPVLPFNDGVYFASTEKSNIIRGWIFGTTLDSKTQSLLIVNNATNVVIKVCEFQFCNDPFLGVYYHKNNKSWMESEFRVYSSANNCTFEYVSQPFLMDLEGKQGNFKNLREFVFKNIDGYFKIYSKHTPINLVRDLPQGFSALEPLVDLPIGINITRFQTLLALHRSYLTPGDSSSGWTAGAAAYYVGYLQPRTFLLKYNENGTITDAVDCALDPLSETKCTLKSFTVEKGIYQTSNFRVQPTESIVRFPNITNLCPFGEVFNATRFASVYAWNRKRISNCVADYSVLYNSASFSTFKCYGVSPTKLNDLCFTNVYADSFVIRGDEVRQIAPGQTGKIADYNYKLPDDFTGCVIAWNSNNLDSKVGGNYNYLYRLFRKSNLKPFERDISTEIYQAGSTPCNGVEGFNCYFPLQSYGFQPTNGVGYQPYRVVVLSFELLHAPATVCGPKKSTNLVKNKCVNFNFNGLTGTGVLTESNKKFLPFQQFGRDIADTTDAVRDPQTLEILDITPCSFGGVSVITPGTNTSNQVAVLYQDVNCTEVPVAIHADQLTPTWRVYSTGSNVFQTRAGCLIGAEHVNNSYECDIPIGAGICASYQTQTNSPRRARSVASQSIIAYTMSLGAENSVAYSNNSIAICTNFTISVTTEILPVSMTKTSVDCTMYICGDSTECSNLLLQYGSFCTQLNRALTGIAVEQDKNTQEVFAQVKQIYKTPPIKDFGGFNFSQILPDPSKPSKRSFIEDLLFNKVTLADAGFIKQYGDCLGDIAARDLICAQKFNGLTVLPPLLTDEMIAQYTSALLAGTITSGWTFGAGAALQIPFAMQMAYRFNGIGVTQNVLYENQKLIANQFNSAIGKIQDSLSSTASALGKLQDVVNQNAQALNTLVKQLSSNFGAISSVLNDILSRLDKVEAEVQIDRLITGRLQSLQTYVTQQLIRAAEIRASANLAATKMSECVLGQSKRVDFCGKGYHLMSFPQSAPHGVVFLHVTYVCAQEKNFTTAPAICHDGKAHFPREGVFVSNGTHWFVTQRNFYEPQIITTDNTFVSGNCDVVIGIVNNTVYDPLQPELDSFKEELDKYFKNHTSPDVDLGDISGINASVVNIQKEIDRLNEVAKNLNESLIDLQELGKYEQYIK

SEQ ID NO: 2086 - protein, 1211 aa, Artificial Sequence
  SARS-CoV-2/Guangdong/20SF028/2020__EPI_ISL_403936 spike protein (1-1211)(P715C_P1069C)
MFVFLVLLPLVSSQCVNLTTRTQLPPAYTNSFTRGVYYPDKVFRSSVLYSTQDLFLPFFSNVTWFHAIHVSGTNGTKRFDNPVLPFNDGVYFASTEKSNIIRGWIFGTTLDSKTQSLLIVNNATNVVIKVCEFQFCNDPFLGVYYHKNNKSWMESEFRVYSSANNCTFEYVSQPFLMDLEGKQGNFKNLREFVFKNIDGYFKIYSKHTPINLVRDLPQGFSALEPLVDLPIGINITRFQTLLALHRSYLTPGDSSSGWTAGAAAYYVGYLQPRTFLLKYNENGTITDAVDCALDPLSETKCTLKSFTVEKGIYQTSNFRVQPTESIVRFPNITNLCPFGEVFNATRFASVYAWNRKRISNCVADYSVLYNSASFSTFKCYGVSPTKLNDLCFTNVYADSFVIRGDEVRQIAPGQTGKIADYNYKLPDDFTGCVIAWNSNNLDSKVGGNYNYLYRLFRKSNLKPFERDISTEIYQAGSTPCNGVEGFNCYFPLQSYGFQPTNGVGYQPYRVVVLSFELLHAPATVCGPKKSTNLVKNKCVNFNFNGLTGTGVLTESNKKFLPFQQFGRDIADTTDAVRDPQTLEILDITPCSFGGVSVITPGTNTSNQVAVLYQDVNCTEVPVAIHADQLTPTWRVYSTGSNVFQTRAGCLIGAEHVNNSYECDIPIGAGICASYQTQTNSPRRARSVASQSIIAYTMSLGAENSVAYSNNSIAICTNFTISVTTEILPVSMTKTSVDCTMYICGDSTECSNLLLQYGSFCTQLNRALTGIAVEQDKNTQEVFAQVKQIYKTPPIKDFGGFNFSQILPDPSKPSKRSFIEDLLFNKVTLADAGFIKQYGDCLGDIAARDLICAQKFNGLTVLPPLLTDEMIAQYTSALLAGTITSGWTFGAGAALQIPFAMQMAYRFNGIGVTQNVLYENQKLIANQFNSAIGKIQDSLSSTASALGKLQDVVNQNAQALNTLVKQLSSNFGAISSVLNDILSRLDKVEAEVQIDRLITGRLQSLQTYVTQQLIRAAEIRASANLAATKMSECVLGQSKRVDFCGKGYHLMSFPQSAPHGVVFLHVTYVCAQEKNFTTAPAICHDGKAHFPREGVFVSNGTHWFVTQRNFYEPQIITTDNTFVSGNCDVVIGIVNNTVYDPLQPELDSFKEELDKYFKNHTSPDVDLGDISGINASVVNIQKEIDRLNEVAKNLNESLIDLQELGKYEQYIK

SEQ ID NO: 2087 - protein, 1211 aa, Artificial Sequence
  SARS-CoV-2/Shenzhen/SZTH-001/2020__EPI_ISL_406592 spike protein (1-1211)(P715C_P1069C)
MFVFLVLLPLVSSQCVNLTTRTQLPPAYTNSFTRGVYYPDKVFRSSVLHSTQDLFLPFFSNVTWFHAIHVSGTNGTKRFDNPVLPFNDGVYFASTEKSNIIRGWIFGTTLDSKTQSLLIVNNATNVVIKVCEFQFCNDPFLGVYYHKNNKSWMESEFRVYSSANNCTFEYVSQPFLMDLEGKQGNFKNLREFVFKNIDGYFKIYSKHTPINLVRDLPQGFSALEPLVDLPIGINITRFQTLLALHRSYLTPGDSSSGWTAGAAAYYVGYLQPRTFLLKYNENGTITDAVDCALDPLSETKCTLKSFTVEKGIYQTSNFRVQPTESIVRFPNITNLCPFGEVFNATRFASVYAWNRKRISNCVADYSVLYNSASFSTFKCYGVSPTKLNDLCFTNVYADSFVIRGDEVRQIAPGQTGKIADYNYKLPDDFTGCVIAWNSNNLDSKVGGNYNYLYRLFRKSNLKPFERDISTEIYQAGSTPCNGVEGFNCYFPLQSYGFQPTNGVGYQPYRVVVLSFELLHAPATVCGPKKSTNLVKNKCVNFNFNGLTGTGVLTESNKKFLPFQQFGRDIADTTDAVRDPQTLEILDITPCSFGGVSVITPGTNTSNQVAVLYQDVNCTEVPVAIHADQLTPTWRVYSTGSNVFQTRAGCLIGAEHVNNSYECDIPIGAGICASYQTQTNSPRRARSVASQSIIAYTMSLGAENSVAYSNNSIAICTNFTISVTTEILPVSMTKTSVDCTMYICGDSTECSNLLLQYGSFCTQLNRALTGIAVEQDKNTQEVFAQVKQIYKTPPIKDFGGFNFSQILPDPSKPSKRSFIEDLLFNKVTLADAGFIKQYGDCLGDIAARDLICAQKFNGLTVLPPLLTDEMIAQYTSALLAGTITSGWTFGAGAALQIPFAMQMAYRFNGIGVTQNVLYENQKLIANQFNSAIGKIQDSLSSTASALGKLQDVVNQNAQALNTLVKQLSSNFGAISSVLNDILSRLDKVEAEVQIDRLITGRLQSLQTYVTQQLIRAAEIRASANLAATKMSECVLGQSKRVDFCGKGYHLMSFPQSAPHGVVFLHVTYVCAQEKNFTTAPAICHDGKAHFPREGVFVSNGTHWFVTQRNFYEPQIITTDNTFVSGNCDVLIGIVNNTVYDPLQPELDSFKEELDKYFKNHTSPDVDLGDISGINASVVNIQKEIDRLNEVAKNLNESLIDLQELGKYEQYIK

SEQ ID NO: 2088 - protein, 1211 aa, Artificial Sequence
  SARS-CoV-2/Shenzhen/SZTH-004/2020__EPI_ISL_406595 spike protein (1-1211)(P715C_P1069C)
MFVFLVLLPLVSSQCVNLTTRTQLPPAYTNSFTRGVYYPDKVFRSSVLHSTQDLFLPFFSNVTWFHAIHVSGTNGTKRFDNPVLPFNDGVYFASTEKSNIIRGWIFGTTLDSKTQSLLIVNNATNVVIKVCEFQFCNDPFLGVYYHKNNKSWMESEFRVYSSANNCTFEYVSQPFLMDLEGKQGNFKNLREFVFKNIDGYFKIYSKHTPINLVRDLPQGFSALEPLVDLPIGINITRFQTLLALHRSYLTPGDSSSGWTAGAAAYYVGYLQPRTFLLKYNENGTITDAVDCALDPLSETKCTLKSFTVEKGIYQTSNFRVQPTESIVRFPNITNLCPFGEVFNATRFASVYAWDRKRISNCVAYYSVLYNSASFSTFKCYGVSPTKLNDLCFTNVYADSFVIRGDEVRQIAPGQTGKIADYNYKLPDDFTGCVIAWNSNNLDSKVGGNYNYLYRLFRKSNLKPFERDISTEIYQAGSTPCNGVEGFNCYFPLQSYGFQPTNGVGYQPYRVVVLSFELLHAPATVCGPKKSTNLVKNKCVNFNFNGLTGTGVLTESNKKFLPFQQFGRDIADTTDAVRDPQTLEILDITPCSFGGVSVITPGTNTSNQVAVLYQDVNCTEVPVAIHADQLTPTWRVYSTGSNVFQTRAGCLIGAEHVNNSYECDIPIGAGICASYQTQTNSPRRARSVASQSIIAYTMSLGAENSVAYSNNSIAICTNFTISVTTEILPVSMTKTSVDCTMYICGDSTECSNLLLQYGSFCTQLNRALTGIAVEQDKNTQEVFAQVKQIYKTPPIKDFGGFNFSQILPDPSKPSKRSFIEDLLFNKVTLADAGFIKQYGDCLGDIAARDLICAQKFNGLTVLPPLLTDEMIAQYTSALLAGTITSGWTFGAGAALQIPFAMQMAYRFNGIGVTQNVLYENQKLIANQFNSAIGKIQDSLSSTASALGKLQDVVNQNAQALNTLVKQLSSNFGAISSVLNDILSRLDKVEAEVQIDRLITGRLQSLQTYVTQQLIRAAEIRASANLAATKMSECVLGQSKRVDFCGKGYHLMSFPQSAPHGVVFLHVTYVCAQEKNFTTAPAICHDGKAHFPREGVFVSNGTHWFVTQRNFYEPQIITTDNTFVSGNCDVVIGIVNNTVYDPLQPELDSFKEELDKYFKNHTSPDVDLGDISGINASVVNIQKEIDRLNEVAKNLNESLIDLQELGKYEQYIK

SEQ ID NO: 2089 - protein, 1211 aa, Artificial Sequence
  SARS-CoV-2/France/IDF0372/2020__EPI_ISL_406596 spike protein (1-1211)(P715C_P1069C)
MFVFLVLLPLVSSQCVNLTTRTQLPPAYTNSFTRGVYYPDKVFRSSVLHSTQDLFLPFFSNVTWFHAIHVSGTNGTKRFDNPVLPFNDGVYFASTEKSNIIRGWIFGTTLDSKTQSLLIVNNATNVVIKVCEFQFCNDPFLGVYYHKNNKSWMESEFRVYSSANNCTFEYVSQPFLMDLEGKQGNFKNLREFVFKNIDGYFKIYSKHTPINLVRDLPQGFSALEPLVDLPIGINITRFQTLLALHRSYLTPGDSSSGWTAGAAAYYVGYLQPRTFLLKYNENGTITDAVDCALDPLSETKCTLKSFTVEKGIYQTSNFRVQPTESIVRFPNITNLCPFGEVFNATRFASVYAWNRKRISNCVADYSFLYNSASFSTFKCYGVSPTKLNDLCFTNVYADSFVIRGDEVRQIAPGQTGKIADYNYKLPDDFTGCVIAWNSNNLDSKVGGNYNYLYRLFRKSNLKPFERDISTEIYQAGSTPCNGVEGFNCYFPLQSYGFQPTNGVGYQPYRVVVLSFELLHAPATVCGPKKSTNLVKNKCVNFNFNGLTGTGVLTESNKKFLPFQQFGRDIADTTDAVRDPQTLEILDITPCSFGGVSVITPGTNTSNQVAVLYQDVNCTEVPVAIHADQLTPTWRVYSTGSNVFQTRAGCLIGAEHVNNSYECDIPIGAGICASYQTQTNSPRRARSVASQSIIAYTMSLGAENSVAYSNNSIAICTNFTISVTTEILPVSMTKTSVDCTMYICGDSTECSNLLLQYGSFCTQLNRALTGIAVEQDKNTQEVFAQVKQIYKTPPIKDFGGFNFSQILPDPSKPSKRSFIEDLLFNKVTLADAGFIKQYGDCLGDIAARDLICAQKFNGLTVLPPLLTDEMIAQYTSALLAGTITSGWTFGAGAALQIPFAMQMAYRFNGIGVTQNVLYENQKLIANQFNSAIGKIQDSLSSTASALGKLQDVVNQNAQALNTLVKQLSSNFGAISSVLNDILSRLDKVEAEVQIDRLITGRLQSLQTYVTQQLIRAAEIRASANLAATKMSECVLGQSKRVDFCGKGYHLMSFPQSAPHGVVFLHVTYVCAQEKNFTTAPAICHDGKAHFPREGVFVSNGTHWFVTQRNFYEPQIITTDNTFVSGNCDVVIGIVNNTVYDPLQPELDSFKEELDKYFKNHTSPDVDLGDISGINASVVNIQKEIDRLNEVAKNLNESLIDLQELGKYEQYIK

SEQ ID NO: 2090 - protein, 1211 aa, Artificial Sequence
  SARS-CoV-2/Australia/VIC01/2020__EPI_ISL_406844 spike protein (1-1211)(P715C_P1069C)
MFVFLVLLPLVSSQCVNLTTRTQLPPAYTNSFTRGVYYPDKVFRSSVLHSTQDLFLPFFSNVTWFHAIHVSGTNGTKRFDNPVLPFNDGVYFASTEKSNIIRGWIFGTTLDSKTQSLLIVNNATNVVIKVCEFQFCNDPFLGVYYHKNNKSWMESEFRVYSSANNCTFEYVSQPFLMDLEGKQGNFKNLREFVFKNIDGYFKIYSKHTPINLVRDLPQGFSALEPLVDLPIGINITRFQTLLALHRRYLTPGDSSSGWTAGAAAYYVGYLQPRTFLLKYNENGTITDAVDCALDPLSETKCTLKSFTVEKGIYQTSNFRVQPTESIVRFPNITNLCPFGEVFNATRFASVYAWNRKRISNCVADYSVLYNSASFSTFKCYGVSPTKLNDLCFTNVYADSFVIRGDEVRQIAPGQTGKIADYNYKLPDDFTGCVIAWNSNNLDSKVGGNYNYLYRLFRKSNLKPFERDISTEIYQAGSTPCNGVEGFNCYFPLQSYGFQPTNGVGYQPYRVVVLSFELLHAPATVCGPKKSTNLVKNKCVNFNFNGLTGTGVLTESNKKFLPFQQFGRDIADTTDAVRDPQTLEILDITPCSFGGVSVITPGTNTSNQVAVLYQDVNCTEVPVAIHADQLTPTWRVYSTGSNVFQTRAGCLIGAEHVNNSYECDIPIGAGICASYQTQTNSPRRARSVASQSIIAYTMSLGAENSVAYSNNSIAICTNFTISVTTEILPVSMTKTSVDCTMYICGDSTECSNLLLQYGSFCTQLNRALTGIAVEQDKNTQEVFAQVKQIYKTPPIKDFGGFNFSQILPDPSKPSKRSFIEDLLFNKVTLADAGFIKQYGDCLGDIAARDLICAQKFNGLTVLPPLLTDEMIAQYTSALLAGTITSGWTFGAGAALQIPFAMQMAYRFNGIGVTQNVLYENQKLIANQFNSAIGKIQDSLSSTASALGKLQDVVNQNAQALNTLVKQLSSNFGAISSVLNDILSRLDKVEAEVQIDRLITGRLQSLQTYVTQQLIRAAEIRASANLAATKMSECVLGQSKRVDFCGKGYHLMSFPQSAPHGVVFLHVTYVCAQEKNFTTAPAICHDGKAHFPREGVFVSNGTHWFVTQRNFYEPQIITTDNTFVSGNCDVVIGIVNNTVYDPLQPELDSFKEELDKYFKNHTSPDVDLGDISGINASVVNIQKEIDRLNEVAKNLNESLIDLQELGKYEQYIK

SEQ ID NO: 2091 - protein, 1211 aa, Artificial Sequence
  SARS-CoV-2/Germany/BavPat1/2020__EPI_ISL_406862 spike protein (1-1211)(P715C_P1069C)
MFVFLVLLPLVSSQCVNLTTRTQLPPAYTNSFTRGVYYPDKVFRSSVLHSTQDLFLPFFSNVTWFHAIHVSGTNGTKRFDNPVLPFNDGVYFASTEKSNIIRGWIFGTTLDSKTQSLLIVNNATNVVIKVCEFQFCNDPFLGVYYHKNNKSWMESEFRVYSSANNCTFEYVSQPFLMDLEGKQGNFKNLREFVFKNIDGYFKIYSKHTPINLVRDLPQGFSALEPLVDLPIGINITRFQTLLALHRSYLTPGDSSSGWTAGAAAYYVGYLQPRTFLLKYNENGTITDAVDCALDPLSETKCTLKSFTVEKGIYQTSNFRVQPTESIVRFPNITNLCPFGEVFNATRFASVYAWNRKRISNCVADYSVLYNSASFSTFKCYGVSPTKLNDLCFTNVYADSFVIRGDEVRQIAPGQTGKIADYNYKLPDDFTGCVIAWNSNNLDSKVGGNYNYLYRLFRKSNLKPFERDISTEIYQAGSTPCNGVEGFNCYFPLQSYGFQPTNGVGYQPYRVVVLSFELLHAPATVCGPKKSTNLVKNKCVNFNFNGLTGTGVLTESNKKFLPFQQFGRDIADTTDAVRDPQTLEILDITPCSFGGVSVITPGTNTSNQVAVLYQGVNCTEVPVAIHADQLTPTWRVYSTGSNVFQTRAGCLIGAEHVNNSYECDIPIGAGICASYQTQTNSPRRARSVASQSIIAYTMSLGAENSVAYSNNSIAICTNFTISVTTEILPVSMTKTSVDCTMYICGDSTECSNLLLQYGSFCTQLNRALTGIAVEQDKNTQEVFAQVKQIYKTPPIKDFGGFNFSQILPDPSKPSKRSFIEDLLFNKVTLADAGFIKQYGDCLGDIAARDLICAQKFNGLTVLPPLLTDEMIAQYTSALLAGTITSGWTFGAGAALQIPFAMQMAYRFNGIGVTQNVLYENQKLIANQFNSAIGKIQDSLSSTASALGKLQDVVNQNAQALNTLVKQLSSNFGAISSVLNDILSRLDKVEAEVQIDRLITGRLQSLQTYVTQQLIRAAEIRASANLAATKMSECVLGQSKRVDFCGKGYHLMSFPQSAPHGVVFLHVTYVCAQEKNFTTAPAICHDGKAHFPREGVFVSNGTHWFVTQRNFYEPQIITTDNTFVSGNCDVVIGIVNNTVYDPLQPELDSFKEELDKYFKNHTSPDVDLGDISGINASVVNIQKEIDRLNEVAKNLNESLIDLQELGKYEQYIK

SEQ ID NO: 2092 - protein, 1211 aa, Artificial Sequence
  SARS-CoV-2/Wuhan/HBCDC-HB-02/2020__EPI_ISL_412978 spike protein (1-1211)(P715C_P1069C)
MFVFLVLLPLVSSQCVNLTTRTQLPPAYTNSFTRGVYYPDKVFRSSVLHSTQDLFLPFFSNVTWFHAIHVSGTNGTKRFDNPVLPFNDGVYFASTEKSNIIRGWIFGTTLDSKTQSLLIVNNATNVVIKVCEFQFCNDPFLGVYYHKNNKSWMESEFRVYSSANNCTFEYVSQPFLMDLEGKQGNFKNLREFVFKNIDGYFKIYSKHTPINLVRDLPQGFSALEPLVDLPIGINITRFQTLLALHRSYLTPGDSSSGWTAGAAAYYVGYLQPRTFLLKYNENGTITDAVDCALDPLSETKCTLKSFTVEKGIYQTSNFRVQPTESIVRFPNITNLCPFGEVFNATRFASVYAWNRKRISNCVADYSVLYNSASFSTFKCYGVSPTKLNDLCFTNVYADSFVIRGDEVRQIAPGQTGKIADYNYKLPDDFTGCVIAWNSNNLDSKVGGNYNYLYRLFRKSNLKPFERDISTEIYQAGSTPCNGVEGFNCYFPLQSYGFQPTNGVGYQPYRVVVLSFELLHAPATVCGPKKSTNLVKNKCVNFNFNGLTGTGVLTESNKKFLPFQQFGRDIADTTDAVRDPQTLEILDITPCSFGGVSVITPGTNTSNQVAVLYQDVNCTEVPVAIHADQLTPTWRVYSTGSNVFQTRAGCLIGAEHVNNSYECDIPIGAGICASYQTQTNSPRRARSVASQSIIAYTMSLGAENSVAYSNNSIAICTNFTISVTTEILPVSMTKTSVDCTMYICGDSTECSNFLLQYGSFCTQLNRALTGIAVEQDKNTQEVFAQVKQIYKTPPIKDFGGFNFSQILPDPSKPSKRSFIEDLLFNKVTLADAGFIKQYGDCLGDIAARDLICAQKFNGLTVLPPLLTDEMIAQYTSALLAGTITSGWTFGAGAALQIPFAMQMAYRFNGIGVTQNVLYENQKLIANQFNSAIGKIQDSLSSTASALGKLQDVVNQNAQALNTLVKQLSSNFGAISSVLNDILSRLDKVEAEVQIDRLITGRLQSLQTYVTQQLIRAAEIRASANLAATKMSECVLGQSKRVDFCGKGYHLMSFPQSAPHGVVFLHVTYVCAQEKNFTTAPAICHDGKAHFPREGVFVSNGTHWFVTQRNFYEPQIITTDNTFVSGNCDVVIGIVNNTVYDPLQPELDSFKEELDKYFKNHTSPDVDLGDISGINASVVNIQKEIDRLNEVAKNLNESLIDLQELGKYEQYIK

SEQ ID NO: 2093 - protein, 1211 aa, Artificial Sequence
  SARS-CoV-2/Australia/QLD02/2020__EPI_ISL_407896 spike protein (1-1211)(P715C_P1069C)
MFVFLVLLPLVSSQCVNLTTRTQLPPAYTNSFTRGVYYPDKVFRSSVLHSTQDLFLPFFSNVTWFHAIHVSGTNGTKRFDNPVLPFNDGVYFASTEKSNIIRGWIFGTTLDSKTQSLLIVNNATNVVIKVCEFQFCNDPFLGVYYHKNNKSWMESEFRVYSSANNCTFEYVSQPFLMDLEGKQGNFKNLREFVFKNIDGYFKIYSKHTPINLVRDLPQGFSALEPLVDLPIGINITRFQTLLALHRSYLTPGDSSSGWTAGAAAYYVGYLQPRTFLLKYNENGTITDAVDCALDPLSETKCTLKSFTVEKGIYQTSNFRVQPTESIVRFPNITNLCPFGEVFNATRFASVYAWNRKRISNCVADYSVLYNSASFSTFKCYGVSPTKLNDLCFTNVYADSFVIRGDEVRQIAPGQTGKIADYNYKLPDDFTGCVIAWNSNNLDSKVGGNYNYLYRLFRKSNLKPFERDISTEIYQAGSTPCNGVEGFNCYFPLQSYGFQPTNGVGYQPYRVVVLSFELLHAPATVCGPKKSTNLVKNKCVNFNFNGLTGTGVLTESNKKFLPFQQFGRDIADTTDAVRDPQTLEILDITPCSFGGVSVITPGTNTSNQVAVLYQDVNCTEVPVAIHADQLTPTWRVYSTGSNVFQTRAGCLIGAEHVNNSYECDIPIGAGICASYQTQTNSPRRARSVASQSIIAYTMSLGAENSVAYSNNSIAICTNFTISVTTEILPVSMTKTSVDCTMYICGDSTECSNLLLQYGSFCTQLNRALTGIAVEQDKNTQEVFAQVKQIYKTPPIKDFGGFNFSQILPDPSKPSKRSFIEDLLFNKVTLADAGFIKQYGDCLGDIAARDLICAQKFNGLTVLPPLLTDEMIAQYTSALLAGTITSGWTFGAGAALQIPFAMQMAYRFNGIGVTQNVLYENQKLIANQFNSAIGKIQDSLSSTASALGKLQDVVNQNAQALNTLVKQLSSNFGAISSVLNDILSRLDKVEAEVQIDRLITGRLQSLQTYVTQQLIRAAEIRASANLAATKMSECVLGQSKRVDFCGKGYHLMSFPQSAPHGVVFLHVTYVCAQEKNFTTAPAICHDGKAHFPREGVFVSNGTHWFVTQRNFYEPQIITTDNTFVSGNCDVVIGIVNNTVYDPLQLELDSFKEELDKYFKNHTSPDVDLGDISGINASVVNIQKEIDRLNEVAKNLNESLIDLQELGKYEQYIK

SEQ ID NO: 2094 - protein, 1211 aa, Artificial Sequence
  SARS-CoV-2/India/1-31/2020__EPI_ISL_413523 spike protein (1-1211)(P715C_P1069C)
MFVFLVLLPLVSSQCVNLTTRTQLPPAYTNSFTRGVYYPDKVFRSSVLHSTQDLFLPFFSNVTWFHAIHVSGTNGTKRFDNPVLPFNDGVYFASTEKSNIIRGWIFGTTLDSKTQSLLIVNNATNVVIKVCEFQFCNDPFLGVYYHKNNKSWMESEFRVYSSANNCTFEYVSQPFLMDLEGKQGNFKNLREFVFKNIDGYFKIYSKHTPINLVRDLPQGFSALEPLVDLPIGINITRFQTLLALHRSYLTPGDSSSGWTAGAAAYYVGYLQPRTFLLKYNENGTITDAVDCALDPLSETKCTLKSFTVEKGIYQTSNFRVQPTESIVRFPNITNLCPFGEVFNATRFASVYAWNRKRISNCVADYSVLYNSASFSTFKCYGVSPTKLNDLCFTNVYADSFVIRGDEVRQIAPGQTGKIADYNYKLPDDFTGCVIAWNSNNLDSKVGGNYNYLYRLFRKSNLKPFERDISTEIYQAGSTPCNGVEGFNCYFPLQSYGFQPTNGVGYQPYRVVVLSFELLHAPATVCGPKKSTNLVKNKCVNFNFNGLTGTGVLTESNKKFLPFQQFGRDIADTTDAVRDPQTLEILDITPCSFGGVSVITPGTNTSNQVAVLYQDVNCTEVPVAIHADQLTPTWRVYSTGSNVFQTRAGCLIGAEHVNNSYECDIPIGAGICASYQTQTNSPRRARSVASQSIIAYTMSLGAENSVAYSNNSIAICTNFTISVTTEILPVSMTKTSVDCTMYICGDSTECSNLLLQYGSFCTQLNRALTGIAVEQDKNTQEVFAQVKQIYKTPPIKDFGGFNFSQILPDPSKPSKRSFIEDLLFNKVTLADAGFIKQYGDCLGDIAARDLICAQKFNGLTVLPPLLTDEMIAQYTSALLAGTITSGWTFGAGAALQIPFAMQMAYRFNGIGVTQNVLYENQKLIANQFNSVIGKIQDSLSSTASALGKLQDVVNQNAQALNTLVKQLSSNFGAISSVLNDILSRLDKVEAEVQIDRLITGRLQSLQTYVTQQLIRAAEIRASANLAATKMSECVLGQSKRVDFCGKGYHLMSFPQSAPHGVVFLHVTYVCAQEKNFTTAPAICHDGKAHFPREGVFVSNGTHWFVTQRNFYEPQIITTDNTFVSGNCDVVIGIVNNTVYDPLQPELDSFKEELDKYFKNHTSPDVDLGDISGINASVVNIQKEIDRLNEVAKNLNESLIDLQELGKYEQYIK

SEQ ID NO: 2095 - protein, 1211 aa, Artificial Sequence
  SARS-CoV-2/Guangdong/GD2020087-P0008/2020__EPI_ISL_413863 spike protein (1-1211)(P715C_P1069C)
MFVFLVLLPLVSSQCVNLTTRTQLPPAYTNSFTRGVYYPDKVFRSSVLHSTQDLFLPFFSNVTWFHAIHVSGTNGTKRFDNPVLPFNDGVYFASTEKSNIIRGWIFGTTLDSKTQSLLIVNNATNVVIKVCEFQFCNDPFLGVYYHKNNKSWMESEFRVYSSANNCTFEYVSQPFLMDLEGKQGNFKNLREFVFKNIDGYFKIYSKHTPINLVRDLPQGFSALEPLVDLPIGINITRFQTLLALHRSYLTPGDSSSGWTAGAAAYYVGYLQPRTFLLKYNENGTITDAVDCALDPLSETKCTLKSFTVEKGIYQTSNFRVQPTESIVRFPNITNLCPFGEVFNATRFASVYAWNRKRISNCVADYSVLYNSASFSTFKCYGVSPTKLNDLCFTNVYADSFVIRGDEVREIAPGQTGKIADYNYKLPDDFTGCVIAWNSNNLDSKVGGNYNYLYRLFRKSNLKPFERDISTEIYQAGSTPCNGVEGFNCYFPLQSYGFQPTNGVGYQPYRVVVLSFELLHAPATVCGPKKSTNLVKNKCVNFNFNGLTGTGVLTESNKKFLPFQQFGRDIADTTDAVRDPQTLEILDITPCSFGGVSVITPGTNTSNQVAVLYQDVNCTEVPVAIHADQLTPTWRVYSTGSNVFQTRAGCLIGAEHVNNSYECDIPIGAGICASYQTQTNSPRRARSVASQSIIAYTMSLGAENSVAYSNNSIAICTNFTISVTTEILPVSMTKTSVDCTMYICGDSTECSNLLLQYGSFCTQLNRALTGIAVEQDKNTQEVFAQVKQIYKTPPIKDFGGFNFSQILPDPSKPSKRSFIEDLLFNKVTLADAGFIKQYGDCLGDIAARDLICAQKFNGLTVLPPLLTDEMIAQYTSALLAGTITSGWTFGAGAALQIPFAMQMAYRFNGIGVTQNVLYENQKLIANQFNSAIGKIQDSLSSTASALGKLQDVVNQNAQALNTLVKQLSSNFGAISSVLNDILSRLDKVEAEVQIDRLITGRLQSLQTYVTQQLIRAAEIRASANLAATKMSECVLGQSKRVDFCGKGYHLMSFPQSAPHGVVFLHVTYVCAQEKNFTTAPAICHDGKAHFPREGVFVSNGTHWFVTQRNFYEPQIITTDNTFVSGNCDVVIGIVNNTVYDPLQPELDSFKEELDKYFKNHTSPDVDLGDISGINASVVNIQKEIDRLNEVAKNLNESLIDLQELGKYEQYIK

SEQ ID NO: 2096 - protein, 1211 aa, Artificial Sequence
  SARS-CoV-2/Sweden/01/2020__EPI_ISL_411951 spike protein (1-1211)(P715C_P1069C)
MFVFLVLLPLVSSQCVNLTTRTQLPPAYTNSFTRGVYYPDKVFRSSVLHSTQDLFLPFFSNVTWFHAIHVSGTNGTKRFDNPVLPFNDGVYFASTEKSNIIRGWIFGTTLDSKTQSLLIVNNATNVVIKVCEFQFCNDPFLGVYYHKNNKSWMESEFRVYSSANNCTFEYVSQPFLMDLEGKQGNFKNLREFVFKNIDGYFKIYSKHTPINLVRDLPQGFSALEPLVDLPIGINITRFQTLLALHRSYLTPGDSSSGWTAGAAAYYVGYLQPRTFLLKYNENGTITDAVDCALDPLSETKCTLKSFTVEKGIYQTSNFRVQPTESIVRFPNITNLCPFGEVFNATRFASVYAWNRKRISNCVADYSVLYNSASFSTFKCYGVSPTKLNDLCFTNVYADSFVIRGDEVRQIAPGQTGKIADYNYKLPDDFTGCVIAWNSNNLDSKVGGNYNYLYRLFRKSNLKPFERDISTEIYQAGSTPCNGVEGFNCYFPLQSYGFQPTNGVGYQPYRVVVLSFELLHAPATVCGPKKSTNLVKNKCVNFNFNGLTGTGVLTESNKKFLPFQQFGRDIADTTDAVRDPQTLEILDITPCSFGGVSVITPGTNTSNQVAVLYQDVNCTEVPVAIHADQLTPTWRVYSTGSNVFQTRAGCLIGAEHVNNSYECDIPIGAGICASYQTQTNSPRRARSVASQSIIAYTMSLGAENSVAYSNNSIAICTNFTISVTTEILPVSMTKTSVDCTMYICGDSTECSNLLLQYGSFCTQLNRALTGIAVEQDKNTQEVFAQVKQIYKTPPIKDCGGFNFSQILPDPSKPSKRSFIEDLLFNKVTLADAGFIKQYGDCLGDIAARDLICAQKFNGLTVLPPLLTDEMIAQYTSALLAGTITSGWTFGAGAALQIPFAMQMAYRFNGIGVTQNVLYENQKLIANQFNSAIGKIQDSLSSTASALGKLQDVVNQNAQALNTLVKQLSSNFGAISSVLNDILSRLDKVEAEVQIDRLITGRLQSLQTYVTQQLIRAAEIRASANLAATKMSECVLGQSKRVDFCGKGYHLMSFPQSAPHGVVFLHVTYVCAQEKNFTTAPAICHDGKAHFPREGVFVSNGTHWFVTQRNFYEPQIITTDNTFVSGNCDVVIGIVNNTVYDPLQPELDSFKEELDKYFKNHTSPDVDLGDISGINASVVNIQKEIDRLNEVAKNLNESLIDLQELGKYEQYIK

SEQ ID NO: 2097 - protein, 1211 aa, Artificial Sequence
  SARS-CoV-2/Tianmen/HBCDC-HB-07/2020__EPI_ISL_412983 spike protein (1-1211)(P715C_P1069C)
MFVFLVLLPLVSSQCVNLTTRTQLPPAYTNSFTRGVYYPDKVFRSSVLHSTQDLFLPFFSNVTWFHAIHVSGTNGTKRFDNPVLPFNDGVYFASTEKSNIIRGWIFGTTLDSKTQSLLIVNNATNVVIKVCEFQFCNDPFLGVYYHKNNKSWMESEFRVYSSANNCTFEYVSQPFLMDLEGKQGNFKNLREFVFKNIDGYFKIYSKHTPINLVRDLPQGFSALEPLVDLPIGINITRFQTLLALHRSYLTPGDSSSGWTAGAAAYYVGYLQPRTFLLKYNENGTITDAVDCALDPLSETKCTLKSFTVEKGIYQTSNFRVQPTESIVRFPNITNLCPFGEVFNATRFASVYAWNRKRISNCVADYSVLYNSASFSTFKCYGVSPTKLNDLCFTNVYADSFVIRGDEVRQIAPGQTGKIADYNYKLPDDFTGCVIAWNSNNLDSKVGGNYNYLYRLFRKSNLKPFERDISTEIYQAGSTPCNGVEGFNCYFPLQSYGFQPTNGVGYQPYRVVVLSFELLHAPATVCGPKKSTNLVKNKCVNFNFNGLTGTGVLTESNKKFLPFQQFGRDIADTTDAVRDPQTLEILDITPCSFGGVSVITPGTNTSNQVAVLYQDLNCTEVPVAIHADQLTPTWRVYSTGSNVFQTRAGCLIGAEHVNNSYECDIPIGAGICASYQTQTNSPRRARSVASQSIIAYTMSLGAENSVAYSNNSIAICTNFTISVTTEILPVSMTKTSVDCTMYICGDSTECSNLLLQYGSFCTQLNRALTGIAVEQDKNTQEVFAQVKQIYKTPPIKDFGGFNFSQILPDPSKPSKRSFIEDLLFNKVTLADAGFIKQYGDCLGDIAARDLICAQKFNGLTVLPPLLTDEMIAQYTSALLAGTITSGWTFGAGAALQIPFAMQMAYRFNGIGVTQNVLYENQKLIANQFNSAIGKIQDSLSSTASALGKLQDVVNQNAQALNTLVKQLSSNFGAISSVLNDILSRLDKVEAEVQIDRLITGRLQSLQTYVTQQLIRAAEIRASANLAATKMSECVLGQSKRVDFCGKGYHLMSFPQSAPHGVVFLHVTYVCAQEKNFTTAPAICHDGKAHFPREGVFVSNGTHWFVTQRNFYEPQIITTDNTFVSGNCDVVIGIVNNTVYDPLQPELDSFKEELDKYFKNHTSPDVDLGDISGINASVVNIQKEIDRLNEVAKNLNESLIDLQELGKYEQYIK

SEQ ID NO: 2098 - protein, 1211 aa, Artificial Sequence
  SARS-CoV-2/Hong Kong/case42_VM20002493/2020__EPI_ISL_414527 spike protein (1-1211)(P715C_P1069C)
MFVFLVLLPLVSSQCVNLTTRTQLPPAYTNSFTRGVYYPDKVFRSSVLHSTQDLFLPFFSNVTWFHAIHVSGTNGTKRFDNPVLPFNDGVYFASTEKSNIIRGWIFGTTLDSKTQSLLIVNNATNVVIKVCEFQFCNDPFLGVYYHKNNKSWMESEFRVYSSANNCTFEYVSQPFLMDLEGKQGNFKNLREFVFKNIDGYFKIYSKHTPINLVRDLPQGFSALEPLVDLPIGINITRFQTLLALHRSYLTPGDSSSGWTAGAAAYYVGYLQPRTFLLKYNENGTITDAVDCALDPLSETKCTLKSFTVEKGIYQTSNFRVQPTESIVRFPNITNLCPFGEVFNATRFASVYAWNRKRISNCVADYSVLYNSASFSTFKCYGVSPTKLNDLCFTNVYADSFVIRGDEVRQIAPGQTGKIADYNYKLPDDFTGCVIAWNSNNLDSKVGGNYNYLYRLFRKSNLKPFERDISTEIYQAGSTPCNGVEGFNCYFPLQSYGFQPTNGVGYQPYRVVVLSFELLHAPATVCGPKKSTNLVKNKCVNFNFNGLTGTGVLTESNKKFLPFQQFGRDIADTTDAVRDPQTLEILDITPCSFGGVSVITPGTNTSNQVAVLYQDVNCTEVPVAIHADQLTPTWRVYSTGSNVFQTRAGCLIGAEHVNNSYECDIPIGAGICASYQTQTNSPRRARSVASQSIIAYTMSLGAENSVAYSNNSIAICTNFAISVTTEILPVSMTKTSVDCTMYICGDSTECSNLLLQYGSFCTQLNRALTGIAVEQDKNTQEVFAQVKQIYKTPPIKDFGGFNFSQILPDPSKPSKRSFIEDLLFNKVTLADAGFIKQYGDCLGDIAARDLICAQKFNGLTVLPPLLTDEMIAQYTSALLAGTITSGWTFGAGAALQIPFAMQMAYRFNGIGVTQNVLYENQKLIANQFNSAIGKIQDSLSSTASALGKLQDVVNQNAQALNTLVKQLSSNFGAISSVLNDILSRLDKVEAEVQIDRLITGRLQSLQTYVTQQLIRAAEIRASANLAATKMSECVLGQSKRVDFCGKGYHLMSFPQSAPHGVVFLHVTYVCAQEKNFTTAPAICHDGKAHFPREGVFVSNGTHWFVTQRNFYEPQIITTDNTFVSGNCDVVIGIVNNTVYDPLQPELDSFKEELDKYFKNHTSPDVDLGDISGINASVVNIQKEIDRLNEVAKNLNESLIDLQELGKYEQYIK

SEQ ID NO: 2099 - protein, 1211 aa, Artificial Sequence
  SARS-CoV-2/USA/CruiseA-23/2020__EPI_ISL_414482 spike protein (1-1211)(P715C_P1069C)
MFVFLVLLPLVSSQCVNLTTRTQLPPAYTNSFTRGVYYPDKVFRSSVLHSTQDLFLPFFSNVTWFHAIHVSGTNGTKRFDNPVLPFNDGVYFASTEKSNIIRGWIFGTTLDSKTQSLLIVNNATNVVIKVCEFQFCNDPFLGVYYHKNNKSWMESEFRVYSSANNCTFEYVSQPFLMDLEVKQGNFKNLREFVFKNIDGYFKIYSKHTPINLVRDLPQGFSALEPLVDLPIGINITRFQTLLALHRSYLTPGDSSSGWTAGAAAYYVGYLQPRTFLLKYNENGTITDAVDCALDPLSETKCTLKSFTVEKGIYQTSNFRVQPTESIVRFPNITNLCPFGEVFNATRFASVYAWNRKRISNCVADYSVLYNSASFSTFKCYGVSPTKLNDLCFTNVYADSFVIRGDEVRQIAPGQTGKIADYNYKLPDDFTGCVIAWNSNNLDSKVGGNYNYLYRLFRKSNLKPFERDISTEIYQAGSTPCNGVEGFNCYFPLQSYGFQPTNGVGYQPYRVVVLSFELLHAPATVCGPKKSTNLVKNKCVNFNFNGLTGTGVLTESNKKFLPFQQFGRDIADTTDAVRDPQTLEILDITPCSFGGVSVITPGTNTSNQVAVLYQDVNCTEVPVAIHADQLTPTWRVYSTGSNVFQTRAGCLIGAEHVNNSYECDIPIGAGICASYQTQTNSPRRARSVASQSIIAYTMSLGAENSVAYSNNSIAICTNFTISVTTEILPVSMTKTSVDCTMYICGDSTECSNLLLQYGSFCTQLNRALTGIAVEQDKNTQEVFAQVKQIYKTPPIKDFGGFNFSQILPDPSKPSKRSFIEDLLFNKVTLADAGFIKQYGDCLGDIAARDLICAQKFNGLTVLPPLLTDEMIAQYTSALLAGTITSGWTFGAGAALQIPFAMQMAYRFNGIGVTQNVLYENQKLIANQFNSAIGKIQDSLSSTASALGKLQDVVNQNAQALNTLVKQLSSNFGAISSVLNDILSRLDKVEAEVQIDRLITGRLQSLQTYVTQQLIRAAEIRASANLAATKMSECVLGQSKRVDFCGKGYHLMSFPQSAPHGVVFLHVTYVCAQEKNFTTAPAICHDGKAHFPREGVFVSNGTHWFVTQRNFYEPQIITTDNTFVSGNCDVVIGIVNNTVYDPLQPELDSFKEELDKYFKNHTSPDVDLGDISGINASVVNIQKEIDRLNEVAKNLNESLIDLQELGKYEQYIK

SEQ ID NO: 2100 - protein, 1211 aa, Artificial Sequence
  SARS-CoV-2/Hong Kong/case85_VM20002868/2020__EPI_ISL_414519 spike protein (1-1211)(P715C_P1069C)
MFVFLVLVPLVSSQCVNLTTRTQLPPAYTNSFTRGVYYPDKVFRSSVLHSTQDLFLPFFSNVTWFHAIHVSGTNGTKRFDNPVLPFNDGVYFASTEKSNIIRGWIFGTTLDSKTQSLLIVNNATNVVIKVCEFQFCNDPFLGVYYHKNNKSWMESEFRVYSSANNCTFEYVSQPFLMDLEGKQGNFKNLREFVFKNIDGYFKIYSKHTPINLVRDLPQGFSALEPLVDLPIGINITRFQTLLALHRSYLTPGDSSSGWTAGAAAYYVGYLQPRTFLLKYNENGTITDAVDCALDPLSETKCTLKSFTVEKGIYQTSNFRVQPTESIVRFPNITNLCPFGEVFNATRFASVYAWNRKRISNCVADYSVLYNSASFSTFKCYGVSPTKLNDLCFTNVYADSFVIRGDEVRQIAPGQTGKIADYNYKLPDDFTGCVIAWNSNNLDSKVGGNYNYLYRLFRKSNLKPFERDISTEIYQAGSTPCNGVEGFNCYFPLQSYGFQPTNGVGYQPYRVVVLSFELLHAPATVCGPKKSTNLVKNKCVNFNFNGLTGTGVLTESNKKFLPFQQFGRDIADTTDAVRDPQTLEILDITPCSFGGVSVITPGTNTSNQVAVLYQDVNCTEVPVAIHADQLTPTWRVYSTGSNVFQTRAGCLIGAEHVNNSYECDIPIGAGICASYQTQTNSPRRARSVASQSIIAYTMSLGAENSVAYSNNSIAICTNFTISVTTEILPVSMTKTSVDCTMYICGDSTECSNLLLQYGSFCTQLNRALTGIAVEQDKNTQEVFAQVKQIYKTPPIKDFGGFNFSQILPDPSKPSKRSFIEDLLFNKVTLADAGFIKQYGDCLGDIAARDLICAQKFNGLTVLPPLLTDEMIAQYTSALLAGTITSGWTFGAGAALQIPFAMQMAYRFNGIGVTQNVLYENQKLIANQFNSAIGKIQDSLSSTASALGKLQDVVNQNAQALNTLVKQLSSNFGAISSVLNDILSRLDKVEAEVQIDRLITGRLQSLQTYVTQQLIRAAEIRASANLAATKMSECVLGQSKRVDFCGKGYHLMSFPQSAPHGVVFLHVTYVCAQEKNFTTAPAICHDGKAHFPREGVFVSNGTHWFVTQRNFYEPQIITTDNTFVSGNCDVVIGIVNNTVYDPLQPELDSFKEELDKYFKNHTSPDVDLGDISGINASVVNIQKEIDRLNEVAKNLNESLIDLQELGKYEQYIK

SEQ ID NO: 2101 - protein, 1211 aa, Artificial Sequence; identical to SEQ ID NO: 2091
  SARS-CoV-2/England/200990660/2020__EPI_ISL_414523 spike protein (1-1211)(P715C_P1069C)

SEQ ID NO: 2102 - protein, 1211 aa, Artificial Sequence
  SARS-CoV-2/Australia/NSW09/2020__EPI_ISL_413595 spike protein (1-1211)(P715C_P1069C)
MFVFLVLLPLVSSQCVNLTTRTQLPPAYTNSFTRGVYYPDKVFRSSVLHSTQDLFLPFFSNVTWFHAIHVSGTNGTKRFDNPVLPFNDGVYFASTEKSNIIRGWIFGTTLDSKTQSLLIVNNATNVVIKVCEFQFCNDPFLGVYYHKNNKSWMESEFRVYSSANNCTFEYVSQPFLMDLEGKQGNFKNLREFVFKNIDGYFKIYSKHTPINLVRDLPQGFSALEPLVDLPIGINITRFQTLLALHRSYLTPGDSSSGWTAGAAAYYVGYLQPRTFLLKYNENGTITDAVDCALDPLSETKCTLKSFTVEKGIYQTSNFRVQPTESIVRFPNITNLCPFGEVFNATRFASVYAWNRKRISNCVADYSVLYNSASFSTFKCYGVSPTKLNDLCFTNVYADSFVIRGDEVRQIAPGQTGKIADYNYKLPDDFTGCVIAWNSNNLDSKVGGNYNYLYRLFRKSNLKPFERDISTEIYQAGSTPCNGVEGFNCYFPLQSYGFQPTNGVGYQPYRVVVLSFELLHAPATVCGPKKSTNLVKNKCVNFNFNGLTGTGVLTESNKKFLPFQQFGRDIADTTDAVRDPQTLEILDITPCSFGGVSVITPGTNTSNQVAVLYQDVNCTEVPVAIHADQLTPTWRVYSTGSNVFQTRAGCLIGAEHVNNSYECDIPIGAGICASYQTQTNSPRRARSVASQSIIAYTMSLGAENSVAYSNNSIAICTNFTISVTTEILPVSMTKTSVDCTMYICGDSTECSNLLLQYGSFCTQLNRALTGIAVEQDKNTQEVFAQVKQIYKTPPIKDFGGFNFSQILPDPSKPSKRSFIEDLLFNKVTLADAGFIKQYGDCLGDIAARDLICAQKFNGLTVLPPLLTDEMIAQYTSALLAGTITSGWTFGAGAALQIPFAMQMAYRFNGIGVTQNVLYENQKLIANQFNSAIGKIQDSLSFTASALGKLQDVVNQNAQALNTLVKQLSSNFGAISSVLNDILSRLDKVEAEVQIDRLITGRLQSLQTYVTQQLIRAAEIRASANLAATKMSECVLGQSKRVDFCGKGYHLMSFPQSAPHGVVFLHVTYVCAQEKNFTTAPAICHDGKAHFPREGVFVSNGTHWFVTQRNFYEPQIITTDNTFVSGNCDVVIGIVNNTVYDPLQPELDSFKEELDKYFKNHTSPDVDLGDISGINASVVNIQKEIDRLNEVAKNLNESLIDLQELGKYEQYIK

SEQ ID NO: 2103 - protein, 1211 aa, Artificial Sequence; identical to SEQ ID NO: 2083
  SARS-CoV-2/Australia/NSW10/2020__EPI_ISL_413596 spike protein (1-1211)(P715C_P1069C)

SEQ ID NO: 2104 - protein, 1211 aa, Artificial Sequence
  SARS-CoV-2/Switzerland/1000477797/2020__EPI_ISL_413023 spike protein (1-1211)(P715C_P1069C)
MFVFLVLLPLVSSQCVNLTTRTQLPPAYTNSFTRGVYYPDKVFRSSVLHSTQDLFLPFFSNVTWFHAIHVSGTNGTKRFDNPVLPFNDGVYFASTEKSNIIRGWIFGTTLDSKTQSLLIVNNATNVVIKVCEFQFCNDPFLGVYYHKNNKSWMESEFRVYSSANNCTFEYVSQPFLMDLEGKQGNFKNLREFVFKNIDGYFNIYSKHTPINLVRDLPQGFSALEPLVDLPIGINITRFQTLLALHRSYLTPGDSSSGWTAGAAAYYVGYLQPRTFLLKYNENGTITDAVDCALDPLSETKCTLKSFTVEKGIYQTSNFRVQPTESIVRFPNITNLCPFGEVFNATRFASVYAWNRKRISNCVADYSVLYNSASFSTFKCYGVSPTKLNDLCFTNVYADSFVIRGDEVRQIAPGQTGKIADYNYKLPDDFTGCVIAWNSNNLDSKVGGNYNYLYRLFRKSNLKPFERDISTEIYQAGSTPCNGVEGFNCYFPLQSYGFQPTNGVGYQPYRVVVLSFELLHAPATVCGPKKSTNLVKNKCVNFNFNGLTGTGVLTESNKKFLPFQQFGRDIADTTDAVRDPQTLEILDITPCSFGGVSVITPGTNTSNQVAVLYQGVNCTEVPVAIHADQLTPTWRVYSTGSNVFQTRAGCLIGAEHVNNSYECDIPIGAGICASYQTQTNSPRRARSVASQSIIAYTMSLGAENSVAYSNNSIAICTNFTISVTTEILPVSMTKTSVDCTMYICGDSTECSNLLLQYGSFCTQLNRALTGIAVEQDKNTQEVFAQVKQIYKTPPIKDFGGFNFSQILPDPSKPSKRSFIEDLLFNKVTLADAGFIKQYGDCLGDIAARDLICAQKFNGLTVLPPLLTDEMIAQYTSALLAGTITSGWTFGAGAALQIPFAMQMAYRFNGIGVTQNVLYENQKLIANQFNSAIGKIQDSLSSTASALGKLQDVVNQNAQALNTLVKQLSSNFGAISSVLNDILSRLDKVEAEVQIDRLITGRLQSLQTYVTQQLIRAAEIRASANLAATKMSECVLGQSKRVDFCGKGYHLMSFPQSAPHGVVFLHVTYVCAQEKNFTTAPAICHDGKAHFPREGVFVSNGTHWFVTQRNFYEPQIITTDNTFVSGNCDVVIGIVNNTVYDPLQPELDSFKEELDKYFKNHTSPDVDLGDISGINASVVNIQKEIDRLNEVAKNLNESLIDLQELGKYEQYIK

SEQ ID NO: 2105 - protein, 1211 aa, Artificial Sequence
  SARS-CoV-2/Belgium/BA-02291/2020__EPI_ISL_415159 spike protein (1-1211)(P715C_P1069C)
MFVFLVLLPLVSSQCVNLTTRTQLPPAYTNSFTRGVYYPDKVFRSSVLHSTQDLFLPFFSNVTWFHAIHVSGTNGTKRFDNPVLPFNDGVYFASTEKSNIIRGWIFGTTLDSKTQSLLIVNNATNVVIKVCEFQFCNDPFLGVYYHKNNKSWMESEFRVYSSANNCTFEYVSQPFLMDLEGKQGNFKNLREFVFKNIDGYFKIYSKHTPINLVRDLPQGFSALEPLVDLPIGINITRFQTLLALHRSYLTPGDSSSGWTAGAAAYYVGYLQPRTFLLKYNENGTITDAVDCALDPLSETKCTLKSFTVEKGIYQTSNFRVQPTESIVRFPNITNLCPFGEVFNATRFASVYAWNRKRISNCVADYSVLYNSASFSTFKCYGVSPTKLNDLCFTNVYADSFVIRGDEVRQIAPGQTGKIADYNYKLPDDFTGCVIAWNSNNLDSKVGGNYNYLYRLFRRSNLKPFERDISTEIYQAGSTPCNGVEGFNCYFPLQSYGFQPTNGVGYQPYRVVVLSFELLPAPATVCGPKKSTNLVKNKCVNFNFNGLTGTGVLTESNKKFLPFQQFGRDIADTTDAVRDPQTLEILDITPCSFGGVSVITPGTNTSNQVAVLYQGVNCTEVPVAIHADQLTPTWRVYSTGSNVFQTRAGCLIGAEHVNNSYECDIPIGAGICASYQTQTNSPRRARSVASQSIIAYTMSLGAENSVAYSNNSIAICTNFTISVTTEILPVSMTKTSVDCTMYICGDSTECSNLLLQYGSFCTQLNRALTGIAVEQDKNTQEVFAQVKQIYKTPPIKDFGGFNFSQILPDPSKPSKRSFIEDLLFNKVTLADAGFIKQYGDCLGDIAARDLICAQKFNGLTVLPPLLTDEMIAQYTSALLAGTITSGWTFGAGAALQIPFAMQMAYRFNGIGVTQNVLYENQKLIANQFNSAIGKIQDSLSSAAPALGKLQDVVNQNAQALNTLVKQLSSNFGAISSVLNDILSRLDKVEAEVQIDRLITGRLQSLQTYVTQQLIRAAEIRASANLAATKMSECVLGQSKRVDFCGKGYHLMSFPQSAPHGVVFLHVTYVCAQEKNFTTAPAICHDGKAHFPREGVFVSNGTHWFVTQRNFYEPQIITTDNTFVSGNCDVVIGIVNNTVYDPLQPELDSFKEELDKYFKNHTSPDVDLGDISGINASVVNIQKEIDRLNEVAKNLNESLIDLQELGKYEQYIK

SEQ ID NO: 2106 - protein, 1211 aa, Artificial Sequence
  SARS-CoV-2/USA/WA8-UW5/2020__EPI_ISL_413486 spike protein (1-1211)(P715C_P1069C)
MFVFLVLLPLVSSQCVNLTTRTQLPPAYTNSFTRGVYYPDKVFRSSVLHSTQDLFLPFFSNVTWFHAIHVSGTNGTKRFDNPVLPFNDGVYFASTEKSNIIRGWIFGTTLDSKTQSLLIVNNATNVVIKVCEFQFCNDPFLGVYYHKNNKSWMESEFRVYSSANNCTFEYVSQPFLMDLEGKQGNFKNLREFVFKNIDGYFKIYSKHTPINLVRDLPQGFSALEPLVDLPIGINITRFQTLLALHRSYLTPGDSSSGWTAGAAAYYVGYLQPRTFLLKYNENGTITDAVDCALDPLSETKCTLKSFTVEKGIYQTSNFRVQPTESIVRFPNITNLCPFGEVFNATRFASVYAWNRKRISNCVADYSVLYNSASFSTFKCYGVSPTKLNDLCFTNVYADSFVIRGDEVRQIAPGQTGKIADYNYKLPDDFTGCVIAWNSNNLDSKVGGNYNYLYRLFRKSNLKPFERDISTEIYQAGSTPCNGVEGFNCYFPLQSYGFQPTNGVGYQPYRVVVLSFELLHAPATVCGPKKSTNLVKNKCVNFNFNGLTGTGVLTESNKKFLPFQQFGRDIADTTDAVRDPQTLEILDITPCSFGGVSVITPGTNTSNQVAVLYQDVNCTEVPVAIHADQLTPTWRVYSTGSNVFQTRAGCLIGAEYVNNSYECDIPIGAGICASYQTQTNSPRRARSVASQSIIAYTMSLGAENSVAYSNNSIAICTNFTISVTTEILPVSMTKTSVDCTMYICGDSTECSNLLLQYGSFCTQLNRALTGIAVEQDKNTQEVFAQVKQIYKTPPIKDFGGFNFSQILPDPSKPSKRSFIEDLLFNKVTLADAGFIKQYGDCLGDIAARDLICAQKFNGLTVLPPLLTDEMIAQYTSALLAGTITSGWTFGAGAALQIPFAMQMAYRFNGIGVTQNVLYENQKLIANQFNSAIGKIQDSLSSTASALGKLQDVVNQNAQALNTLVKQLSSNFGAISSVLNDILSRLDKVEAEVQIDRLITGRLQSLQTYVTQQLIRAAEIRASANLAATKMSECVLGQSKRVDFCGKGYHLMSFPQSAPHGVVFLHVTYVCAQEKNFTTAPAICHDGKAHFPREGVFVSNGTHWFVTQRNFYEPQIITTDNTFVSGNCDVVIGIVNNTVYDPLQPELDSFKEELDKYFKNHTSPDVDLGDISGINASVVNIQKEIDRLNEVAKNLNESLIDLQELGKYEQYIK

SEQ ID NO: 2107 - protein, 1211 aa, Artificial Sequence
  SARS-CoV-2/England/20102000506/2020__EPI_ISL_415147 spike protein (1-1211)(P715C_P1069C)
MFVFLVLLPLVSSQCVNLTTRTQLPPAYTNSFTRGVYYPDKVFRSSVLHSTQDLFLPFFSNVTWFHAIHVSGTNGTKRFDNPVLPFNDGVYFASTEKSNIIRGWIFGTTLDSKTQSLLIVNNATNVVIKVCEFQFCNDPFLGVYYHKNNKSWMESEFRVYSSANNCTFEYVSQPFLMDLEGKQGNFKNLREFVFKNIDGYFKIYSKHTPINLVRDLPQGFSALEPLVDLPIGINITRFQTLLALHRSYLTPGDSSSGWTAGAAAYYVGYLQPRTFLLKYNENGTITDAVDCALDPLSETKCTLKSFTVEKGIYQTSNFRVQPTESIVRFPNITNLCPFGEVFNATRFASVYAWNRKRISNCVADYSVLYNSASFSTFKCYGVSPTKLNDLCFTNVYADSFVIRGDEVRQIAPGQTGKIADYNYKLPDDFTGCVIAWNSNNLDSKVGGNYNYLYRLFRKSNLKPFERDISTEIYQAGSTPCNGVEGFNCYFPLQSYGFQPTNGVGYQPYRVVVLSFELLHAPATVCGPKKSTNLVKNKCVNFNFNGLTGTGVLTESNKKFLPFQQFGRDIADTTDAVRDPQTLEILDITPCSFGGVSVITPGTNTSNQVAVLYQGVNCTEVPVAIHADQLTPTWRVYSTGSNVFQTRAGCLIGAEHVNNSYECDIPIGAGICASYQTQTNSPRRARSVASQSIIAYTMSLGAENSVAYSNNSIAICTNFTISVTTEILPVSMTKTSVDCTMYICGDSTECSNLLLQYGSFCTQLNRALTGIAVEQDKNTQEVFAQVKQIYKTPPIKDFGGFNFSQILPDPSKPSKRSFIEDLLFNKVTLADAGFIKQYGYCLGDIAARDLICAQKFNGLTVLPPLLTDEMIAQYTSALLAGTITSGWTFGAGAALQIPFAMQMAYRFNGIGVTQNVLYENQKLIANQFNSAIGKIQDSLSSTASALGKLQDVVNQNAQALNTLVKQLSSNFGAISSVLNDILSRLDKVEAEVQIDRLITGRLQSLQTYVTQQLIRAAEIRASANLAATKMSECVLGQSKRVDFCGKGYHLMSFPQSAPHGVVFLHVTYVCAQEKNFTTAPAICHDGKAHFPREGVFVSNGTHWFVTQRNFYEPQIITTDNTFVSGNCDVVIGIVNNTVYDPLQPELDSFKEELDKYFKNHTSPDVDLGDISGINASVVNIQKEIDRLNEVAKNLNESLIDLQELGKYEQYIK

SEQ ID NO: 2108 - protein, 1211 aa, Artificial Sequence
  SARS-CoV-2/Belgium/VAG-03013/2020__EPI_ISL_415155 spike protein (1-1211)(P715C_P1069C)
MFVFLVLLPLVSSQCVNLTTRTQLPPAYTNSFTRGVYYPDKVFRSSVLHSTQDLFLPFFSNVTWFHAIHVSGTNGTKRFDNPVLPFNDGVYFASTEKSNIIRGWIFGTTLDSKTQSLLIVNNATNVVIKVCEFQFCNDPFLGVYYHKNNKSWMESEFRVYSSANNCTFEYVSQPFLMDLEGKQGNFKNLREFVFKNIDGYFKIYSKHTPINLVRDLPQGFSALEPLVDLPIGINITRFQTLLALHRSYLTPGDSSSGWTAGAAAYYVGYLQPRTFLLKYNENGTITDAVDCALDPLSETKCTLKSFTVEKGIYQTSNFRVQPTESIVRFPNITNLCPFGEVFNATRFASVYAWNRKRISNCVADYSVLYNSASFSTFKCYGVSPTKLNDLCFTNVYADSFVIRGDEVRQIAPGQTGKIADYNYKLPDDFTGCVIAWNSNNLDSKVGGNYNYLYRLFRKSNLKPFERDISTEIYQAGSTPCNGVEGFNCYFPLQSYGFQPTNGVGYQPYRVVVLSFELLHAPATVCGPKKSTNLVKNKCVNFNFNGLTGTGVLTESNKKFLPFQQFGRDIADTTDAVRDPQTLEILDITPCSFGGVSVITPGTNTSNQVAVLYQGVNCTEVPVAIHADQLTPTWRVYSTGSNVFQTRAGCLIGAEHVNNSYECDIPIGAGICASYQTQTNSPRRARSVASQSIIAYTMSLGAENSVAYSNNSIAICTNFTISVTTEILPVSMTKTSVDCTMYICGDSTECSNLLLQYGSFCTQLNRALTGIAVEQDKNTQEVFAQVKQIYKTPPIKDFGGFNFSQILPDPSKPSKRSFIEDLLFNKVTLADAGFIKQYGDCLGDIAARDLICAQKFNGLTVLPPLLTDEMIAQYTSALLAGTITSGWTFGAGAALQIPFAMQMAYRFNGIGVTQNVLYENQKLIANQFNSAIGKIQDSLSSTATALGKLQDVVNQNAQALNTLVKQLSSNFGAISSVLNDILSRLDKVEAEVQIDRLITGRLQSLQTYVTQQLIRAAEIRASANLAATKMSECVLGQSKRVDFCGKGYHLMSFPQSAPHGVVFLHVTYVCAQEKNFTTAPAICHDGKAHFPREGVFVSNGTHWFVTQRNFYEPQIITTDNTFVSGNCDVVIGIVNNTVYDPLQPELDSFKEELDKYFKNHTSPDVDLGDISGINASVVNIQKEIDRLNEVAKNLNESLIDLQELGKYEQYIK

SEQ ID NO: 2109 - protein, 1211 aa, Artificial Sequence
  SARS-CoV-2/Belgium/BC-03016/2020__EPI_ISL_415157 spike protein (1-1211)(P715C_P1069C)
MFVFLVLLPLVSSQCVNLTTRTQLPPAYTNSFTRGVYYPDKVFRSSVLHSTQDLFLPFFSNVTWFHAIHVSGTNGTKRFDNPVLPFNDGVYFASTEKSNIIRGWIFGTTLDSKTQSLLIVNNATNVVIKVCEFQFCNDPFLGVYYHKNNKSWMESEFRVYSSANNCTFEYVSQPFLMDLEGKQGNFKNLREFVFKNIDGYFKIYSKHTPINLVRDLPQGFSALEPLVDLPIGINITRFQTLLALHRSYLTPGDSSSGWTAGAAAYYVGYLQPRTFLLKYNENGTITDAVDCALDPLSETKCTLKSFTVEKGIYQTSNFRVQPTESIVRFPNITNLCPFGEVFNATRFASVYAWNRKRISNCVADYSVLYNSASFSTFKCYGVSPTKLNDLCFTNVYADSFVIRGDEVRQIAPGQTGKIADYNYKLPDDFTGCVIAWNSNNLDSKVGGNYNYLYRLFRKSNLKPFERDISTEIYQAGSTPCNGVEGFNCYFPLQSYGFQPTNGVGYQPYRVVVLSFELLHAPATVCGPKKSTNLVKNKCVNFNFNGLTGTGVLTESNKKFLPFQQFGRDIADTTDAVRDPQTLEILDITPCSFGGVSVITPGTNTSNQVAVLYQGVNCTEVPVAIHADQLTPTWRVYSTGSNVFQTRAGCLIGAEHVNNSYECDIPIGAGICASYQTQTNSPRRARSVASQSIIAYTMSLGAENSVAYSNNSIAICTNFTISVTTEILPVSMTKTSVDCTMYICGDSTECSNLLLQYGSFCTQLNRALTGIAVEQDKNTQEVFAQVKQIYKTPPIKDFGGFNFSQILPDPSKPSKRSFIEDLLFNKVTLADAGFIKQYGDCLGDIAARDLICAQKFNGLTVLPPLLTDEMIAQYTSALLAGTITSGWTFGAGAALQIPFAMQMAYRFNGIGVTQNVLYENQKLIANQFNSAIGKIQDSLSSTAPALGKLQDVVNQNAQALNTLVKQLSSNFGAISSVLNDILSRLDKVEAEVQIDRLITGRLQSLQTYVTQQLIRAAEIRASANLAATKMSECVLGQSKRVDFCGKGYHLMSFPQSAPHGVVFLHVTYVCAQEKNFTTAPAICHDGKAHFPREGVFVSNGTHWFVTQRNFYEPQIITTDNTFVSGNCDVVIGIVNNTVYDPLQPELDSFKEELDKYFKNHTSPDVDLGDISGINASVVNIQKEIDRLNEVAKNLNESLIDLQELGKYEQYIK

SEQ ID NO: 2110 - protein, 1211 aa, Artificial Sequence
  SARS-CoV-2/Germany/BavPat3/2020__EPI_ISL_414521 spike protein (1-1211)(P715C_P1069C)
MFVFLVLLPLVSSQCVNLTTRTQLPPAYTNSFTRGVYYPDKVFRSSVLHSTQDLFLPFFSNVTWFHAIHVSGTNGTKRFDNPVLPFNDGVYFASTEKSNIIRGWIFGTTLDSKTQSLLIVNNATNVVIKVCEFQFCNDPFLGVYYHKNNKSWMESEFRVYSSANNCTFEYVSQPFLMDLEGKQGNFKNLREFVFKNIDGYFKIYSKHTPINLVRDLPQGFSALEPLVDLPIGINITRFQTLLALHRSYLTPGDSSSGWTAGAAAYYVGYLQPRTFLLKYNENGTITDAVDCALDPLSETKCTLKSFTVEKGIYQTSNFRVQPTESIVRFPNITNLCPFGEVFNATRFASVYAWNRKRISNCVADYSVLYNSASFSTFKCYGVSPTKLNDLCFTNVYADSFVIRGDEVRQIAPGQTGKIADYNYKLPDDFTGCVIAWNSNNLDSKVGGNYNYLYRLFRKSNLKPFERDISTEIYQAGSTPCNGVEGFNCYFPLQSYGFQPTNGVGYQPYRVVVLSFELLHAPATVCGPKKSTNLVKNKCVNFNFNGLTGTGVLTESNKKFLPFQQFGRDIADTTDAVRDPQTLEILDITPCSFGGVSVITPGTNTSNQVAVLYQDVNCTEVPVAIHADQLTPTWRVYSTGSNVFQTRAGCLIGAEHVNNSYECDIPIGAGICASYQTQTNSPRRARSVASQSIIAYTMSLGAENSVAYSNNSIAICTNFTISVTTEILPVSMTKTSVDCTMYICGDSTECSNLLLQYGSFCTQLNRALTGIAVEQDKNTQQVFAQVKQIYKTPPIKDFGGFNFSQILPDPSKPSKRSFIEDLLFNKVTLADAGFIKQYGDCLGDIAARDLICAQKFNGLTVLPPLLTDEMIAQYTSALLAGTITSGWTFGAGAALQIPFAMQMAYRFNGIGVTQNVLYENQKLIANQFNSAIGKIQDSLSSTASALGKLQDVVNQNAQALNTLVKQLSSNFGAISSVLNDILSRLDKVEAEVQIDRLITGRLQSLQTYVTQQLIRAAEIRASANLAATKMSECVLGQSKRVDFCGKGYHLMSFPQSAPHGVVFLHVTYVCAQEKNFTTAPAICHDGKAHFPREGVFVSNGTHWFVTQRNFYEPQIITTDNTFVSGNCDVVIGIVNNTVYDPLQPELDSFKEELDKYFKNHTSPDVDLGDISGINASVVNIQKEIDRLNEVAKNLNESLIDLQELGKYEQYIK

SEQ ID NO: 2111 - protein, 1211 aa, Artificial Sequence
  SARS-CoV-2/France/HF1805/2020__EPI_ISL_414628 spike protein (1-1211)(P715C_P1069C)
MFVFLVLLPLVSSQCVNLTTRTQLPPAYTNSFTRGVYYPDKVFRSSVLHSTQDLFLPFFSNVTWFHAIHVSGTNGTKRFDNPVLPFNDGVYFASTEKSNIIRGWIFGTTLDSKTQSLLIVNNATNVVIKVCEFQFCNDPFLGVYYHKNNKSWMESEFRVYSSANNCTFEYVSQPFLMDLEGKQGNFKNLREFVFKNIDGYFKIYSKHTPINLVRDLPQGFSALEPLVDLPIGINITRFQTLLALHRSYLTPGDSSSGWTAGAAAYYVGYLQPRTFLLKYNENGTITDAVDCALDPLSETKCTLKSFTVEKGIYQTSNFRVQPTESIVRFPNITNLCPFGEVFNATRFASVYAWNRKRISNCVADYSVLYNSASFSTFKCYGVSPTKLNDLCFTNVYADSFVIRGDEVRQIAPGQTGKIADYNYKLPDDFTGCVIAWNSNNLDSKVGGNYNYLYRLFRKSNLKPFERDISTEIYQAGSTPCNGVEGFNCYFPLQSYGFQPTNGVGYQPYRVVVLSFELLHAPATVCGPKKSTNLVKNKCVNFNFNGLTGTGVLTESNKKFLPFQQFGRDIADTTDAVRDPQTLEILDITPCSFGGVSVITPGTNTSNQVAVLYQGVNCTEVPVAIHADQLTPTWRVYSTGSNVFQTRAGCLIGAEHVNNSYECDIPIGAGICASYQTQTNSPRRARSVASQSIIAYTMSLGAENSVAYSNNSIAICTNFTISVTTEILPVSMTKTSVDCTMYICGDSTECSNLLLQYGSFCTQLNRALTGIAVEQDKNTQEVFAQVKQIYKTPPIKDFGGFNFSQILPDPSKPSKRSFIEDLLFNKVTLADAGFIKQYGDCLGDIAARDLICAQKFNGLTVLPPLLTDEMIAQYTSALLAGTITSGWTFGAGAALQIPFAMQMAYRFNGIGVTQNVLYENQKLIANQFNSAIGKIQDSLSSTASALGKLQDVVNQNAQALNTLVKQLSSNFGAISSVLNDILSRLDKVEAEVQIDRLITGRLQSLQTYVTQQLIRAAEIRASANLAATKMSECVLGQSKRVDFCGKGYHLMSFPQSAPHGVVFLHVTYVCAQEKNFTTAPAICHDGKAHFPREGVFVSNGTHWFVTQRNFYEPQIITTDNTFVSGNCDVVIGVVNNTVYDPLQPELDSFKEELDKYFKNHTSPDVDLGDISGINASVVNIQKEIDRLNEVAKNLNESLIDLQELGKYEQYIK

SEQ ID NO: 2112 - protein, 1211 aa, Artificial Sequence
  SARS-CoV-2/Netherlands/ZuidHolland_9/2020__EPI_ISL_414445 spike protein (1-1211)(P715C_P1069C)
MFVFLVLLPLVSSQCVNLTTRTQLPPAYTNSFTRGVYYPDKVFRSSVLHSTQDLFLPFFSNVTWFHAIHVSGTNGTKRFDNPVLPFNDGVYFASTEKSNIIRGWIFGTTLDSKTQSLLIVNNATNVVIKVCEFQFCNDPFLGVYYHKNNKSWMESEFRVYSSANNCTFEYVSQPFLMDLEGKQGNFKNLREFVFKNIDGYFKIYSKHTPINLVRDLPQGFSALEPLVDLPIGINITRFQTLLALHRSYLTPGDSSSGWTAGAAAYYVGYLQPRTFLLKYNENGTITDAVDCALDPLSETKCTLKSFTVEKGIYQTSNFRVQPTESIVRFPNITNLCPFGEVFNATRFASVYAWNRKRISNCVADYSVLYNSASFSTFKCYGVSPTKLNDLCFTNVYADSFVIRGDEVRQIAPGQTGKIADYNYKLPDDFTGCVIAWNSNNLDSKVGGNYNYLYRLFRKSNLKPFERDISTEIYQAGSTPCNGVEGFNCYFPLQSYGFQPTNGVGYQPYRVVVLSFELLHAPATVCGPKKSTNLVKNKCVNFNFNGLTGTGVLTESNKKFLPFQQFGRDIADTTDAVRDPQTLEILDITPCSFGGVSVITPGTNTSNQVAVLYQGVNCTEVPVAIHADQLTPTWRVYSTGSNVFQTRAGCLIGAEHVNNSYECDIPIGAGICASYQTQTNSPRRARSVASQSIIAYTMSLGAENSVAYSNNSIAICTNFTISVTTEILPVSMTKTSVDCTMYICGDSTECSNLLLQYGSFCTQLNRALTGIAVEQDKNTQEVFAQVKQIYKTPPIKDFGGFNFSQILPDPSKPSKRSFIEDLLFNKVTLADAGFIKQYGDCLGDIAARDLICVQKFNGLTVLPPLLTDEMIAQYTSALLAGTITSGWTFGAGAALQIPFAMQMAYRFNGIGVTQNVLYENQKLIANQFNSAIGKIQDSLSSTASALGKLQDVVNQNAQALNTLVKQLSSNFGAISSVLNDILSRLDKVEAEVQIDRLITGRLQSLQTYVTQQLIRAAEIRASANLAATKMSECVLGQSKRVDFCGKGYHLMSFPQSAPHGVVFLHVTYVCAQEKNFTTAPAICHDGKAHFPREGVFVSNGTHWFVTQRNFYEPQIITTDNTFVSGNCDVVIGIVNNTVYDPLQPELDSFKEELDKYFKNHTSPDVDLGDISGINASVVNIQKEIDRLNEVAKNLNESLIDLQELGKYEQYIK

SEQ ID NO: 2113 - protein, 1211 aa, Artificial Sequence
  SARS-CoV-2/Finland/FIN03032020A/2020__EPI_ISL_413602 spike protein (1-1211)(P715C_P1069C)
MFVFLVLLPLVSSQCVNLTTRTQLPPAYTNSFTRGVYYPDKVFRSSVLHSTQDLFLPFFSNVTWFHAIHVSGTNGTKRFDNPVLPFNDGVYFASTEKSNIIRGWIFGTTLDSKTQSLLIVNNATNVVIKVCEFQFCNDPFLGVYYHKNNKSWMESEFRVYSSANNCTFEYVSQPFLMDLEGKQGNFKNLREFVFKNIDGYFKIYSKHTPINLVRDLPQGFSALEPLVDLPIGINITRFQTLLALHRSYLTPGDSSSGWTAGAAAYYVGYLQPRTFLLKYNENGTITDAVDCALDPLSETKCTLKSFTVEKGIYQTSNFRVQPTESIVRFPNITNLCPFGEVFNATRFASVYAWNRKRISNCVADYSVLYNSASFSTFKCYGVSPTKLNDLCFTNVYADSFVIRGDEVRQIAPGQTGKIADYNYKLPDDFTGCVISWNSNNLDSKVGGNYNYLYRLFRKSNLKPFERDISTEIYQAGSTPCNGVEGFNCYFPLQSYGFQPTNGVGYQPYRVVVLSFELLHAPATVCGPKKSTNLVKNKCVNFNFNGLTGTGVLTESNKKFLPFQQFGRDIADTTDAVRDPQTLEILDITPCSFGGVSVITPGTNTSNQVAVLYQGVNCTEVPVAIHADQLTPTWRVYSTGSNVFQTRAGCLIGAEHVNNSYECDIPIGAGICASYQTQTNSPRRARSVASQSIIAYTMSLGAENSVAYSNNSIAICTNFTISVTTEILPVSMTKTSVDCTMYICGDSTECSNLLLQYGSFCTQLNRALTGIAVEQDKNTQEVFAQVKQIYKTPPIKDFGGFNFSQILPDPSKPSKRSFIEDLLFNKVTLADAGFIKQYGDCLGDIAARDLICAQKFNGLTVLPPLLTDEMIAQYTSALLAGTITSGWTFGAGAALQIPFAMQMAYRFNGIGVTQNVLYENQKLIANQFNSAIGKIQDSLSSTASALGKLQDVVNQNAQALNTLVKQLSSNFGAISSVLNDILSRLDKVEAEVQIDRLITGRLQSLQTYVTQQLIRAAEIRASANLAATKMSECVLGQSKRVDFCGKGYHLMSFPQSAPHGVVFLHVTYVCAQEKNFTTAPAICHDGKAHFPREGVFVSNGTHWFVTQRNFYEPQIITTDNTFVSGNCDVVIGIVNNTVYDPLQPELDSFKEELDKYFKNHTSPDVDLGDISGINASVVNIQKEIDRLNEVAKNLNESLIDLQELGKYEQYIK

SEQ ID NO: 2114 - protein, 1211 aa, Artificial Sequence
  SARS-CoV-2/France/GE1977/2020__EPI_ISL_414632 spike protein (1-1211)(P715C_P1069C)
MFVFLVLLPLVSSQCVNLTTRTQLPPAYTNSFTRGVYYPDKVFRSSVLHSTQDLFLPFFSNVTWFHAIHVSGTNGTKRFDNPVLPFNDGVYFASTEKSNIIRGWIFGTTLDSKTQSLLIVNNATNVVIKVCEFQFCNDPFLGVYYHKNNKSWMESEFRVYSSANNCTFEYVSQPFLMDLEGKQGNFKNLREFVFKNIDGYFKIYSKHTPINLVRDLPQGFSALEPLVDLPIGINITRFQTLLALHRSYLTPGDSSSGWTAGAAAYYVGYLQPRTFLLKYNENGTITDAVDCALDPLSETKCTLKSFTVEKGIYQTSNFRVQPTESIVRFPNITNLCPFGEVFNATRFASVYAWNRKRISNCVADYSVLYNSASFSTFKCYGVSPTKLNDLCFTNVYADSFVIRGDEVRQIAPGQTGKIADYNYKLPDDFTGCVIAWNSNNLDSKVGGNYNYLYRLFRKSNLKPFERDISTEIYQAGSTPCNGVEGFNCYFPLQSYGFQPTNGVGYQPYRVVVLSFELLHAPATVCGPKKSTNLVKNKCVNFNFNGLTGTGVLTESNKKFLPFQQFGRDIADTTDAVRDPQTLEILDITPCSFGGVSVITPGTNTSNQVAVLYQGVNCTEVPVAIHADQLTPTWRVYSTGSNVFQTRAGCLIGAEHVNNSYECDIPIGAGICASYQTQTNSPRRARSVASQSIIAYTMSLGAENSVAYSNNSIAICTNFTISVTTEILPVSMTKTSVDCTMYICGDSTECSNLLLQYGSFCTQLNRALTGIAVEQDKNTQEVFAQVKQIYKTPPIKDFGGFNFSQILPDPSKPSKRSFIEDLLFNKVTLADAGFIKQYGDCLGDIAARDLICAQKFNGLTVLPPLLTDEMIAQYTSALLAGTITSGWTFGAGAALQIPFAMQMAYRFNGIGVTQNVLYENQKLIANQFNSAIGKIQDSLFSTASALGKLQDVVNQNAQALNTLVKQLSSNFGAISSVLNDILSRLDKVEAEVQIDRLITGRLQSLQTYVTQQLIRAAEIRASANLAATKMSECVLGQSKRVDFCGKGYHLMSFPQSAPHGVVFLHVTYVCAQEKNFTTAPAICHDGKAHFPREGVFVSNGTHWFVTQRNFYEPQIITTDNTFVSGNCDVVIGIVNNTVYDPLQPELDSFKEELDKYFKNHTSPDVDLGDISGINASVVNIQKEIDRLNEVAKNLNESLIDLQELGKYEQYIK

SEQ ID NO: 2115 - protein, 1211 aa, Artificial Sequence
  SARS-CoV-2/Finland/FIN-313/2020__EPI_ISL_414641 spike protein (1-1211)(P715C_P1069C)
MFVFLVLLPLVSSQCVNLTTRTQLPPAYTNSFTRGVYYPDKVFRSSVLHSTQDLFLPFFSNVTWFHAIHVSGTNGTKRFDNPVLPFNDGVYFASTEKSNIIRGWIFGTTLDSKTQSLLIVNNATNVVIKVCEFQFCNDPFLGVYYHKNNKSWMESEFRVYSSANNCTFEYVSQPFLMDLEGKQGNFKNLREFVFKNIDGYFKIYSKHTPINLVRDLPQGFSALEPLVDLPIGINITRFKTLLALHRSYLTPGDSSSGWTAGAAAYYVGYLQPRTFLLKYNENGTITDAVDCALDPLSETKCTLKSFTVEKGIYQTSNFRVQPTESIVRFPNITNLCPFGEVFNATRFASVYAWNRKRISNCVADYSVLYNSASFSTFKCYGVSPTKLNDLCFTNVYADSFVIRGDEVRQIAPGQTGKIADYNYKLPDDFTGCVIAWNSNNLDSKVGGNYNYLYRLFRKSNLKPFERDISTEIYQAGSTPCNGVEGFNCYFPLQSYGFQPTNGVGYQPYRVVVLSFELLHAPATVCGPKKSTNLVKNKCVNFNFNGLTGTGVLTESNKKFLPFQQFGRDIADTTDAVRDPQTLEILDITPCSFGGVSVITPGTNTSNQVAVLYQGVNCTEVPVAIHADQLTPTWRVYSTGSNVFQTRAGCLIGAEHVNNSYECDIPIGAGICASYQTQTNSPRRARSVASQSIIAYTMSLGAENSVAYSNNSIAICTNFTISVTTEILPVSMTKTSVDCTMYICGDSTECSNLLLQYGSFCTQLNRALTGIAVEQDKNTQEVFAQVKQIYKTPPIKDFGGFNFSQILPDPSKPSKRSFIEDLLFNKVTLADAGFIKQYGDCLGDIAARDLICAQKFNGLTVLPPLLTDEMIAQYTSALLAGTITSGWTFGAGAALQIPFAMQMAYRFNGIGVTQNVLYENQKLIANQFNSAIGKIQDSLSSTASALGKLQDVVNQNAQALNTLVKQLSSNFGAISSVLNDILSRLDKVEAEVQIDRLITGRLQSLQTYVTQQLIRAAEIRASANLAATKMSECVLGQSKRVDFCGKGYHLMSFPQSAPHGVVFLHVTYVCAQEKNFTTAPAICHDGKAHFPREGVFVSNGTHWFVTQRNFYEPQIITTDNTFVSGNCDVVIGIVNNTVYDPLQPELDSFKEELDKYFKNHTSPDVDLGDISGINASVVNIQKEIDRLNEVAKNLNESLIDLQELGKYEQYIK

SEQ ID NO: 2116 - protein, 1211 aa, Artificial Sequence
  SARS-CoV-2/Netherlands/ZuidHolland_2/2020__EPI_ISL_414556 spike protein (1-1211)(P715C_P1069C)
MFVFLVLLPLVSSQCVNLTTRTQLPPAYTNSFTRGVYYPDKVFRSSVLHSTQDLFLPFFSNVTWFHAIHVSGTNGTKRFDNPVLPFNDGVYFASTEKSNIIRGWIFGTTLDSKTQSLLIVNNATNVVIKVCEFQFCNDPFLGVYYHKNNKSWMESEFRVYSSANNCTFEYVSQPFLMDLEGKQGNFKNLREFVFKNIDGYFKIYSKHTPINLVRDLPQGFSALEPLVDLPIGINITRFQTLLALHRSYLTPGDSSSGWTAGAAAYYVGYLQPRTFLLKYNENGTITDAVDCALDPLSETKCTLKSFTVEKGIYQTSNFRVQPTESIVRFPNITNLCPFGEVFNATRFASVYAWNRKRISNCVADYSVLYNSASFSTFKCYGVSPTKLNDLCFTNVYADSFVIRGDEVRQIAPGQTGKIADYNYKLPDDFTGCVIAWNSNNLDSKVGGNYNYLYRLFRKSNLKPFERDISTEIYQAGSTPCNGVEGFNCYFPLQSYGFQPTNGVGYQPYRVVVLSFELLHAPATVCGPKKSTNLVKNKCVNFNFNGLTGTGVLTESNKKFLPFQQFGRDIADTTDAVRDPQTLEILDITPCSFGGVSVITPGTNTSNQVAVLYQGVNCTEVPVAIHADQLTPTWRVYSTGSNVFQTRAGCLIGAEHVNNSYECDIPIGAGICASYQTQTNSPRRARSVASQSIIAYTMSLGAENSVAYSNNSIAICTNFTISVTTEILPVSMTKTSVDCTMYICGDSTECSNLLLQYGSFCTQLNRALTGIALEQDKNTQEVFAQVKQIYKTPPIKDFGGFNFSQILPDPSKPSKRSFIEDLLFNKVTLADAGFIKQYGDCLGDIAARDLICAQKFNGLTVLPPLLTDEMIAQYTSALLAGTITSGWTFGAGAALQIPFAMQMAYRFNGIGVTQNVLYENQKLIANQFNSAIGKIQDSLSSTASALGKLQDVVNQNAQALNTLVKQLSSNFGAISSVLNDILSRLDKVEAEVQIDRLITGRLQSLQTYVTQQLIRAAEIRASANLAATKMSECVLGQSKRVDFCGKGYHLMSFPQSAPHGVVFLHVTYVCAQEKNFTTAPAICHDGKAHFPREGVFVSNGTHWFVTQRNFYEPQIITTDNTFVSGNCDVVIGIVNNTVYDPLQPELDSFKEELDKYFKNHTSPDVDLGDISGINASVVNIQKEIDRLNEVAKNLNESLIDLQELGKYEQYIK

SEQ ID NO: 2117 - protein, 1211 aa, Artificial Sequence
  SARS-CoV-2/USA/WA-UW31/2020__EPI_ISL_414618 spike protein (1-1211)(P715C_P1069C)
MFVFLVLLPLVSSQCVNLTTRTQLPPAYTNSFTRGVYYPDKVFRSSVLHSTQDLFLPFFSNVTWFHAIHVSGTNGTKRFDNPVLPFNDGVYFASTEKSNIIRGWIFGTTLDSKTQSLLIVNNATNVVIKVCEFQFCNDPFLGVYYHKNNKSWMESEFRVYSSANNCTFEYVSQPFLMDLEGKQGNFKNLREFVFKNIDGYFKIYSKHTPINLVRDLPQGFSALEPLVDLPIGINITRFQTLLALHRSYLTPGDSSSGWTAGAAAYYVGYLQPRTFLLKYNENGTITDAVDCALDPLSETKCTLKSFTVEKGIYQTSNFRVQPTESIVRFPNITNLCPFGEVFNATRFASVYAWNRKRISNCVADYSVLYNSASFSTFKCYGVSPTKLNDLCFTNVYADSFVIRGDEVRQIAPGQTGKIADYNYKLPDDFTGCVIAWNSNNLDSKVGGNYNYLYRLFRKSNLKPFERDISTEIYQAGSTPCNGAEGFNCYFPLQSYGFQPTNGVGYQPYRVVVLSFELLHAPATVCGPKKSTNLVKNKCVNFNFNGLTGTGVLTESNKKFLPFQQFGRDIADTTDAVRDPQTLEILDITPCSFGGVSVITPGTNTSNQVAVLYQDVNCTEVPVAIHADQLTPTWRVYSTGSNVFQTRAGCLIGAEHVNNSYECDIPIGAGICASYQTQTNSPRRARSVASQSIIAYTMSLGAENSVAYSNNSIAICTNFTISVTTEILPVSMTKTSVDCTMYICGDSTECSNLLLQYGSFCTQLNRALTGIAVEQDKNTQEVFAQVKQIYKTPPIKDFGGFNFSQILPDPSKPSKRSFIEDLLFNKVTLADAGFIKQYGDCLGDIAARDLICAQKFNGLTVLPPLLTDEMIAQYTSALLAGTITSGWTFGAGAALQIPFAMQMAYRFNGIGVTQNVLYENQKLIANQFNSAIGKIQDSLSSTASALGKLQDVVNQNAQALNTLVKQLSSNFGAISSVLNDILSRLDKVEAEVQIDRLITGRLQSLQTYVTQQLIRAAEIRASANLAATKMSECVLGQSKRVDFCGKGYHLMSFPQSAPHGVVFLHVTYVCAQEKNFTTAPAICHDGKAHFPREGVFVSNGTHWFVTQRNFYEPQIITTDNTFVSGNCDVVIGIVNNTVYDPLQPELDSFKEELDKYFKNHTSPDVDLGDISGINASVVNIQKEIDRLNEVAKNLNESLIDLQELGKYEQYIK

SEQ ID NO: 2118 - protein, 1211 aa, Artificial Sequence
  SARS-CoV-2/South Korea/SNU01/2020__EPI_ISL_411929 spike protein (1-1211)(P715C_P1069C)
MFVFLVLLPLVSSQCVNLTTRTQLPPAYTNSFTRGVYYPDKVFRSSVLHSTQDLFLPFFSNVTWFHAIHVSGTNGTKRFDNPVLPFNDGVYFASTEKSNIIRGWIFGTTLDSKTQSLLIVNNATNVVIKVCEFQFCNDPFLGVYYHKNNKSWMESEFRVYSSANNCTFEYVSQPFLMDLEGKQGNFKNLREFVFKNIDGYFKIYSKHTPINLVRDLPQGFWALEPLVDLPIGINITRFQTLLALHRSYLTPGDSSSGWTAGAAAYYVGYLQPRTFLLKYNENGTITDAVDCALDPLSETKCTLKSFTVEKGIYQTSNFRVQPTESIVRFPNITNLCPFGEVFNATRFASVYAWNRKRISNCVADYSVLYNSASFSTFKCYGVSPTKLNDLCFTNVYADSFVIRGDEVRQIAPGQTGKIADYNYKLPDDFTGCVIAWNSNNLDSKVGGNYNYLYRLFRKSNLKPFERDISTEIYQAGSTPCNGVEGFNCYFPLQSYGFQPTNGVGYQPYRVVVLSFELLHAPATVCGPKKSTNLVKNKCVNFNFNGLTGTGVLTESNKKFLPFQQFGRDIADTTDAVRDPQTLEILDITPCSFGGVSVITPGTNTSNQVAVLYQDVNCTEVPVAIHADQLTPTWRVYSTGSNVFQTRAGCLIGAEHVNNSYECDIPIGAGICASYQTQTNSPRRARSVASQSIIAYTMSLGAENSVAYSNNSIAICTNFTISVTTEILPVSMTKTSVDCTMYICGDSTECSNLLLQYGSFCTQLNRALTGIAVEQDKNTQEVFAQVKQIYKTPPIKDFGGFNFSQILPDPSKPSKRSFIEDLLFNKVTLADAGFIKQYGDCLGDIAARDLICAQKFNGLTVLPPLLTDEMIAQYTSALLAGTITSGWTFGAGAALQIPFAMQMAYRFNGIGVTQNVLYENQKLIANQFNSAIGKIQDSLSSTASALGKLQDVVNQNAQALNTLVKQLSSNFGAISSVLNDILSRLDKVEAEVQIDRLITGRLQSLQTYVTQQLIRAAEIRASANLAATKMSECVLGQSKRVDFCGKGYHLMSFPQSAPHGVVFLHVTYVCAQEKNFTTAPAICHDGKAHFPREGVFVSNGTHWFVTQRNFYEPQIITTDNTFVSGNCDVVIGIVNNTVYDPLQPELDSFKEELDKYFKNHTSPDVDLGDISGINASVVNIQKEIDRLNEVAKNLNESLIDLQELGKYEQYIK

SEQ ID NO: 2119 - protein, 1211 aa, Artificial Sequence
  SARS-CoV-2/China/WF0004/2020__EPI_ISL_413694 spike protein (1-1211)(P715C_P1069C)
MFVFLVLLPLVSSQCVNLTTRTQLPPAYTNSFTRGVYYPDKVFRSSVLHSTQDLFLPFFSNVTWFHAIHVSGTNGTKRFDNPVLPFNDGVYFASTEKSNIIRGWIFGTTLDSKTQSLLIVNNATNVVIKVCEFQFCNDPFLGVYYHKNNKSWTESEFRVYSSANNCTFEYVSQPFLMDLEGKQGNFKNLREFVFKNIDGYFKIYSKHTPINLVRDLPQGFSALEPLVDLPIGINITRFQTLLALHRSYLTPGDSSSGWTAGAAAYYVGYLQPRTFLLKYNENGTITDAVDCALDPLSETKCTLKSFTVEKGIYQTSNFRVQPTESIVRFPNITNLCPFGEVFNATRFASVYAWNRKRISNCVADYSVLYNSASFSTFKCYGVSPTKLNDLCFTNVYADSFVIRGDEVRQIAPGQTGKIADYNYKLPDDFTGCVIAWNSNNLDSKVGGNYNYLYRLFRKSNLKPFERDISTEIYQAGSTPCNGVEGFNCYFPLQSYGFQPTNGVGYQPYRVVVLSFELLHAPATVCGPKKSTNLVKNKCVNFNFNGLTGTGVLTESNKKFLPFQQFGRDIADTTDAVRDPQTLEILDITPCSFGGVSVITPGTNTSNQVAVLYQDVNCTEVPVAIHADQLTPTWRVYSTGSNVFQTRAGCLIGAEHVNNSYECDIPIGAGICASYQTQTNSPRRARSVASQSIIAYTMSLGAENSVAYSNNSIAICTNFTISVTTEILPVSMTKTSVDCTMYICGDSTECSNLLLQYGSFCTQLNRALTGIAVEQDKNTQEVFAQVKQIYKTPPIKDFGGFNFSQILPDPSKPSKRSFIEDLLFNKVTLADAGFIKQYGDCLGDIAARDLICAQKFNGLTVLPPLLTDEMIAQYTSALLAGTITSGWTFGAGAALQIPFAMQMAYRFNGIGVTQNVLYENQKLIANQFNSAIGKIQDSLSSTASALGKLQDVVNQNAQALNTLVKQLSSNFGAISSVLNDILSRLDKVEAEVQIDRLITGRLQSLQTYVTQQLIRAAEIRASANLAATKMSECVLGQSKRFDFCGKGYHLMSFPQSAPHGVVFLHVTYVCAQEKNFTTAPAICHDGKAHFPREGVFVSNGTHWFVTQRNFYEPQIITTDNTFVSGNCDVVIGIVNNTVYDPLQPELDSFKEELDKYFKNHTSPDVDLGDISGINASVVNIQKEIDRLNEVAKNLNESLIDLQELGKYEQYIK

SEQ ID NO: 2120 - protein, 1211 aa, Artificial Sequence
  SARS-CoV-2/China/WF0028/2020__EPI_ISL_413791 spike protein (1-1211)(P715C_P1069C)
MFVFLVLLPLVSSQCVNLTTRTQLPPAYTNSFTRGVYYPDKVFRSSVLHSTQDLFLPFFSNVTWFHAIHVSGTNGTKRFDNPVLPFNDGVYFASTEKSNIIRGWIFGTTLDSKTQSLLIVNNATNVVIKVCEFQFCNDPFLGVYYHKNNKSWMESEFRVYSSANNCTFEYVSQPFLMDLEGKQGNFKNLREFVFKNIDGYFKIYSKHTPINLVRDLPQGFSALEPLVDLPIGINITRFQTLLALHRSYLTPGDSSSGWTAGAAAYYVGYLQPRTFLLKYNENGTITDAVDCALDPLSETKCTLKSFTVEKGIYQTSNFRVQPTESIVRFPNITNLCPFGEVFNATRFASVYAWNRKRISNCVADYSVLYNSASFSTFKCYGVSPTKLNDLCFTNVYADSFVIRGDEVRQIAPGQTGKIADYNYKLPDDFTGCVIAWNSNNLDSKVGGNYNYLYRLFRKSNLKPFERDISTEIYQAGSTPCNGVEGFNCYFPLQSYGFQPTNGVGYQPYRVVVLSFELLHAPATVCGPKKSTNLVKNKCVNFNFNGLTGTGVLTESNKKFLPFQQFGRDIADTTDAVRDPQTLEILDITPCSFGGVSVITPGTNTSNQVAVLYQDVNCTEVPVAIHADQLTPTWRVYSTGSNVFQTRAGCLIGAEHVNNSYECDIPIGAGICASYQTQTNSPRRARSVASQSIIAYTMSLGAENSVAYSNNSIAICTNFTISVTTEILPVSMTKTSVDCTMYICGDSTECSNLLLQYGSFCTQLNRALTGIAVEQDKNTQEVFAQVKQIYKTPPIKDFGGFNFSQILPDPSKPSKRSFIEDLLFNKVTLADAGFIKQYGDCLGDIAARDLICAQKFNGLTVLPPLLTDEMIAQYTSALLAGTITSGWTFGAGAALQIPFAMQMAYRFNGIGVTQNVLYENQKLIANQFNSAIGKIQDSLSSTASALGKLQDVVNQNAQALNTLVKQLSSNFGAISSVLNDILSRLDKVEAEVQIDRLITGRLQSLQTYVTQQLIRAAEIRASANLAATKMSECVLGQSKRVDFCGKGYHLMSFPQSAPHGVVFLHVTYVCAQEKNFTTAPAICHDGKAHFPREGVFVSNGTHWFVTQRNFYEPQIITTDNTFVSGNCDVVIGIVNNTVYDPLQPELESFKEELDKYFKNHTSPDVDLGDISGINASVVNIQKEIDRLNEVAKNLNESLIDLQELGKYEQYIK

SEQ ID NO: 2121 - protein, 1211 aa, Artificial Sequence
  SARS-CoV-2/2019-nCoV/USA-CruiseA-18/2020__MT159716.1 spike protein (1-1211)(P715C_P1069C)
MFVFLVLLPLVSSQCVNLTTRTQLPPAYTNSFTRGVYYPDKVFRSSVLHSTQDLFLPFFSNVTWFHAIHVSGTNGTKRFDNPVLPFNDGVYFASTEKSNIIRGWIFGTTLDSKTQSLLIVNNATNVVIKVCEFQFCNDPFLGVYYHKNNKSWMESELRVYSSANNCTFEYVSQPFLMDLEGKQGNFKNLREFVFKNIDGYFKIYSKHTPINLVRDLPQGFSALEPLVDLPIGINITRFQTLLALHRSYLTPGDSSSGWTAGAAAYYVGYLQPRTFLLKYNENGTITDAVDCALDPLSETKCTLKSFTVEKGIYQTSNFRVQPTESIVRFPNITNLCPFGEVFNATRFASVYAWNRKRISNCVADYSVLYNSASFSTFKCYGVSPTKLNDLCFTNVYADSFVIRGDEVRQIAPGQTGKIADYNYKLPDDFTGCVIAWNSNNLDSKVGGNYNYLYRLFRKSNLKPFERDISTEIYQAGSTPCNGVEGFNCYFPLQSYGFQPTNGVGYQPYRVVVLSFELLHAPATVCGPKKSTNLVKNKCVNFNFNGLTGTGVLTESNKKFLPFQQFGRDIADTTDAVRDPQTLEILDITPCSFGGVSVITPGTNTSNQVAVLYQDVNCTEVPVAIHADQLTPTWRVYSTGSNVFQTRAGCLIGAEHVNNSYECDIPIGAGICASYQTQTNSPRRARSVASQSIIAYTMSLGAENSVAYSNNSIAICTNFTISVTTEILPVSMTKTSVDCTMYICGDSTECSNLLLQYGSFCTQLNRALTGIAVEQDKNTQEVFAQVKQIYKTPPIKDFGGFNFSQILPDPSKPSKRSFIEDLLFNKVTLADAGFIKQYGDCLGDIAARDLICAQKFNGLTVLPPLLTDEMIAQYTSALLAGTITSGWTFGAGAALQIPFAMQMAYRFNGIGVTQNVLYENQKLIANQFNSAIGKIQDSLSSTASALGKLQDVVNQNAQALNTLVKQLSSNFGAISSVLNDILSRLDKVEAEVQIDRLITGRLQSLQTYVTQQLIRAAEIRASANLAATKMSECVLGQSKRVDFCGKGYHLMSFPQSAPHGVVFLHVTYVCAQEKNFTTAPAICHDGKAHFPREGVFVSNGTHWFVTQRNFYEPQIITTDNTFVSGNCDVVIGIVNNTVYDPLQPELDSFKEELDKYFKNHTSPDVDLGDISGINASVVNIQKEIDRLNEVAKNLNESLIDLQELGKYEQYIK

SEQ ID NO: 2122 - protein, 1211 aa, Artificial Sequence
  SARS-CoV-2/SARS-CoV-2/Yunnan-01/human/2020/CHN__MT049951.1 spike protein (1-1211)(P715C_P1069C)
MFVFLVLLPLVSSQCVNLTTRTQLPPANTNSFTRGVYYPDKVFRSSVLHSTQDLFLPFFSNVTWFHAIHVSGTNGTKRFDNPVLPFNDGVYFASTEKSNIIRGWIFGTTLDSKTQSLLIVNNATNVVIKVCEFQFCNDPFLGVYYHKNNKSWMESEFRVYSSANNCTFEYVSQPFLMDLEGKQGNFKNLREFVFKNIDGYFKIYSKHTPINLVRDLPQGFSALEPLVDLPIGINITRFQTLLALHRSYLTPGDSSSGWTAGAAAYYVGYLQPRTFLLKYNENGTITDAVDCALDPLSETKCTLKSFTVEKGIYQTSNFRVQPTESIVRFPNITNLCPFGEVFNATRFASVYAWNRKRISNCVADYSVLYNSASFSTFKCYGVSPTKLNDLCFTNVYADSFVIRGDEVRQIAPGQTGKIADYNYKLPDDFTGCVIAWNSNNLDSKVGGNYNYLYRLFRKSNLKPFERDISTEIYQAGSTPCNGVEGFNCYFPLQSYGFQPTNGVGYQPYRVVVLSFELLHAPATVCGPKKSTNLVKNKCVNFNFNGLTGTGVLTESNKKFLPFQQFGRDIADTTDAVRDPQTLEILDITPCSFGGVSVITPGTNTSNQVAVLYQDVNCTEVPVAIHADQLTPTWRVYSTGSNVFQTRAGCLIGAEHVNNSYECDIPIGAGICASYQTQTNSPRRARSVASQSIIAYTMSLGAENSVAYSNNSIAICTNFTISVTTEILPVSMTKTSVDCTMYICGDSTECSNLLLQYGSFCTQLNRALTGIAVEQDKNTQEVFAQVKQIYKTPPIKDFGGFNFSQILPDPSKPSKRSFIEDLLFNKVTLADAGFIKQYGDCLGDIAARDLICAQKFNGLTVLPPLLTDEMIAQYTSALLAGTITSGWTFGAGAALQIPFAMQMAYRFNGIGVTQNVLYENQKLIANQFNSAIGKIQDSLSSTASALGKLQDVVNQNAQALNTLVKQLSSNFGAISSVLNDILSRLDKVEAEVQIDRLITGRLQSLQTYVTQQLIRAAEIRASANLAATKMSECVLGQSKRVDFCGKGYHLMSFPQSAPHGVVFLHVTYVCAQEKNFTTAPAICHDGKAHFPREGVFVSNGTHWFVTQRNFYEPQIITTDNTFVSGNCDVVIGIVNNTVYDPLQPELDSFKEELDKYFKNHTSPDVDLGDISGINASVVNIQKEIDRLNEVAKNLNESLIDLQELGKYEQYIK

SEQ ID NO: 2123 - protein, 1211 aa, Artificial Sequence
  SARS-CoV-2/USA/WA-UW292/2020__EPI_ISL_418077 spike protein (1-1211)(P715C_P1069C)
MFVFLVLLPLVSSQCVNLTTRTQLPPAYTNSFTRGVYYPDKVFRSSVLHSTQDLFLPFFSNVTWFHAIHVSGTNGTKRFDNPVLPFNDGVYFASTEKSNIIRGWIFGTTLDSKTQSLLIVNNATNVVIKVCEFQFCNDPFLGVYYHKNNKSWMESEFRVYSSANNCTFEYVSQPFLMDLEGKQGNFKNLREFVFKNIDGYFKIYSKHTPINLVRDLPQGFSALEPLVDLPIGINITRFQTLLALHRSYLTPGDSSSGWTAGAAAYYVGYLQPRTFLLKYNENGTITDAVDCALDPLSETKCTLKSFTVEKGIYQTSNFRVQPTESIVRFPNITNLCPFGEVFNATRFASVYAWNRKRISNCVADYSVLYNSASFSTFKCYGVSPTKLNDLCFTNVYADSFVIRGDEVRQIAPGQTGKIADYNYKLPDDFTGCVIAWNSNNLDSKVGGNYNYLYRLFRKSNLKPFERDISTEIYQASSTPCNGVEGFNCYFPLQSYGFQPTNGVGYQPYRVVVLSFELLHAPATVCGPKKSTNLVKNKCVNFNFNGLTGTGVLTESNKKFLPFQQFGRDIADTTDAVRDPQTLEILDITPCSFGGVSVITPGTNTSNQVAVLYQDVNCTEVPVAIHADQLTPTWRVYSTGSNVFQTRAGCLIGAEHVNNSYECDIPIGAGICASYQTQTNSPRRARSVASQSIIAYTMSLGAENSVAYSNNSIAICTNFTISVTTEILPVSMTKTSVDCTMYICGDSTECSNLLLQYGSFCTQLNRALTGIAVEQDKNTQEVFAQVKQIYKTPPIKDFGGFNFSQILPDPSKPSKRSFIEDLLFNKVTLADAGFIKQYGDCLGDIAARDLICAQKFNGLTVLPPLLTDEMIAQYTSALLAGTITSGWTFGAGAALQIPFAMQMAYRFNGIGVTQNVLYENQKLIANQFNSAIGKIQDSLSSTASALGKLQDVVNQNAQALNTLVKQLSSNFGAISSVLNDILSRLDKVEAEVQIDRLITGRLQSLQTYVTQQLIRAAEIRASANLAATKMSECVLGQSKRVDFCGKGYHLMSFPQSAPHGVVFLHVTYVCAQEKNFTTAPAICHDGKAHFPREGVFVSNGTHWFVTQRNFYEPQIITTDNTFVSGNCDVVIGIVNNTVYDPLQPELDSFKEELDKYFKNHTSPDVDLGDISGINASVVNIQKEIDRLNEVAKNLNESLIDLQELGKYEQYIK

SEQ ID NO: 2124 - protein, 1211 aa, Artificial Sequence
  SARS-CoV-2/Iceland/192/2020__EPI_ISL_417819 spike protein (1-1211)(P715C_P1069C)
MFVFFVLLPLVSSQCVNLTTRTQLPPAYTNSFTRGVYYPDKVFRSSVLHSTQDLFLPFFSNVTWFHAIHVSGTNGTKRFDNPVLPFNDGVYFASTEKSNIIRGWIFGTTLDSKTQSLLIVNNATNVVIKVCEFQFCNDPFLGVYYHKNNKSWMESEFRVYSSANNCTFEYVSQPFLMDLEGKQGNFKNLREFVFKNIDGYFKIYSKHTPINLVRDLPQGFSALEPLVDLPIGINITRFQTLLALHRSYLTPGDSSSGWTAGAAAYYVGYLQPRTFLLKYNENGTITDAVDCALDPLSETKCTLKSFTVEKGIYQTSNFRVQPTESIVRFPNITNLCPFGEVFNATRFASVYAWNRKRISNCVADYSVLYNSASFSTFKCYGVSPTKLNDLCFTNVYADSFVIRGDEVRQIAPGQTGKIADYNYKLPDDFTGCVIAWNSNNLDSKVGGNYNYLYRLFRKSNLKPFERDISTEIYQAGSTPCNGVEGFNCYFPLQSYGFQPTNGVGYQPYRVVVLSFELLHAPATVCGPKKSTNLVKNKCVNFNFNGLTGTGVLTESNKKFLPFQQFGRDIADTTDAVRDPQTLEILDITPCSFGGVSVITPGTNTSNQVAVLYQGVNCTEVPVAIHADQLTPTWRVYSTGSNVFQTRAGCLIGAEHVNNSYECDIPIGAGICASYQTQTNSPRRARSVASQSIIAYTMSLGAENSVAYSNNSIAICTNFTISVTTEILPVSMTKTSVDCTMYICGDSTECSNLLLQYGSFCTQLNRALTGIAVEQDKNTQEVFAQVKQIYKTPPIKDFGGFNFSQILPDPSKPSKRSFIEDLLFNKVTLADAGFIKQYGDCLGDIAARDLICAQKFNGLTVLPPLLTDEMIAQYTSALLAGTITSGWTFGAGAALQIPFAMQMAYRFNGIGVTQNVLYENQKLIANQFNSAIGKIQDSLSSTASALGKLQDVVNQNAQALNTLVKQLSSNFGAISSVLNDILSRLDKVEAEVQIDRLITGRLQSLQTYVTQQLIRAAEIRASANLAATKMSECVLGQSKRVDFCGKGYHLMSFPQSAPHGVVFLHVTYVCAQEKNFTTAPAICHDGKAHFPREGVFVSNGTHWFVTQRNFYEPQIITTDNTFVSGNCDVVIGIVNNTVYDPLQPELDSFKEELDKYFKNHTSPDVDLGDISGINASVVNIQKEIDRLNEVAKNLNESLIDLQELGKYEQYIK

SEQ ID NO: 2125 - protein, 1211 aa, Artificial Sequence
  SARS-CoV-2/Belgium/ULG-6939/2020__EPI_ISL_417020 spike protein (1-1211)(P715C_P1069C)
MFVFLVLLPLVSSQCVNLTTRTQLPPAYTNSFTRGVYYPDKVFRSSVLHSTQDLFLPFFSNVTWFHAIHVSGTNGTKRFDNPVLPFNDGVYFASTEKSNIIRGWIFGTTLDSKTQSLLIVNNATNVVIKVCEFQFCNDPFLGVYYHKNNKSWMESEFRVYSSANNCTFEYVSQPFLMDLEGKQGNFKNLREFVFKNIDGYFKIYSKHTPINLVRDLPQGFSALEPLVDLPIGINITRFQTLLALHRSYLTPGDSSSGWTAGAAAYYVGYLQPRTFLLKYNENGTITDAVDCALDPLSETKCTLKSFTVEKGIYQTSNFRVQPTESIVRFPNITNLCPFGEVFNATRFASVYAWNRKRISNCVADYSVLYNSASFSTFKCYGVSPTKLNDLCFTNVYADSFVIRGDEVRQIAPGQTGKIADYNYKLPDDFTGCVIAWNSNNLDSKVGGNYNYLYRLFRKSNLKPFERDISTEIYQAGSTPCNGVEGFNCYFPLQSYGFQPTNGVGYQPYRVVVLSFELLHAPATVCGPKKSTNLVKNKCVNFNFNGLTGTGVLTESNKKFLPFQQFGRDIADTTDAVRDPQTLEILDITPCSFGGVSVITPGTNTSNQVAVLYQGVNCTEVPVAIHADQLTPTWRVYSTGSNVFQTRAGCLIGAEHVNNSYECDIPIGAGICASYQTQTNSPRRARSVASQSIIAYTMSLGAENSVVYSNNSIAICTNFTISVTTEILPVSMTKTSVDCTMYICGDSTECSNLLLQYGSFCTQLNRALTGIAVEQDKNTQEVFAQVKQIYKTPPIKDFGGFNFSQILPDPSKPSKRSFIEDLLFNKVTLADAGFIKQYGDCLGDIAARDLICAQKFNGLTVLPPLLTDEMIAQYTSALLAGTITSGWTFGAGAALQIPFAMQMAYRFNGIGVTQNVLYENQKLIANQFNSAIGKIQDSLSSTASALGKLQDVVNQNAQALNTLVKQLSSNFGAISSVLNDILSRLDKVEAEVQIDRLITGRLQSLQTYVTQQLIRAAEIRASANLAATKMSECVLGQSKRVDFCGKGYHLMSFPQSAPHGVVFLHVTYVCAQEKNFTTAPAICHDGKAHFPREGVFVSNGTHWFVTQRNFYEPQIITTDNTFVSGNCDVVIGIVNNTVYDPLQPELDSFKEELDKYFKNHTSPDVDLGDISGINASVVNIQKEIDRLNEVAKNLNESLIDLQELGKYEQYIK

SEQ ID NO: 2126 - protein, 1211 aa, Artificial Sequence
  SARS-CoV-2/France/HF2496/2020__EPI_ISL_418231 spike protein (1-1211)(P715C_P1069C)
MFVFLVLLPLVSSQCVNLTTRTQLPPAYTNSFTRGVYYPDKVFRSSVLHSTQDLFLPFFSNVTWFHAIHVSGTNGTKRFDNPVLPFNDGVYFASTEKSNIIRGWIFGTTLDSKTQSLLIVNNATNVVIKVCEFQFCNDPFLGVYYHKNNKSWMESEFRVYSSANNCTFEYVSQPFLMDLEGKQGNFKNLREFVFKNIDGYFKIYSKHTPINLVRDLPQGFSALEPLVDLPIGINITRFQTLLALHRSYLTPGDSSSGWTAGAAAYYVGYLQPRTFLLKYNENGTITDAVDCALDPLSETKCTLKSFTVEKGIYQTSNFRVQPTESIVRFPNITNLCPFGEVFNATRFASVYAWNRKRISNCVADYSVLYNSASFSTFKCYGVSPTKLNDLCFTNVYADSFVIRGDEVRQIAPGQTGKIADYNYKLPDDFTGCVIAWNSNNLDSKVGGNYNYLYRLFRKSNLKPFERDISTEIYQAGSTPCNGVEGFNCYFPLQSYGFQPTNGVGYQPYRVVVLSFELLHAPATVCGPKKSTNLVKNKCVNFNFNGLTGTGVLTESNKKFLPFQQFGRDIADTTDAVRDPQTLEILDITPCSFGGVSVITPGTNTSNQVAVLYQGVNCTEVPVAIHADQLTPTWRVYSTGSNVFQTRAGCLIGAEHVNNSYECDIPIGAGICASYQTQTNSPRRARSVASQSIIAYTMSLGAENSVAYSNNSIAICTNFTISVTTEILPVSMTKTSVDCTMYICGDSTECSNLLLQYGSFCTQLNRALTGIAVEQDKNTQEVFAQVKQIYKTPPIKDFGGFNFSQILPDPSKPSKRSFIEDLLFNKVTLADAGFIKQYGDCLGDIVARDLICAQKFNGLTVLPPLLTDEMIAQYTSALLAGTITSGWTFGAGAALQIPFAMQMAYRFNGIGVTQNVLYENQKLIANQFNSAIGKIQDSLSSTASALGKLQDVVNQNAQALNTLVKQLSSNFGAISSVLNDILSRLDKVEAEVQIDRLITGRLQSLQTYVTQQLIRAAEIRASANLAATKMSECVLGQSKRVDFCGKGYHLMSFPQSAPHGVVFLHVTYVCAQEKNFTTAPAICHDGKAHFPREGVFVSNGTHWFVTQRNFYEPQIITTDNTFVSGNCDVVIGIVNNTVYDPLQPELDSFKEELDKYFKNHTSPDVDLGDISGINASVVNIQKEIDRLNEVAKNLNESLIDLQELGKYEQYIK

SEQ ID NO: 2127 - protein, 1211 aa, Artificial Sequence
  SARS-CoV-2/USA/WA-UW291/2020__EPI_ISL_418076 spike protein (1-1211)(P715C_P1069C)
MFVFLVLLPLVSSQCVNLTTRTQLPPAYTNSFTRGVYYPDKVFRSSVLHSTQDLFLPFFSNVTWFHAIHVSGTNGTKRFDNPVLPFNDGVYFASTEKSNIIRGWIFGTTLDSKTQSLLIVNNATNVVIKVCEFQFCNDPFLGVYYHKNNKSWMESEFRVYSSANNCTFEYVSQPFLMDLEGKQGNFKNLREFVFKNIDGYFKIYSKHTPINLVRDLPQGFSALEPLVDLPIGINITRFQTLLALHRSYLTPGDSSSGWTAGAAAYYVGYLQPRTFLLKYNENGTITDAVDCALDPLSETKCTLKSFTVEKGIYQTSNFRVQPTESIVRFPNITNLCPFGEVFNATRFASVYAWNRKRISNCVADYSVLYNSASFSTFKCYGVSPTKLNDLCFTNVYADSFVIRGDEVRQIAPGQTGKIADYNYKLPDDFTGCVIAWNSNNLDSKVGGNYNYLYRLFRKSNLKPFERDISTEIYQAGSTPCNGVEGFNCYFPLQSYGFQPTNGVGYQPYRVVVLSFELLHAPATVCGPKKSTNLVKNKCVNFNFNGLTGTGVLTESNKKFLPFQQFGRDIADTTDAVRDPQTLEILDITPCSFGGVSVITPGTNTSNQVAVLYQGVNCTEVPVAIHADQLTPTWRVYSTGSNVFQTRAGCLIGAEHVNNSYECDIPIGAGICASYQTQTNSPRRARSVASQSIIAYTMSLGAENSVAYSNNSIAICTNFTISVTTEILPVSMTKTSVDCTMYICGDSTECSNLLLQYGSFCTQLNRALTGIAVEQDKNTQEVFAQVKQIYKTPPIKDFGGFNFSQILPDPSKPSKRSFIEDLLFNKVTLADAGFIKQYGDCLGDIAARDLICAQKFNGLTVLPPLLTDEMIAQYTSALLAGTITSGWTFGAGAALQIPFAMQMAYRFNGIGVTQNVLYENQKLIANQFNSAIGKIQYSLSSTASALGKLQDVVNQNAQALNTLVKQLSSNFGAISSVLNDILSRLDKVEAEVQIDRLITGRLQSLQTYVTQQLIRAAEIRASANLAATKMSECVLGQSKRVDFCGKGYHLMSFPQSAPHGVVFLHVTYVCAQEKNFTTAPAICHDGKAHFPREGVFVSNGTHWFVTQRNFYEPQIITTDNTFVSGNCDVVIGIVNNTVYDPLQPELDSFKEELDKYFKNHTSPDVDLGDISGINASVVNIQKEIDRLNEVAKNLNESLIDLQELGKYEQYIK

SEQ ID NO: 2128 - protein, 1211 aa, Artificial Sequence; identical to SEQ ID NO: 2091
  SARS-CoV-2/Portugal/PT0034/2020__EPI_ISL_418019 spike protein (1-1211)(P715C_P1069C)

SEQ ID NO: 2129 - protein, 1211 aa, Artificial Sequence
  SARS-CoV-2/Iceland/202/2020__EPI_ISL_417750 spike protein (1-1211)(P715C_P1069C)
MFVFLVLLPLVSSQCVNLTTRTQLPPAYTNSFTRGVYYPDKVFRSSVLHSTQDLFLPFFSNVTWFHAIHVSGTNGTKRFDNPVLPFNDGVYFASTEKSNIIRGWIFGTTLDSKTQSLLIVNNATNVVIKVCEFQFCNDPFLGVYYHKNNKSWMESEFRVYSSANNCTFEYVSQPFLMDLEGKQGNFKNLREFVFKNIDGYFKIYSKHTPINLVRDLPQGFSALEPLVDLPIGINITRFQTLLALHRSYLTPGDSSSGWTAGAAAYYVGYLQPRTFLLKYNENGTITDAVDCALDPLSETKCTLKSFTVEKGIYQTSNFRVQPTESIVRFPNITNLCPFGEVFNATRFASVYAWNRKRISNCVADYSVLYNSASFSTFKCYGVSPTKLNDLCFTNVYADSFVIRGDEVRQIAPGQTGKIADYNYKLPDDFTGCVIAWNSNNLDSKVGGNYNYLYRLFRKSNLKPFERDISTEIYQAGSTPCNGVEGFNCYFPLQSYGFQPTNGVGYQPYRVVVLSFELLHAPATVCGPKKSTNLVKNKCVNFNFNGLTGTGVLTESNKKFLPFQQFGRDIADTTDAVRDPQTLEILDITPCSFGGVSVITPGTNTSNQVAVLYQDVNCTEVPVAIHADQLTPTWRVYSTGSNVFQTRAGCLIGAEHVNNSYECDIPIGAGICASYQTQTNSPRRARSVASQSIIAYTMSLGAENSVAYSNNSIAICTNFTISVTTEILPVSMTKTSVDCTMYICGDSTECSNLLLQYGSFCTQLNRALTGIAVEQDKNTQEVFAQVKQIYKTPPIKDFGGFNFSQILPDPSKPSKRSFIEDLLFNKVTLADAGFIKQYGDCLGDIAARDLICAQKFNGLTVLPPLLTDEMIAQYTSALLAGTITSGWTFGAGAALQIPFAMQMAYRFNGIGVTQNVLYENQKLIANQFNSAIGKIQDSLSSTASALGKLQDVVNQNAQALNTLVKQLSSNFGAISSVLNDILSRLDKVEAEVQIDRLITGRLQSLQTYVTQQLIRAAEIRASANLAATKMSECVLGQSKRVDFCGKGYHLMSFPQSAPHGVVFLHVTYVCAQEKNFTTAPAICHDGKAHFPREGVFVSNGTHWFVTQRNFYEPQIITTDNTFVSGNCDVVIGIVNNTVYDPLQPELDSFKEELDKYFKNHTSPDVDLGDIPGINASVVNIQKEIDRLNEVAKNLNESLIDLQELGKYEQYIK

SEQ ID NO: 2130 - protein, 1211 aa, Artificial Sequence
  SARS-CoV-2/USA/WA-UW261/2020__EPI_ISL_418046 spike protein (1-1211)(P715C_P1069C)
MFVFLVLLPLVSSQCVNLTTRTQLPPAYTNSFTRGVYYPDKVFRSSVLHSTQDLFLPFFSNVTWFHAIHVSGTNGTKRFDNPVLPFNDGVYFASTEKSNIIRGWIFGTTLDSKTQSLLIVNNATNVVIKVCEFQFCNDPFLGVYYHKNNKSWMESEFRVYSSANNCTFEYVSQPFLMDLEGKQGNFKNLREFVFKNIDGYFKIYSKHTPINLVRDLPQGFSALEPLVDLPIGINITRFQTLLALHRSYLTPGDSSSGWTAGAAAYYVGYLQPRTFLLKYNENGTITDAVDCALDPLSETKCTLKSFTVEKGIYQTSNFRVQPTESIVRFPNITNLCPFGEVFNATRFTSVYAWNRKRISNCVADYSVLYNSASFSTFKCYGVSPTKLNDLCFTNVYADSFVIRGDEVRQIAPGQTGKIADYNYKLPDDFTGCVIAWNSNNLDSKVGGNYNYLYRLFRKSNLKPFERDISTEIYQAGSTPCNGVEGFNCYFPLQSYGFQPTNGVGYQPYRVVVLSFELLHAPATVCGPKKSTNLVKNKCVNFNFNGLTGTGVLTESNKKFLPFQQFGRDIADTTDAVRDPQTLEILDITPCSFGGVSVITPGTNTSNQVAVLYQDVNCTEVPVAIHADQLTPTWRVYSTGSNVFQTRAGCLIGAEHVNNSYECDIPIGAGICASYQTQTNSPRRARSVASQSIIAYTMSLGAENSVAYSNNSIAICTNFTISVTTEILPVSMTKTSVDCTMYICGDSTECSNLLLQYGSFCTQLNRALTGIAVEQDKNTQEVFAQVKQIYKTPPIKDFGGFNFSQILPDPSKPSKRSFIEDLLFNKVTLADAGFIKQYGDCLGDIAARDLICAQKFNGLTVLPPLLTDEMIAQYTSALLAGTITSGWTFGAGAALQIPFAMQMAYRFNGIGVTQNVLYENQKLIANQFNSAIGKIQDSLSSTASALGKLQDVVNQNAQALNTLVKQLSSNFGAISSVLNDILSRLDKVEAEVQIDRLITGRLQSLQTYVTQQLIRAAEIRASANLAATKMSECVLGQSKRVDFCGKGYHLMSFPQSAPHGVVFLHVTYVCAQEKNFTTAPAICHDGKAHFPREGVFVSNGTHWFVTQRNFYEPQIITTDNTFVSGNCDVVIGIVNNTVYDPLQPELDSFKEELDKYFKNHTSPDVDLGDISGINASVVNIQKEIDRLNEVAKNLNESLIDLQELGKYEQYIK

SEQ ID NO: 2131 - protein, 1211 aa, Artificial Sequence
  SARS-CoV-2/Portugal/PT0035/2020__EPI_ISL_418020 spike protein (1-1211)(P715C_P1069C)
MFVFLVLLPLVSSQCVNLTTRTQLPPAYTNSFTRGVYYPDKVFRSSVLHSTQDLFLPFFSNVTWFHAIHVSGTNGTKRFDNPVLPFNDGVYFASTEKSNIIRGWIFGTTLDSKTQSLLIVNNATNVVIKVCEFQFCNDPFLGVYYHKNNKSWMESEFRVYSSANNCTFEYVSQPFLMDLEGKQGNFKNLREFVFKNIDGYFKIYSKHTPINLVRDLPQGFSALEPLVDLPIGINITRFQTLLALHRSYLTPGDSSSGWTAGAAAYYVGYLQPRTFLLKYNENGTITDAVDCALDPLSETKCTLKSFTVEKGIYQTSNFRVQPTESIVRFPNITNLCPFGEVFNATRFASVYAWNRKRISNCVADYSVLYNSASFSTFKCYGVSPTKLNDLCFTNVYADSFVIRGDEVRQIAPGQTGKIADYNYKLPDDFTGCVIAWNSNNLDSKVGGNYNYLYRLFRKSNLKPFERDISTEIYQAGSTPCNGVEGFNCYFPLQSYGFQPTNGVGYQPYRVVVLSFELLHAPATVCGPKKSTNLVKNKCVNFNFNGLTGTGVLTESNKKFLPFQQFGRDIADTTDAVRDPQTLEILDITPCSFGGVSVITPGTNTSNQVAVLYQDVNCTEVPVAIHADQLTPTWRVYSTGSNVFQTRAGCLIGAEHVNNSYECDIPIGAGICASYQTQTNSPRRARSVASQSIIAYTMSLGAENSVAYSNNSIAICTNFTISVTTEILPVSMTKTSVDCTMYICGDSTECSNLLLQYGSFCTQLNRALTGIAVEQDKNTQEVFAQVKQIYKTPPIKDFGGFNFSQILPDPSKPSKRSFIEDLLFNKVTLADAGFIKQYGDCLGDISARDLICAQKFNGLTVLPPLLTDEMIAQYTSALLAGTITSGWTFGAGAALQIPFAMQMAYRFNGIGVTQNVLYENQKLIANQFNSAIGKIQDSLSSTASALGKLQDVVNQNAQALNTLVKQLSSNFGAISSVLNDILSRLDKVEAEVQIDRLITGRLQSLQTYVTQQLIRAAEIRASANLAATKMSECVLGQSKRVDFCGKGYHLMSFPQSAPHGVVFLHVTYVCAQEKNFTTAPAICHDGKAHFPREGVFVSNGTHWFVTQRNFYEPQIITTDNTFVSGNCDVVIGIVNNTVYDPLQPELDSFKEELDKYFKNHTSPDVDLGDISGINASVVNIQKEIDRLNEVAKNLNESLIDLQELGKYEQYIK

SEQ ID NO: 2132 - protein, 1211 aa, Artificial Sequence
  SARS-CoV-2/USA/NY-NYUMC7/2020__EPI_ISL_418192 spike protein (1-1211)(P715C_P1069C)
MFVFLVLLPLVSSQCVNLTTRTQLPPAYTNSFTRGVYYPDKVFRSSVLHSTQDLFLPFFSNVTWFHAIHVSGTNGTKRFDNPVLPFNDGVYFASTEKSNIIRGWIFGTTLDSKTQSLLIVNNATNVVIKVCEFQFCNDPFLGVYHHKNNKSWMESEFRVYSSANNCTFEYVSQPFLMDLEGKQGNFKNLREFVFKNIDGYFKIYSKHTPINLVRDLPQGFSALEPLVDLPIGINITRFQTLLALHRSYLTPGDSSSGWTAGAAAYYVGYLQPRTFLLKYNENGTITDAVDCALDPLSETKCTLKSFTVEKGIYQTSNFRVQPTESIVRFPNITNLCPFGEVFNATRFASVYAWNRKRISNCVADYSVLYNSASFSTFKCYGVSPTKLNDLCFTNVYADSFVIRGDEVRQIAPGQTGKIADYNYKLPDDFTGCVIAWNSNNLDSKVGGNYNYLYRLFRKSNLKPFERDISTEIYQAGSTPCNGVEGFNCYFPLQSYGFQPTNGVGYQPYRVVVLSFELLHAPATVCGPKKSTNLVKNKCVNFNFNGLTGTGVLTESNKKFLPFQQFGRDIADTTDAVRDPQTLEILDITPCSFGGVSVITPGTNTSNQVAVLYQGVNCTEVPVAIHADQLTPTWRVYSTGSNVFQTRAGCLIGAEHVNNSYECDIPIGAGICASYQTQTNSPRRARSVASQSIIAYTMSLGAENSVAYSNNSIAICTNFTISVTTEILPVSMTKTSVDCTMYICGDSTECSNLLLQYGSFCTQLNRALTGIAVEQDKNTQEVFAQVKQIYKTPPIKDFGGFNFSQILPDPSKPSKRSFIEDLLFNKVTLADAGFIKQYGDCLGDIAARDLICAQKFNGLTVLPPLLTDEMIAQYTSALLAGTITSGWTFGAGAALQIPFAMQMAYRFNGIGVTQNVLYENQKLIANQFNSAIGKIQDSLSSTASALGKLQDVVNQNAQALNTLVKQLSSNFGAISSVLNDILSRLDKVEAEVQIDRLITGRLQSLQTYVTQQLIRAAEIRASANLAATKMSECVLGQSKRVDFCGKGYHLMSFPQSAPHGVVFLHVTYVCAQEKNFTTAPAICHDGKAHFPREGVFVSNGTHWFVTQRNFYEPQIITTDNTFVSGNCDVVIGIVNNTVYDPLQPELDSFKEELDKYFKNHTSPDVDLGDISGINASVVNIQKEIDRLNEVAKNLNESLIDLQELGKYEQYIK

SEQ ID NO: 2133 - protein, 1211 aa, Artificial Sequence
  SARS-CoV-2/Iceland/189/2020__EPI_ISL_417709 spike protein (1-1211)(P715C_P1069C)
MFVFLVLLPLVSSQCVNLTTRTQLPPAYTNSFTRGVYYPDKVFRSSVLHSTQDLFLPFFSNVTWFHAIHVSGTNGTKRFDNPVLPFNDGVYFASTEKSNIIRGWIFGTTLDSKTQSLLIVNNATNVVIKVCEFQFCNDPFLGVYYHKNNKSWMESEFRVYSSANNCTFEYVSQPFLMDLEGKQGNFKNLREFVFKNIDGYFKIYSKHTPINLVRDLPQGFSALEPLVDLPIGINITRFQTLLALHRSYLTPGDSSSGWTAGAAAYYVGYLQPRTFLLKYNENGTITDAVDCALDPLSETKCTLKSFTVEKGIYQTSNFRVQPTESIVRFPNITNLCPFGEVFNATRFASVYAWNRKRISNCVADYSVLYNSASFSTFKCYGVSPTKLNDLCFTNVYADSFVIRGDEVRQIAPGQTGKIADYNYKLPDDFTGCVIAWNSNNLDSKVGGNYNYLYRLFRKSNLKPFERDISTEIYQAGSTPCNGVEGFNCYFPLQSYGFQPTNGVGYQPYRVVVLSFELLHAPATVCGPKKSTNLVKNKCVNFNFNGLTGTGVLTESNKKFLPFQQFGRDIADTTDAVRDPQTLEILDITPCSFGGVSVITPGTNTSNQVAVLYQGVNCTEVPVAIHADQLTPTWRVYSTGSNVFQTRAGCLIGAEHVNNSYECDIPIGAGICASYQTQTNSPRRARSVASQSIIAYTMSLGAENSVAYSNNSIAICTNFTISVTTEILPVSMTKTSVDCTMYICGDSTECSNLLLQYGSFCTQLNRALTGIAVEQDKNTQEVFAQVKQIYKTPPIKDFGGFNFSQILPDPSKPSKRSFIEDLLFNKVTLADAGFTKQYGDCLGDIAARDLICAQKFNGLTVLPPLLTDEMIAQYTSALLAGTITSGWTFGAGAALQIPFAMQMAYRFNGIGVTQNVLYENQKLIANQFNSAIGKIQDSLSSTASALGKLQDVVNQNAQALNTLVKQLSSNFGAISSVLNDILSRLDKVEAEVQIDRLITGRLQSLQTYVTQQLIRAAEIRASANLAATKMSECVLGQSKRVDFCGKGYHLMSFPQSAPHGVVFLHVTYVCAQEKNFTTAPAICHDGKAHFPREGVFVSNGTHWFVTQRNFYEPQIITTDNTFVSGNCDVVIGIVNNTVYDPLQPELDSFKEELDKYFKNHTSPDVDLGDISGINASVVNIQKEIDRLNEVAKNLNESLIDLQELGKYEQYIK

SEQ ID NO: 2134 - protein, 1211 aa, Artificial Sequence
  SARS-CoV-2/Australia/NSW56/2020__EPI_ISL_417408 spike protein (1-1211)(P715C_P1069C)
MFVFLVLLPLVSSQCVNLTTRTQLPPAYTNSFTRGVYYPDKVFRSSVLHSTQDLFLPFFSNVTWFHAIHVSGTNGTKRFDNPVLPFNDGVYFASTEKSNIIRGWIFGTTLDSKTQSLLIVNNATNVVIKVCEFQFCNDPFLGVYYHKNNKSWMESEFRVYSSANNCTFEYVSQPFLMDLEGKQGNFKNLREFVFKNIDGYFKIYSKHTPINLVRDLPQGFSALEPLVDLPIGINITRFQTLLALHRSYLTPGDSSSGWTAGAAAYYVGYLQPRTFLLKYNENGTITDAVDCALDPLSETKCTLKSFTVEKGIYQTSNFRVQPTESIVRFPNITNLCPFGEVFNATRFASVYAWNRKRISNCVADYSVLYNSASFSTFKCYGVSPTKLNDLCFTNVYADSFVIRGDEVRQIAPGQTGKIADYNYKLPDDFTGCVIAWNSNNLDSKVGGNYNYLYRLFRKSNLKPFERDISTEIYQAGSTPCNGVEGFNCYFPLQSYGFQPTNGVGYQPYRVVVLSFELLHAPATVCGPKKSTNLVKNKCVNFNFNGLTGTGVLTESNKKFLPFQQFGRDIADTTDAVRDPQTLEILDITPCSFGGVSVITPGTNTSNQVAVLYQDVNCTEVPVAIHADQLTPTWRVYSTGSNVFQTRAGCLIGAEHVNNSYECDIPIGAGICASYQTQTNSPRRARSVASQSIIAYTMSLGAENSVAYSNNSIAICTNFTISVTTEILPVSMTKTSVDCTMYICGDSTECSNLLLQYGSFCTQLNRALTGIAVEQDKNTQEVFAQVKQIYKTPPIKDFGGFNFSQILPDSSKPSKRSFIEDLLFNKVTLADAGFIKQYGDCLGDIAARDLICAQKFNGLTVLPPLLTDEMIAQYTSALLAGTITSGWTFGAGAALQIPFAMQMAYRFNGIGVTQNVLYENQKLIANQFNSAIGKIQDSLSSTASALGKLQDVVNQNAQALNTLVKQLSSNFGAISSVLNDILSRLDKVEAEVQIDRLITGRLQSLQTYVTQQLIRAAEIRASANLAATKMSECVLGQSKRVDFCGKGYHLMSFPQSAPHGVVFLHVTYVCAQEKNFTTAPAICHDGKAHFPREGVFVSNGTHWFVTQRNFYEPQIITTDNTFVSGNCDVVIGIVNNTVYDPLQPELDSFKEELDKYFKNHTSPDVDLGDISGINASVVNIQKEIDRLNEVAKNLNESLIDLQELGKYEQYIK

SEQ ID NO: 2135 - protein, 1211 aa, Artificial Sequence
  SARS-CoV-2/Iceland/280/2020__EPI_ISL_417608 spike protein (1-1211)(P715C_P1069C)
MFVFLVLLPLVSSQCVNLTTRTQLPPAYTNSFTRGVYYPDKVFRSSVLHSTQDLFLPFFSNVTWFHAIHVSGTNGTKRFDNPVLPFNDGVYFASTEKSNIIRGWIFGTTLDSKTQSLLIVNNATNVVIKVCEFQFCNDPFLGVYYHKNNKSWMESEFRVYSSANNCTFEYVSQPFLMDLEGKQGNFKNLREFVFKNIDGYFKIYSKHTPINLVRDLPQGFSALEPLVDLPIGINITRFQTLLALHRSYLTPGDSSSGWTAGAAAYYVGYLQPRTFLLKYNENGTITDAVDCALDPLSETKCTLKSFTVEKGIYQTSNFRVQPTESIVRFPNITNLCPFGEVFNATRFASVYAWNRKRISNCVADYSVLYNSASFSTFKCYGVSPTKLNDLCFTNVYADSFVIRGDEVRQIAPGQTGKIADYNYKLPDDFTGCVIAWNSNNLDSKVGGNYNYLYRLFRKSNLKPFERDISTEIYQAGSTPCNGVEGFNCYFPLQSYGFQPTNGVGYQPYRVVVLSFELLHAPATVCGPKKSTNLVKNKCVNFNFNGLTGTGVLTESNKKFLPFQQFGRDIADTTDAVRDPQTLEILDITPCSFGGVSVITPGTNTSNQVAVLYQGVNCTEVPVAIHADQLTPTWRVYSTGSNVFQTRAGCLIGAEHVNNSYECDIPIGAGICASYHTQTNSPRRARSVASQSIIAYTMSLGAENSVAYSNNSIAICTNFTISVTTEILPVSMTKTSVDCTMYICGDSTECSNLLLQYGSFCTQLNRALTGIAVEQDKNTQEVFAQVKQIYKTPPIKDFGGFNFSQILPDPSKPSKRSFIEDLLFNKVTLADAGFIKQYGDCLGDIAARDLICAQKFNGLTVLPPLLTDEMIAQYTSALLAGTITSGWTFGAGAALQIPFAMQMAYRFNGIGVTQNVLYENQKLIANQFNSAIGKIQDSLSSTASALGKLQDVVNQNAQALNTLVKQLSSNFGAISSVLNDILSRLDKVEAEVQIDRLITGRLQSLQTYVTQQLIRAAEIRASANLAATKMSECVLGQSKRVDFCGKGYHLMSFPQSAPHGVVFLHVTYVCAQEKNFTTAPAICHDGKAHFPREGVFVSNGTHWFVTQRNFYEPQIITTDNTFVSGNCDVVIGIVNNTVYDPLQPELDSFKEELDKYFKNHTSPDVDLGDISGINASVVNIQKEIDRLNEVAKNLNESLIDLQELGKYEQYIK

SEQ ID NO: 2136 - protein, 1211 aa, Artificial Sequence; identical to SEQ ID NO: 2091
  SARS-CoV-2/Iceland/247/2020__EPI_ISL_417575 spike protein (1-1211)(P715C_P1069C)

SEQ ID NO: 2137 - protein, 1211 aa, Artificial Sequence
  SARS-CoV-2/Iceland/238/2020__EPI_ISL_417566 spike protein (1-1211)(P715C_P1069C)
MFVFLVLLPLVSSQCVNLTTRTQLPPAYTNSFTRGVYYPDKVFRSSVLHSTQDLFLPFFSNVTWFHAIHVSGTNGTKRFDNPVLPFNDGVYFASTEKSNIIRGWIFGTTLDSKTQSLLIVNNATNVVIKVCEFQFCNDPFLGVYYHKNNKSWMESEFRVYSSANNCTFEYVSQPFLMDLEGKQGNFKNLREFVFKNIDGYFKIYSKHTPINLVRDLPQGFSALEPLVDLPIGINITRFQTLLALHRSYLTPGDSSSGWTAGAAAYYVGYLQPRTFLLKYNENGTITDAVDCALDPLSETKCTLKSFTVEKGIYQTSNFRVQPTESIVRFPNITNLCPFGEVFNATRFASVYAWNRKRISNCVADYSVLYNSASFSTFKCYGVSPTKLNDLCFTNVYADSFVIRGDEVRQIAPGQTGKIADYNYKLPDDFTGCVIAWNSNNLDSKVGGNYNYLYRLFRKSNLKPFERDISTEIYQAGSTPCNGVEGFNCYFPLQSYGFQPTNGVGYQPYRVVVLSFELLHAPATVCGPKKSTNLVKNKCVNFNFNGLTGTGVLTESNKKFLPFQQFGRDIADTTDAVRDPQTLEILDITPCSFGGVSVITPGTNTSNQVAVLYQGVNCTEVPVAIHADQLTPTWRVYSTGSNVFQTRAGCLIGAEHVNNSYECDIPIGAGICASYQTQTNSPRRARSVASQSIIAYTMSLGAENSVAYSNNSIAICTNFTISVTTEILPVSMTKTSVDCTMYICGDSTECSNLLLQYGSFCTQLNRALTGIAVEQDKNTQEVFAQVKQIYKTPPIKDFGGFNFSQILPDPSKPSKRSFIEDLLFNKVTLADVGFIKQYGDCLGDIAARDLICAQKFNGLTVLPPLLTDEMIAQYTSALLAGTITSGWTFGAGAALQIPFAMQMAYRFNGIGVTQNVLYENQKLIANQFNSAIGKIQDSLSSTASALGKLQDVVNQNAQALNTLVKQLSSNFGAISSVLNDILSRLDKVEAEVQIDRLITGRLQSLQTYVTQQLIRAAEIRASANLAATKMSECVLGQSKRVDFCGKGYHLMSFPQSAPHGVVFLHVTYVCAQEKNFTTAPAICHDGKAHFPREGVFVSNGTHWFVTQRNFYEPQIITTDNTFVSGNCDVVIGIVNNTVYDPLQPELDSFKEELDKYFKNHTSPDVDLGDISGINASVVNIQKEIDRLNEVAKNLNESLIDLQELGKYEQYIK

SEQ ID NO: 2138 - protein, 1211 aa, Artificial Sequence
  SARS-CoV-2/Greece/16/2020__EPI_ISL_418265 spike protein (1-1211)(P715C_P1069C)
MFVFLVLLPLVSSQCVNLTTRTQLPPAYTNSFTRGVYYPDKVFRSSVLHSTQDLFLPFFSNVTWFHAIHVSGTNGTKRFDNPVLPFNDGVYFASTEKSNIIRGWIFGTTLDSKTQSLLIVNNATNVVIKVCEFQFCNDPFLGVYYHKNNKSWMESEFRVYSSANNCTFEYVSQPFLMDLEGKQGNFKNLREFVFKNVDGYFKIYSKHTPINLVRDLPQGFSALEPLVDLPIGINITRFQTLLALHRSYLTPGDSSSGWTAGAAAYYVGYLQPRTFLLKYNENGTITDAVDCALDPLSETKCTLKSFTVEKGIYQTSNFRVQPTESIVRFPNITNLCPFGEVFNATRFASVYAWNRKRISNCVADYSVLYNSASFSTFKCYGVSPTKLNDLCFTNVYADSFVIRGDEVRQIAPGQTGKIADYNYKLPDDFTGCVIAWNSNNLDSKVGGNYNYLYRLFRKSNLKPFERDISTEIYQAGSTPCNGVEGFNCYFPLQSYGFQPTNGVGYQPYRVVVLSFELLHAPATVCGPKKSTNLVKNKCVNFNFNGLTGTGVLTESNKKFLPFQQFGRDIADTTDAVRDPQTLEILDITPCSFGGVSVITPGTNTSNQVAVLYQDVNCTEVPVAIHADQLTPTWRVYSTGSNVFQTRAGCLIGAEHVNNSYECDIPIGAGICASYQTQTNSPRRARSVASQSIIAYTMSLGAENSVAYSNNSIAICTNFTISVTTEILPVSMTKTSVDCTMYICGDSTECSNLLLQYGSFCTQLNRALTGIAVEQDKNTQEVFAQVKQIYKTPPIKDFGGFNFSQILPDPSKPSKRSFIEDLLFNKVTLADAGFIKQYGDCLGDIAARDLICAQKFNGLTVLPPLLTDEMIAQYTSALLAGTITSGWTFGAGAALQIPFAMQMAYRFNGIGVTQNVLYENQKLIANQFNSAIGKIQDSLSSTASALGKLQDVVNQNAQALNTLVKQLSSNFGAISSVLNDILSRLDKVEAEVQIDRLITGRLQSLQTYVTQQLIRAAEIRASANLAATKMSECVLGQSKRVDFCGKGYHLMSFPQSAPHGVVFLHVTYVCAQEKNFTTAPAICHDGKAHFPREGVFVSNGTHWFVTQRNFYEPQIITTDNTFVSGNCDVVIGIVNNTVYDPLQPELDSFKEELDKYFKNHTSPDVDLGDISGINASVVNIQKEIDRLNEVAKNLNESLIDLQELGKYEQYIK

SEQ ID NO: 2139 - protein, 1211 aa, Artificial Sequence
  SARS-CoV-2/Iceland/319/2020__EPI_ISL_417648 spike protein (1-1211)(P715C_P1069C)
MFVFLVLLPLVSSQCVNLTTRTQLPPAYTNSFTRGVYYPDKVFRSSVLHSTQDLFLPFFSNVTWFHAIHVSGTNGTKRFDNPVLPFNDGVYFASTEKSNIIRGWIFGTTLDSKTQSLLIVNNATNVVIKVCEFQFCNDPFLGVYYHKNNKSWMESEFRVYSSANNCTFEYVSQPFLIDLEGKQGNFKNLREFVFKNIDGYFKIYSKHTPINLVRDLPQGFSALEPLVDLPIGINITRFQTLLALHRSYLTPGDSSSGWTAGAAAYYVGYLQPRTFLLKYNENGTITDAVDCALDPLSETKCTLKSFTVEKGIYQTSNFRVQPTESIVRFPNITNLCPFGEVFNATRFASVYAWNRKRISNCVADYSVLYNSASFSTFKCYGVSPTKLNDLCFTNVYADSFVIRGDEVRQIAPGQTGKIADYNYKLPDDFTGCVIAWNSNNLDSKVGGNYNYLYRLFRKSNLKPFERDISTEIYQAGSTPCNGVEGFNCYFPLQSYGFQPTNGVGYQPYRVVVLSFELLHAPATVCGPKKSTNLVKNKCVNFNFNGLTGTGVLTESNKKFLPFQQFGRDIADTTDAVRDPQTLEILDITPCSFGGVSVITPGTNTSNQVAVLYQGVNCTEVPVAIHADQLTPTWRVYSTGSNVFQTRAGCLIGAEHVNNSYECDIPIGAGICASYQTQTNSPRRARSVASQSIIAYTMSLGAENSVAYSNNSIAICTNFTISVTTEILPVSMTKTSVDCTMYICGDSTECSNLLLQYGSFCTQLNRALTGIAVEQDKNTQEVFAQVKQIYKTPPIKDFGGFNFSQILPDPSKPSKRSFIEDLLFNKVTLADAGFIKQYGDCLGDIAARDLICAQKFNGLTVLPPLLTDEMIAQYTSALLAGTITSGWTFGAGAALQIPFAMQMAYRFNGIGVTQNVLYENQKLIANQFNSAIGKIQDSLSSTASALGKLQDVVNQNAQALNTLVKQLSSNFGAISSVLNDILSRLDKVEAEVQIDRLITGRLQSLQTYVTQQLIRAAEIRASANLAATKMSECVLGQSKRVDFCGKGYHLMSFPQSAPHGVVFLHVTYVCAQEKNFTTAPAICHDGKAHFPREGVFVSNGTHWFVTQRNFYEPQIITTDNTFVSGNCDVVIGIVNNTVYDPLQPELDSFKEELDKYFKNHTSPDVDLGDISGINASVVNIQKEIDRLNEVAKNLNESLIDLQELGKYEQYIK

SEQ ID NO: 2140 - protein, 1211 aa, Artificial Sequence
  SARS-CoV-2/Congo/94/2020__EPI_ISL_417947 spike protein (1-1211)(P715C_P1069C)
MFVFLVLLPLVSSQCVNLTTRTQLPPAYTNSFTRGVYYPDKVFRSSVLHSTQDLFLPFFSNVTWFHAIHVSGTNGTKRFDNPVLPFNDGVYFASTEKSNIIRGWIFGTTLDSKTQSLLIVNNATNVVIKVCEFQFCNDPFLGVYYHKNNKSWMESEFRVYSSANNCTFEYVSQPFLMDLEGKQGNFKNLREFVFKNIDGYFKIYSKHTPINLVRDLPQGFSALEPLVDLPIGINITRFQTLLALHRSYLTPGDSSSGWTAGAAAYYVGYLQPRTFLLKYNENGTITDAVDCALDPLSETKCTLKSFTVEKGIYQTSNFRVQPTESIVRFPNITNLCPFGEVFNATRFASVYAWNRKRISNCVADYSVLYNSASFSTFKCYGVSPTKLNDLCFTNVYADSFVIRGDEVRQIAPGQTGKIADYNYKLPDDFTGCVIAWNSNNLDSKVGGNYNYLYRLFRKSNLKPFERDISTEIYQAGSTPCNGVEGFNCYFPLQSYGFQPTNGVGYQPYRVVVLSFELLHAPATVCGPKKSTNLVKNKCVNFNFNGLTGTGVLTESNKKFLPFQQFGRDIADTTDAVRDPQTLEILDITPCSFGGVSVITPGTNTSNQVAVLYQGVNCTEVPVAIHADQLTPTWRVYSTGSNVFQTRAGCLIGAEHVNNSYECDIPIGAGICASYQTQTNSPRRARSVASQSIIAYTMSLGAENSVAYSNNSIAICTNFTISVTTEILPVSMTKTSVDCTMYICGDSTECSNLLLQYGSFCTQLNRALTGIAVEQDKNTQEVFAQVKQIYKTPPIKDFGGFNFSQILPDPSKPSKRSFIEDILFNKVTLADAGFIKQYGDCLGDIAARDLICAQKFNGLTVLPPLLTDEMIAQYTSALLAGTITSGWTFGAGAALQIPFAMQMAYRFNGIGVTQNVLYENQKLIANQFNSAIGKIQDSLSSTASALGKLQDVVNQNAQALNTLVKQLSSNFGAISSVLNDILSRLDKVEAEVQIDRLITGRLQSLQTYVTQQLIRAAEIRASANLAATKMSECVLGQSKRVDFCGKGYHLMSFPQSAPHGVVFLHVTYVCAQEKNFTTAPAICHDGKAHFPREGVFVSNGTHWFVTQRNFYEPQIITTDNTFVSGNCDVVIGIVNNTVYDPLQPELDSFKEELDKYFKNHTSPDVDLGDISGINASVVNIQKEIDRLNEVAKNLNESLIDLQELGKYEQYIK

SEQ ID NO: 2141 - protein, 1211 aa, Artificial Sequence
  SARS-CoV-2/Congo/158/2020__EPI_ISL_417950 spike protein (1-1211)(P715C_P1069C)
MFVFLVLLPLVSSQCVNLTTRTQLPPAYTNSFTRGVYYPDKVFRSSVLHSTQDLFLPFFSNVTWFHAIHVSGTNGTKRFDNPVLPFNDGVYFASTEKSNIIRGWIFGTTLDSKTQSLLIVNNATNVVIKVCEFQFCNDPFLGVYYHKNNKSWMESEFRVYSSANNCTFEYVSQPFLMDLEGKQGNFKNLREFVFKNIDGYFKIYSKHTPINLVRDLPQGFSALEPLVDLPIGINITRFQTLLALHRSYLTPGDSSSGWTAGAAAYYVGYLQPRTFLLKYNENGTITDAVDCALDPLSETKCTLKSFTVEKGIYQTSNFRVQPTESIVRFPNITNLCPFGEVFNATRFASVYAWNRKRISNCVADYSVLYNSASFSTFKCYGVSPTKLNDLCFTNVYADSFVIRGDEVRQIAPGQTGKIADYNYKLPDDFTGCVIAWNSNNLDSKVGGNYNYLYRLFRKSNLKPFERDISTEIYQAGSTPCNGVEGFNCYFPLQSYGFQPTNGVGYQPYRVVVLSFELLHAPATVCGPKKSTNLVKNKCVNFNFNGLTGTGVLTESNKKFLPFQQFGRDIADTTDAVRDPQTLEILDITPCSFGGVSVITPGTNTSNQVAVLYQDVNCTEVPVAIHADQLTPTWRVYSTGSNVFQTRAGCLIGAEHVNNSYECDIPIGAGICASYQTQTNSPRRARSVASQSIIAYTMSLGAENSVAYSNNSIAICTNFTISVTTEILPVSMTKTSVDCTMYICGDSTECSNLLLQYGSFCTQLNRALTGIAVEQDKNTQEVFAQVKQIYKTPPIKDFGGFNFSQILPDPSKPSKRSFIEDLLFNKVTLADAGFIKQYGDCLGDIAARDLICAQKFNGLTVLPPLLTDEMIAQYTSALLAGTITSGWTFGAGAALQIPFAMQMAYRFNGIGVTQNVLYENQKLIANQFNSAIGKIQDSLSSTASALGKLQDVVNQNAQALNTLVKQLSSNFGAISSVLNDILSRLDKVEAEVQIDRLITGRLQSLQTYVTQQLIRAAEIRASANLAATKMSECVLGQSKRVDFCGKGYHLMSFPQSAPHGVVFLHVTYVCAQEKNFTTAPAICHDGKAHFPREGVFVSNGTHWFVTQRNFYEPQIITTDNTFLSGNCDVVIGIVNNTVYDPLQPELDSFKEELDKYFKNHTSPDVDLGDISGINASVVNIQKEIDRLNEVAKNLNESLIDLQELGKYEQYIK

SEQ ID NO: 2142 - protein, 1211 aa, Artificial Sequence
  SARS-CoV-2/USA/UT-00034/2020__EPI_ISL_417977 spike protein (1-1211)(P715C_P1069C)
MFVFLVLLPLVSSQCVNLTTRTQLPPAYTNSFTRGVYYPDKVFRSSVLHSTQDLFLPFFSNVTWFHAIHVSGTNGTKRFDNPVLPFNDGVYFASTEKSNIIRGWIFGTTLDSKTQSLLIVNNATNVVIKVCEFQFCNDPFLGVYYYKNNKSWMESEFRVYSSANNCTFEYVSQPFLMDLEGKQGNFKNLREFVFKNIDGYFKIYSKHTPINLVRDLPQGFSALEPLVDLPIGINITRFQTLLALHRSYLTPGDSSSGWTAGAAAYYVGYLQPRTFLLKYNENGTITDAVDCALDPLSETKCTLKSFTVEKGIYQTSNFRVQPTESIVRFPNITNLCPFGEVFNATRFASVYAWNRKRISNCVADYSVLYNSASFSTFKCYGVSPTKLNDLCFTNVYADSFVIRGDEVRQIAPGQTGKIADYNYKLPDDFTGCVIAWNSNNLDSKVGGNYNYLYRLFRKSNLKPFERDISTEIYQAGSTPCNGVEGFNCYFPLQSYGFQPTNGVGYQPYRVVVLSFELLHAPATVCGPKKSTNLVKNKCVNFNFNGLTGTGVLTESNKKFLPFQQFGRDIADTTDAVRDPQTLEILDITPCSFGGVSVITPGTNTSNQVAVLYQGVNCTEVPVAIHADQLTPTWRVYSTGSNVFQTRAGCLIGAEHVNNSYECDIPIGAGICASYQTQTNSPRRARSVASQSIIAYTMSLGAENSVAYSNNSIAICTNFTISVTTEILPVSMTKTSVDCTMYICGDSTECSNLLLQYGSFCTQLNRALTGIAVEQDKNTQEVFAQVKQIYKTPPIKDFGGFNFSQILPDPSKPSKRSFIEDLLFNKVTLADAGFIKQYGDCLGDIAARDLICAQKFNGLTVLPPLLTDEMIAQYTSALLAGTITSGWTFGAGAALQIPFAMQMAYRFNGIGVTQNVLYENQKLIANQFNSAIGKIQDSLSSTASALGKLQDVVNQNAQALNTLVKQLSSNFGAISSVLNDILSRLDKVEAEVQIDRLITGRLQSLQTYVTQQLIRAAEIRASANLAATKMSECVLGQSKRVDFCGKGYHLMSFPQSAPHGVVFLHVTYVCAQEKNFTTAPAICHDGKAHFPREGVFVSNGTHWFVTQRNFYEPQIITTDNTFVSGNCDVVIGIVNNTVYDPLQPELDSFKEELDKYFKNHTSPDVDLGDISGINASVVNIQKEIDRLNEVAKNLNESLIDLQELGKYEQYIK

SEQ ID NO: 2143 - protein, 1211 aa, Artificial Sequence
  SARS-CoV-2/USA/UT-00033/2020__EPI_ISL_417976 spike protein (1-1211)(P715C_P1069C)
MFVFLVLLPLVSSQCVNLTTRTQLPPAYTNSFTRGVYYPDKVFRSSVLHSTQDLFLPFFSNVTWFHAIHVSGTNGTKRFDNPVLPFNDGVYFASTEKSNIIRGWIFGTTLDSKTQSLLIVNNATNVVIKVCEFQFCNDPFLGVYYHKNNKSWMESEFRVYSSANNCTFEYVSQPFLMDLEGKQGNFKNLREFVFKNIDGYFKIYSKHTPINLVRDLPQGFSALEPLVDLPIGINITRFQTLLALHRSYLTPGDSSSGLTAGAAAYYVGYLQPRTFLLKYNENGTITDAVDCALDPLSETKCTLKSFTVEKGIYQTSNFRVQPTESIVRFPNITNLCPFGEVFNATRFASVYAWNRKRISNCVADYSVLYNSASFSTFKCYGVSPTKLNDLCFTNVYADSFVIRGDEVRQIAPGQTGKIADYNYKLPDDFTGCVIAWNSNNLDSKVGGNYNYLYRLFRKSNLKPFERDISTEIYQAGSTPCNGVEGFNCYFPLQSYGFQPTNGVGYQPYRVVVLSFELLHAPATVCGPKKSTNLVKNKCVNFNFNGLTGTGVLTESNKKFLPFQQFGRDIADTTDAVRDPQTLEILDITPCSFGGVSVITPGTNTSNQVAVLYQGVNCTEVPVAIHADQLTPTWRVYSTGSNVFQTRAGCLIGAEHVNNSYECDIPIGAGICASYQTQTNSPRRARSVASQSIIAYTMSLGAENSVAYSNNSIAICTNFTISVTTEILPVSMTKTSVDCTMYICGDSTECSNLLLQYGSFCTQLNRALTGIAVEQDKNTQEVFAQVKQIYKTPPIKDFGGFNFSQILPDPSKPSKRSFIEDLLFNKVTLADAGFIKQYGDCLGDIAARDLICAQKFNGLTVLPPLLTDEMIAQYTSALLAGTITSGWTFGAGAALQIPFAMQMAYRFNGIGVTQNVLYENQKLIANQFNSAIGKIQDSLSSTASALGKLQDVVNQNAQALNTLVKQLSSNFGAISSVLNDILSRLDKVEAEVQIDRLITGRLQSLQTYVTQQLIRAAEIRASANLAATKMSECVLGQSKRVDFCGKGYHLMSFPQSAPHGVVFLHVTYVCAQEKNFTTAPAICHDGKAHFPREGVFVSNGTHWFVTQRNFYEPQIITTDNTFVSGNCDVVIGIVNNTVYDPLQPELDSFKEELDKYFKNHTSPDVDLGDISGINASVVNIQKEIDRLNEVAKNLNESLIDLQELGKYEQYIK

SEQ ID NO: 2144 - protein, 1211 aa, Artificial Sequence
  SARS-CoV-2/USA/WI-13/2020__EPI_ISL_417516 spike protein (1-1211)(P715C_P1069C)
MFVFLVLLPLVSSQCVNLTTRTQLPPAYTNSFTRGVYYPDKVFRSSVLHSTQDLFLPFFSNVTWFHAIHVSGTNGTKRFDNPVLPFNDGVYFASTEKSNIIRGWIFGTTLDSKTQSLLIVNNATNVVIKVCEFQFCNDPFLGVYYHKNNKSWMESEFRVYSSANNCTFEYVSQPFLMDLEGKQGNFKNLREFVFKNIDGYFKIYSKHTPINLVRDLPQGFSALEPLVDLPIGINITRFQTLLALHRSYLTPGDSSSGWTAGAAAYYVGYLQPRTFLLKYNENGTITDAVDCALDPLSETKCTLKSFTVEKGIYQTSNFRVLPTESIVRFPNITNLCPFGEVFNATRFASVYAWNRKRISNCVADYSVLYNSASFSTFKCYGVSPTKLNDLCFTNVYADSFVIRGDEVRQIAPGQTGKIADYNYKLPDDFTGCVIAWNSNNLDSKVGGNYNYLYRLFRKSNLKPFERDISTEIYQAGSTPCNGVEGFNCYFPLQSYGFQPTNGVGYQPYRVVVLSFELLHAPATVCGPKKSTNLVKNKCVNFNFNGLTGTGVLTESNKKFLPFQQFGRDIADTTDAVRDPQTLEILDITPCSFGGVSVITPGTNTSNQVAVLYQGVNCTEVPVAIHADQLTPTWRVYSTGSNVFQTRAGCLIGAEHVNNSYECDIPIGAGICASYQTQTNSPRRARSVASQSIIAYTMSLGAENSVAYSNNSIAICTNFTISVTTEILPVSMTKTSVDCTMYICGDSTECSNLLLQYGSFCTQLNRALTGIAVEQDKNTQEVFAQVKQIYKTPPIKDFGGFNFSQILPDPSKPSKRSFIEDLLFNKVTLADAGFIKQYGDCLGDIAARDLICAQKFNGLTVLPPLLTDEMIAQYTSALLAGTITSGWTFGAGAALQIPFAMQMAYRFNGIGVTQNVLYENQKLIANQFNSAIGKIQDSLSSTASALGKLQDVVNQNAQALNTLVKQLSSNFGAISSVLNDILSRLDKVEAEVQIDRLITGRLQSLQTYVTQQLIRAAEIRASANLAATKMSECVLGQSKRVDFCGKGYHLMSFPQSAPHGVVFLHVTYVCAQEKNFTTAPAICHDGKAHFPREGVFVSNGTHWFVTQRNFYEPQIITTDNTFVSGNCDVVIGIVNNTVYDPLQPELDSFKEELDKYFKNHTSPDVDLGDISGINASVVNIQKEIDRLNEVAKNLNESLIDLQELGKYEQYIK

SEQ ID NO: 2145 - protein, 1210 aa, Artificial Sequence
  SARS-CoV-2/India/1-27/2020__EPI_ISL_413522 spike protein (1-1210)(P714C_P1068C)
MFVFLVLLPLVSSQCVNLTTRTQLPPAYTNSFTRGVYYPDKVFRSSVLHSTQDLFLPFFSNVTWFHAIHVSGTNGTKRFDNPVLPFNDGVYFASTEKSNIIRGWIFGTTLDSKTQSLLIVNNATNVVIKVCEFQFCNDPFLGVYHKNNKSWMESEFRVYSSANNCTFEYVSQPFLMDLEGKQGNFKNLREFVFKNIDGYFKIYSKHTPINLVRDLPQGFSALEPLVDLPIGINITRFQTLLALHRSYLTPGDSSSGWTAGAAAYYVGYLQPRTFLLKYNENGTITDAVDCALDPLSETKCTLKSFTVEKGIYQTSNFRVQPTESIVRFPNITNLCPFGEVFNATRFASVYAWNRKRISNCVADYSVLYNSASFSTFKCYGVSPTKLNDLCFTNVYADSFVIRGDEVIQIAPGQTGKIADYNYKLPDDFTGCVIAWNSNNLDSKVGGNYNYLYRLFRKSNLKPFERDISTEIYQAGSTPCNGVEGFNCYFPLQSYGFQPTNGVGYQPYRVVVLSFELLHAPATVCGPKKSTNLVKNKCVNFNFNGLTGTGVLTESNKKFLPFQQFGRDIADTTDAVRDPQTLEILDITPCSFGGVSVITPGTNTSNQVAVLYQDVNCTEVPVAIHADQLTPTWRVYSTGSNVFQTRAGCLIGAEHVNNSYECDIPIGAGICASYQTQTNSPRRARSVASQSIIAYTMSLGAENSVAYSNNSIAICTNFTISVTTEILPVSMTKTSVDCTMYICGDSTECSNLLLQYGSFCTQLNRALTGIAVEQDKNTQEVFAQVKQIYKTPPIKDFGGFNFSQILPDPSKPSKRSFIEDLLFNKVTLADAGFIKQYGDCLGDIAARDLICAQKFNGLTVLPPLLTDEMIAQYTSALLAGTITSGWTFGAGAALQIPFAMQMAYRFNGIGVTQNVLYENQKLIANQFNSAIGKIQDSLSSTASALGKLQDVVNQNAQALNTLVKQLSSNFGAISSVLNDILSRLDKVEAEVQIDRLITGRLQSLQTYVTQQLIRAAEIRASANLAATKMSECVLGQSKRVDFCGKGYHLMSFPQSAPHGVVFLHVTYVCAQEKNFTTAPAICHDGKAHFPREGVFVSNGTHWFVTQRNFYEPQIITTDNTFVSGNCDVVIGIVNNTVYDPLQPELDSFKEELDKYFKNHTSPDVDLGDISGINASVVNIQKEIDRLNEVAKNLNESLIDLQELGKYEQYIK

SEQ ID NO: 2146 - protein, 1205 aa, Artificial Sequence
  SARS-CoV-2/pangolin/Guangxi/P4L/2017__EPI_ISL_410538 spike protein (1-1205)(P709C_P1063C)
MFVFLFVLPLVSSQCVNLTTRTGIPPGYTNSSTRGVYYPDKVFRSSILHLTQDLFLPFFSNVTWFNTINYQGGFKKFDNPVLPFNDGVYFASTEKSNIIRGWIFGTTLDARTQSLLIVNNATNVVIKVCEFQFCTDPFLGVYYHNNNKTWVENEFRVYSSANNCTFEYISQPFLMDLEGKQGNFKNLREFVFKNVDGYFKIYSKHTPIDLVRDLPRGFAALEPLVDLPIGINITRFQTLLALHRSYLTPGNLESGWTTGAAAYYVGYLQQRTFLLSYNQNGTITDAVDCSLDPLSETKCTLKSLTVEKGIYQTSNFRVQPTISIVRFPNITNLCPFGEVFNASKFASVYAWNRKRISNCVADYSVLYNSTSFSTFKCYGVSPTKLNDLCFTNVYADSFVVKGDEVRQIAPGQTGVIADYNYKLPDDFTGCVIAWNSVKQDALTGGNYGYLYRLFRKSKLKPFERDISTEIYQAGSTPCNGQVGLNCYYPLERYGFHPTTGVNYQPFRVVVLSFELLNGPATVCGPKLSTTLVKDKCVNFNFNGLTGTGVLTTSKKQFLPFQQFGRDISDTTDAVRDPQTLEILDITPCSFGGVSVITPGTNTSNQVAVLYQDVNCTEVPMAIHAEQLTPAWRVYSAGANVFQTRAGCLVGAEHVNNSYECDIPVGAGICASYHSMSSLRSVNQRSIIAYTMSLGAENSVAYSNNSIAICTNFTISVTTEILPVSMTKTSVDCTMYICGDSIECSNLLLQYGSFCTQLNRALTGIAVEQDKNTQEVFAQVKQIYKTPPIKDFGGFNFSQILPDPSKPSKRSFIEDLLFNKVTLADAGFIKQYGDCLGDIAARDLICAQKFNGLTVLPPLLTDEMIAQYTSALLAGTITSGWTFGAGAALQIPFAMQMAYRFNGIGVTQNVLYENQKLIANQFNSAIGKIQDSLSSTASALGKLQDVVNQNAQALNTLVKQLSSNFGAISSVLNDILSRLDKVEAEVQIDRLITGRLQSLQTYVTQQLIRAAEIRASANLAATKMSECVLGQSKRVDFCGKGYHLMSFPQSAPHGVVFLHVTYVCAQEKNFTTAPAICHEGKAHFPREGVFVSNGTHWFITQRNFYEPQIITTDNTFVSGSCDVVIGIVNNTVYDPLQPELDSFKEELDKYFKNHTSPDVDLGDISGINASVVNIQKEIDRLNEVAKNLNESPIDLQELGKYEQYIK

SEQ ID NO: 2147 - protein, 1205 aa, Artificial Sequence
  SARS-CoV-2/pangolin/Guangxi/P5L/2017__EPI_ISL_410540 spike protein (1-1205)(P709C_P1063C)
MFVFLFVLPLVSSQCVNLTTRTGIPPGYTNSSTRGVYYPDKVFRSSILHLTQDLFLPFFSNVTWFNTINYQGGFKKFDNPVLPFNDGVYFASTEKSNIIRGWIFGTTLDARTQSLLIVNNATNVVIKVCEFQFCTDPFLGVYYHNNNKTWVENEFRVYSSANNCTFEYISQPFLMDLEGKQGNFKNLREFVFKNVDGYFKIYSKHTPIDLVRDLPRGFAALEPLVDLPIGINITRFQTLLALHRSYLTPGKLESGWTTGAAAYYVGYLQQRTFLLSYNQNGTITDAVDCSLDPLSETKCTLKSLTVEKGIYQTSNFRVQPTISIVRFPNITNLCPFGEVFNASKFASVYAWNRKRISNCVADYSVLYNSTSFSTFKCYGVSPTKLNDLCFTNVYADSFVVKGDEVRQIAPGQTGVIADYNYKLPDDFTGCVIAWNSVKQDALTGGNYGYLYRLFRKSKLKPFERDISTEIYQAGSTPCNGQVGLNCYYPLERYGFHPTTGVNYQPFRVVVLSFELLNGPATVCGPKLSTTLVKDKCVNFNFNGLTGTGVLTTSKKQFLPFQQFGRDISDTTDAVRDPQTLEILDITPCSFGGVSVITPGTNTSNQVAVLYQDVNCTEVPMAIHAEQLTPAWRVYSAGANVFQTRAGCLVGAEHVNNSYECDIPVGAGICASYHSMSSFRSVNQRSIIAYTMSLGAENSVAYSNNSIAICTNFTISVTTEILPVSMTKTSVDCTMYICGDSIECSNLLLQYGSFCTQLNRALTGIAVEQDKNTQEVFAQVKQIYKTPPIKDFGGFNFSQILPDPSKPSKRSFIEDLLFNKVTLADAGFIKQYGDCLGDIAARDLICAQKFNGLTVLPPLLTDEMIAQYTSALLAGTITSGWTFGAGAALQIPFAMQMAYRFNGIGVTQNVLYENQKLIANQFNSAIGKIQDSLSSTASALGKLQDVVNQNAQALNTLVKQLSSNFGAISSVLNDILSRLDKVEAEVQIDRLITGRLQSLQTYVTQQLIRAAEIRASANLAATKMSECVLGQSKRVDFCGKGYHLMSFPQSAPHGVVFLHVTYVCAQEKNFTTAPAICHEGKAHFPREGVFVSNGTHWFITQRNFYEPQIITTDNTFVSGSCDVVIGIVNNTVYDPLQPELDSFKEELDKYFKNHTSPDVDLGDISGINASVVNIQKEIDRLNEVAKNLNESLIDLQELGKYEQYIK

SEQ ID NO: 2148 - protein, 1205 aa, Artificial Sequence
  SARS-CoV-2/pangolin/Guangxi/P5E/2017__EPI_ISL_410541 spike protein (1-1205)(P709C_P1063C)
MFVFLFVLPLVSSQCVNLTTRTGIPPGYTNSSTRGVYYPDKVFRSSILHLTQDLFLPFFSNVTWFNTITYQGGSKKFDNPVLPFNDGVYFASTEKSNIIRGWIFGTTLDARTQSLLIVNNATNVVIKVCEFQFCTDPFLGVYYHNNNKTWVENEFRVYSSANNCTFEYISQPFLMDLEGKQGNFKNLREFVFKNVDGYFKIYSKHTPIDLVRDLPRGFAALEPLVDLPIGINITRFQTLLALHRSYLTPGKLESGWTTGAAAYYVGYLQQRTFLLSYNQNGTITDAVDCSLDPLSETKCTLKSLTVEKGIYQTSNFRVQPTISIVRFPNITNLCPFGEVFNASKFASVYAWNRKRISNCVADYSVLYNSTSFSTFKCYGVSPTKLNDLCFTNVYADSFVVKGDEVRQIAPGQTGVIADYNYKLPDDFTGCVIAWNSVKQDALTGDNYGYLYRLFRKSKLKPFERDISTEIYQAGSTPCNGQVGLNCYYPLERYGFHPTTGVNYQPFRVVVLSFELLNGPATVCGPKLSTTLVKDKCVNFNFNGLTGTGVLTTSKKQFLPFQQFGRDISDTTDAVRDPQTLEILDITPCSFGGVSVITPGTNTSNQVAVLYQDVNCTEVPMAIHAEQLTPAWRVYSAGANVFQTRAGCLVGAEHVNNSYECDIPVGAGICASYHSMSSFRSVNQRSIIAYTMSLGAENSVAYSNNSIAICTNFTISVTTEILPVSMTKTSVDCTMYICGDSIECSNLLLQYGSFCTQLNRALTGIAVEQDKNTQEVFAQVKQIYKTPPIKDFGGFNFSQILPDPSKPSKRSFIEDLLFNKVTLADAGFIKQYGDCLGDIAARDLICAQKFNGLTVLPPLLTDEMIAQYTSALLAGTITSGWTFGAGAALQIPFAMQMAYRFNGIGVTQNVLYENQKLIANQFNSAIGKIQDSLSSTASALGKLQDVVNQNAQALNTLVKQLSSNFGAISSVLNDILSRLDKVEAEVQIDRLITGRLQSLQTYVTQQLIRAAEIRASANLAATKMSECVLGQSKRVDFCGKGYHLMSFPQSAPHGVVFLHVTYVCAQEKNFTTAPAICHEGKAHFPREGVFVSNGTHWFITQRNFYEPQIITTDNTFVSGSCDVVIGIVNNTVYDPLQPELDSFKEELDKYFKNHTSPDVDLGDISGINASVVNIQKEIDRLNEVAKNLNESLIDLQELGKYEQYIK

SEQ ID NO: 2149 - protein, 1203 aa, Artificial Sequence
  SARS-CoV-2/pangolin/Guangxi/P1E/2017__EPI_ISL_410539 spike protein (1-1203)(P707C_P1061C)
MFVFLFVLPLVSSQCVNLTTRTGIQPGYTNSSTRGVYYPDKVFRSSILHLTQDLFLPFFSNVTWFNTINYQGGFKKFDNPVLPFNDGVYFASTEKSNIIRGWIFGTTLDARTQSLLIVNNATNVVIKVCEFQFCTDPFLGVYYHNNNKTWVENEFRVYSSANNCTFEYISQPFLMDLEGKQGNFKNLREFVFKNVDGYFKIYSKHTPIDLVRDLPRGFAALEPLVDLPIGINITRFQTLLALHRSYLTPGKLESGWTTGAAAYYVGYLQQRTFLLSYNQNGTITDAVDCSLDPLSETKCTLKSLTVEKGIYQTSNFRVQPTISIVRFPNITNLCPFGEVFNASKFASVYAWNRKRISNCVADYSVLYNSTSFSTFKCYGVSPTKLNDLCFTNVYADSFVVKGDEVRQIAPGQTGVIADYNYKLPDDFTGCVIAWNSVKQDALTGGNYLYRLFRKSKLKPFERDISTEIYQAGSTPCNGQVGLNCYYPLERYGFHPTTGVNYQPFRVVVLSFELLNGPATVCGPKLSTTLVKDKCVNFNFNGLTGTGVLTTSKKQFLPFQQFGRDISDTTDAVRDPQTLEILDITPCSFGGVSVITPGTNTSNQVAVLYQDVNCTEVPMAIHAEQLTPAWRVYSAGANVFQTRAGCLVGAEHVNNSYECDIPVGAGICASYHSMSSLRSVNQRSIIAYTMSLGAENSVAYSNNSIAICTNFTISVTTEILPVSMTKTSVDCTMYICGDSIECSNLLLQYGSFCTQLNRALTGIAVEQDKNTQEVFAQVKQIYKTPPIKDFGGFNFSQILPDPSKPSKRSFIEDLLFNKVTLADAGFIKQYGDCLGDIAARDLICAQKFNGLTVLPPLLTDEMIAQYTSALLAGTITSGWTFGAGAALQIPFAMQMAYRFNGIGVTQNVLYENQKLIANQFNSAIGKIQDSLSSTASALGKLQDVVNQNAQALNTLVKQLSSNFGAISSVLNDILSRLDKVEAEVQIDRLITGRLQSLQTYVTQQLIRAAEIRASANLAATKMSECVLGQSKRVDFCGKGYHLMSFPQSAPHGVVFLHVTYVCAQEKNFTTAPAICHEGKAHFPREGVFVSNGTHWFITQRNFYEPQIITTDNTFVSGSCDVVIGIVNNTVYDPLQPELDSFKEELDKYFKNHTSPDVDLGDISGINASVVNIQKEIDRLNEVAKNLNESLIDLQELGKYEQYIK

SEQ ID NO: 2150 - protein, 1211 aa, Artificial Sequence
  SARS-CoV-2/Wuhan/WIV05/2019__EPI_ISL_402128 spike protein (1-1211)(G889C_L1034C)
MFVFLVLLPLVSSQCVNLTTRTQLPPAYTNSFTRGVYYPDKVFRSSVLHSTQDLFLPFFSNVTWFHAIHVSGTNGTKRFDNPVLPFNDGVYFASTEKSNIIRGWIFGTTLDSKTQSLLIVNNATNVVIKVCEFQFCNDPFLGVYYHKNNKSWMESEFRVYSSANNCTFEYVSQPFLMDLEGKQGNFKNLREFVFKNIDGYFKIYSKHTPINLVRDLPQGFSALEPLVDLPIGINITRFQTLLALHRSYLTPGDSSSGWTAGAAAYYVGYLQPRTFLLKYNENGTITDAVDCALDPLSETKCTLKSFTVEKGIYQTSNFRVQPTESIVRFPNITNLCPFGEVFNATRFASVYAWNRKRISNCVADYSVLYNSASFSTFKCYGVSPTKLNDLCFTNVYADSFVIRGDEVRQIAPGQTGKIADYNYKLPDDFTGCVIAWNSNNLDSKVGGNYNYLYRLFRKSNLKPFERDISTEIYQAGSTPCNGVEGFNCYFPLQSYGFQPTNGVGYQPYRVVVLSFELLHAPATVCGPKKSTNLVKNKCVNFNFNGLTGTGVLTESNKKFLPFQQFGRDIADTTDAVRDPQTLEILDITPCSFGGVSVITPGTNTSNQVAVLYQDVNCTEVPVAIHADQLTPTWRVYSTGSNVFQTRAGCLIGAEHVNNSYECDIPIGAGICASYQTQTNSPRRARSVASQSIIAYTMSLGAENSVAYSNNSIAIPTNFTISVTTEILPVSMTKTSVDCTMYICGDSTECSNLLLQYGSFCTQLNRALTGIAVEQDKNTQEVFAQVKQIYKTPPIKDFGGFNFSQILPDPSKPSKRSFIEDLLFNKVTLADAGFIKQYGDCLGDIAARDLICAQKFNGLTVLPPLLTDEMIAQYTSALLAGTITSGWTFCAGAALQIPFAMQMAYRFNGIGVTQNVLYENQKLIANQFNSAIGKIQDSLSSTASALGKLQDVVNQNAQALNTLVKQLSSNFGAISSVLNDILSRLDKVEAEVQIDRLITGRLQSLQTYVTQQLIRAAEIRASANLAATKMSECVCGQSKRVDFCGKGYHLMSFPQSAPHGVVFLHVTYVPAQEKNFTTAPAICHDGKAHFPREGVFVSNGTHWFVTQRNFYEPQIITTDNTFVSGNCDVVIGIVNNTVYDPLQPELDSFKEELDKYFKNHTSPDVDLGDISGINASVVNIQKEIDRLNEVAKNLNESLIDLQELGKYEQYIK

SEQ ID NO: 2151 - protein, 1207 aa, Artificial Sequence
  SARS-CoV-2/bat/Yunnan/RaTG13/2013__EPI_ISL_402131 spike protein (1-1207)(G885C_L1030C)
MFVFLVLLPLVSSQCVNLTTRTQLPPAYTNSSTRGVYYPDKVFRSSVLHLTQDLFLPFFSNVTWFHAIHVSGTNGIKRFDNPVLPFNDGVYFASTEKSNIIRGWIFGTTLDSKTQSLLIVNNATNVVIKVCEFQFCNDPFLGVYYHKNNKSWMESEFRVYSSANNCTFEYVSQPFLMDLEGKQGNFKNLREFVFKNIDGYFKIYSKHTPINLVRDLPPGFSALEPLVDLPIGINITRFQTLLALHRSYLTPGDSSSGWTAGAAAYYVGYLQPRTFLLKYNENGTITDAVDCALDPLSETKCTLKSFTVEKGIYQTSNFRVQPTDSIVRFPNITNLCPFGEVFNATTFASVYAWNRKRISNCVADYSVLYNSTSFSTFKCYGVSPTKLNDLCFTNVYADSFVITGDEVRQIAPGQTGKIADYNYKLPDDFTGCVIAWNSKHIDAKEGGNFNYLYRLFRKANLKPFERDISTEIYQAGSKPCNGQTGLNCYYPLYRYGFYPTDGVGHQPYRVVVLSFELLNAPATVCGPKKSTNLVKNKCVNFNFNGLTGTGVLTESNKKFLPFQQFGRDIADTTDAVRDPQTLEILDITPCSFGGVSVITPGTNASNQVAVLYQDVNCTEVPVAIHADQLTPTWRVYSTGSNVFQTRAGCLIGAEHVNNSYECDIPIGAGICASYQTQTNSRSVASQSIIAYTMSLGAENSVAYSNNSIAIPTNFTISVTTEILPVSMTKTSVDCTMYICGDSTECSNLLLQYGSFCTQLNRALTGIAVEQDKNTQEVFAQVKQIYKTPPIKDFGGFNFSQILPDPSKPSKRSFIEDLLFNKVTLADAGFIKQYGDCLGDIAARDLICAQKFNGLTVLPPLLTDEMIAQYTSALLAGTITSGWTFCAGAALQIPFAMQMAYRFNGIGVTQNVLYENQKLIANQFNSAIGKIQDSLSSTASALGKLQDVVNQNAQALNTLVKQLSSNFGAISSVLNDILSRLDKVEAEVQIDRLITGRLQSLQTYVTQQLIRAAEIRASANLAATKMSECVCGQSKRVDFCGKGYHLMSFPQSAPHGVVFLHVTYVPAQEKNFTTAPAICHDGKAHFPREGVFVSNGTHWFVTQRNFYEPQIITTDNTFVSGSCDVVIGIVNNTVYDPLQPELDSFKEELDKYFKNHTSPDVDLGDISGINASVVNIQKEIDRLNEVAKNLNESLIDLQELGKYEQYIK

SEQ ID NO: 2152 - protein, 1211 aa, Artificial Sequence
  SARS-CoV-2/Wuhan/HBCDC-HB-01/2019__EPI_ISL_402132 spike protein (1-1211)(G889C_L1034C)
MFVFLVLLPLVSSQCVNLTTRTQLPPAYTNSITRGVYYPDKVFRSSVLHSTQDLFLPFFSNVTWFHAIHVSGTNGTKRFDNPVLPFNDGVYFASTEKSNIIRGWIFGTTLDSKTQSLLIVNNATNVVIKVCEFQFCNDPFLGVYYHKNNKSWMESEFRVYSSANNCTFEYVSQPFLMDLEGKQGNFKNLREFVFKNIDGYFKIYSKHTPINLVRDLPQGFSALEPLVDLPIGINITRFQTLLALHRSYLTPGDSSSGWTAGAAAYYVGYLQPRTFLLKYNENGTITDAVDCALDPLSETKCTLKSFTVEKGIYQTSNFRVQPTESIVRFPNITNLCPFGEVFNATRFASVYAWNRKRISNCVADYSVLYNSASFSTFKCYGVSPTKLNDLCFTNVYADSFVIRGDEVRQIAPGQTGKIADYNYKLPDDFTGCVIAWNSNNLDSKVGGNYNYLYRLFRKSNLKPFERDISTEIYQAGSTPCNGVEGFNCYFPLQSYGFQPTNGVGYQPYRVVVLSFELLHAPATVCGPKKSTNLVKNKCVNFNFNGLTGTGVLTESNKKFLPFQQFGRDIADTTDAVRDPQTLEILDITPCSFGGVSVITPGTNTSNQVAVLYQDVNCTEVPVAIHADQLTPTWRVYSTGSNVFQTRAGCLIGAEHVNNSYECDIPIGAGICASYQTQTNSPRRARSVASQSIIAYTMSLGAENSVAYSNNSIAIPTNFTISVTTEILPVSMTKTSVDCTMYICGDSTECSNLLLQYGSFCTQLNRALTGIAVEQDKNTQEVFAQVKQIYKTPPIKDFGGFNFSQILPDPSKPSKRSFIEDLLFNKVTLADAGFIKQYGDCLGDIAARDLICAQKFNGLTVLPPLLTDEMIAQYTSALLAGTITSGWTFCAGAALQIPFAMQMAYRFNGIGVTQNVLYENQKLIANQFNSAIGKIQDSLSSTASALGKLQDVVNQNAQALNTLVKQLSSNFGAISSVLNDILSRLDKVEAEVQIDRLITGRLQSLQTYVTQQLIRAAEIRASANLAATKMSECVCGQSKRVDFCGKGYHLMSFPQSAPHGVVFLHVTYVPAQEKNFTTAPAICHDGKAHFPREGVFVSNGTHWFVTQRNFYEPQIITTDNTFVSGNCDVVIGIVNNTVYDPLQPELDSFKEELDKYFKNHTSPDVDLGDISGINASVVNIQKEIDRLNEVAKNLNESLIDLQELGKYEQYIK

SEQ ID NO: 2153 - protein, 1211 aa, Artificial Sequence
  SARS-CoV-2/Guangdong/20SF028/2020__EPI_ISL_403936 spike protein (1-1211)(G889C_L1034C)
MFVFLVLLPLVSSQCVNLTTRTQLPPAYTNSFTRGVYYPDKVFRSSVLYSTQDLFLPFFSNVTWFHAIHVSGTNGTKRFDNPVLPFNDGVYFASTEKSNIIRGWIFGTTLDSKTQSLLIVNNATNVVIKVCEFQFCNDPFLGVYYHKNNKSWMESEFRVYSSANNCTFEYVSQPFLMDLEGKQGNFKNLREFVFKNIDGYFKIYSKHTPINLVRDLPQGFSALEPLVDLPIGINITRFQTLLALHRSYLTPGDSSSGWTAGAAAYYVGYLQPRTFLLKYNENGTITDAVDCALDPLSETKCTLKSFTVEKGIYQTSNFRVQPTESIVRFPNITNLCPFGEVFNATRFASVYAWNRKRISNCVADYSVLYNSASFSTFKCYGVSPTKLNDLCFTNVYADSFVIRGDEVRQIAPGQTGKIADYNYKLPDDFTGCVIAWNSNNLDSKVGGNYNYLYRLFRKSNLKPFERDISTEIYQAGSTPCNGVEGFNCYFPLQSYGFQPTNGVGYQPYRVVVLSFELLHAPATVCGPKKSTNLVKNKCVNFNFNGLTGTGVLTESNKKFLPFQQFGRDIADTTDAVRDPQTLEILDITPCSFGGVSVITPGTNTSNQVAVLYQDVNCTEVPVAIHADQLTPTWRVYSTGSNVFQTRAGCLIGAEHVNNSYECDIPIGAGICASYQTQTNSPRRARSVASQSIIAYTMSLGAENSVAYSNNSIAIPTNFTISVTTEILPVSMTKTSVDCTMYICGDSTECSNLLLQYGSFCTQLNRALTGIAVEQDKNTQEVFAQVKQIYKTPPIKDFGGFNFSQILPDPSKPSKRSFIEDLLFNKVTLADAGFIKQYGDCLGDIAARDLICAQKFNGLTVLPPLLTDEMIAQYTSALLAGTITSGWTFCAGAALQIPFAMQMAYRFNGIGVTQNVLYENQKLIANQFNSAIGKIQDSLSSTASALGKLQDVVNQNAQALNTLVKQLSSNFGAISSVLNDILSRLDKVEAEVQIDRLITGRLQSLQTYVTQQLIRAAEIRASANLAATKMSECVCGQSKRVDFCGKGYHLMSFPQSAPHGVVFLHVTYVPAQEKNFTTAPAICHDGKAHFPREGVFVSNGTHWFVTQRNFYEPQIITTDNTFVSGNCDVVIGIVNNTVYDPLQPELDSFKEELDKYFKNHTSPDVDLGDISGINASVVNIQKEIDRLNEVAKNLNESLIDLQELGKYEQYIK

SEQ ID NO: 2154 - protein, 1211 aa, Artificial Sequence
  SARS-CoV-2/Shenzhen/SZTH-001/2020__EPI_ISL_406592 spike protein (1-1211)(G889C_L1034C)
MFVFLVLLPLVSSQCVNLTTRTQLPPAYTNSFTRGVYYPDKVFRSSVLHSTQDLFLPFFSNVTWFHAIHVSGTNGTKRFDNPVLPFNDGVYFASTEKSNIIRGWIFGTTLDSKTQSLLIVNNATNVVIKVCEFQFCNDPFLGVYYHKNNKSWMESEFRVYSSANNCTFEYVSQPFLMDLEGKQGNFKNLREFVFKNIDGYFKIYSKHTPINLVRDLPQGFSALEPLVDLPIGINITRFQTLLALHRSYLTPGDSSSGWTAGAAAYYVGYLQPRTFLLKYNENGTITDAVDCALDPLSETKCTLKSFTVEKGIYQTSNFRVQPTESIVRFPNITNLCPFGEVFNATRFASVYAWNRKRISNCVADYSVLYNSASFSTFKCYGVSPTKLNDLCFTNVYADSFVIRGDEVRQIAPGQTGKIADYNYKLPDDFTGCVIAWNSNNLDSKVGGNYNYLYRLFRKSNLKPFERDISTEIYQAGSTPCNGVEGFNCYFPLQSYGFQPTNGVGYQPYRVVVLSFELLHAPATVCGPKKSTNLVKNKCVNFNFNGLTGTGVLTESNKKFLPFQQFGRDIADTTDAVRDPQTLEILDITPCSFGGVSVITPGTNTSNQVAVLYQDVNCTEVPVAIHADQLTPTWRVYSTGSNVFQTRAGCLIGAEHVNNSYECDIPIGAGICASYQTQTNSPRRARSVASQSIIAYTMSLGAENSVAYSNNSIAIPTNFTISVTTEILPVSMTKTSVDCTMYICGDSTECSNLLLQYGSFCTQLNRALTGIAVEQDKNTQEVFAQVKQIYKTPPIKDFGGFNFSQILPDPSKPSKRSFIEDLLFNKVTLADAGFIKQYGDCLGDIAARDLICAQKFNGLTVLPPLLTDEMIAQYTSALLAGTITSGWTFCAGAALQIPFAMQMAYRFNGIGVTQNVLYENQKLIANQFNSAIGKIQDSLSSTASALGKLQDVVNQNAQALNTLVKQLSSNFGAISSVLNDILSRLDKVEAEVQIDRLITGRLQSLQTYVTQQLIRAAEIRASANLAATKMSECVCGQSKRVDFCGKGYHLMSFPQSAPHGVVFLHVTYVPAQEKNFTTAPAICHDGKAHFPREGVFVSNGTHWFVTQRNFYEPQIITTDNTFVSGNCDVLIGIVNNTVYDPLQPELDSFKEELDKYFKNHTSPDVDLGDISGINASVVNIQKEIDRLNEVAKNLNESLIDLQELGKYEQYIK

SEQ ID NO: 2155 - protein, 1211 aa, Artificial Sequence
  SARS-CoV-2/Shenzhen/SZTH-004/2020__EPI_ISL_406595 spike protein (1-1211)(G889C_L1034C)
MFVFLVLLPLVSSQCVNLTTRTQLPPAYTNSFTRGVYYPDKVFRSSVLHSTQDLFLPFFSNVTWFHAIHVSGTNGTKRFDNPVLPFNDGVYFASTEKSNIIRGWIFGTTLDSKTQSLLIVNNATNVVIKVCEFQFCNDPFLGVYYHKNNKSWMESEFRVYSSANNCTFEYVSQPFLMDLEGKQGNFKNLREFVFKNIDGYFKIYSKHTPINLVRDLPQGFSALEPLVDLPIGINITRFQTLLALHRSYLTPGDSSSGWTAGAAAYYVGYLQPRTFLLKYNENGTITDAVDCALDPLSETKCTLKSFTVEKGIYQTSNFRVQPTESIVRFPNITNLCPFGEVFNATRFASVYAWDRKRISNCVAYYSVLYNSASFSTFKCYGVSPTKLNDLCFTNVYADSFVIRGDEVRQIAPGQTGKIADYNYKLPDDFTGCVIAWNSNNLDSKVGGNYNYLYRLFRKSNLKPFERDISTEIYQAGSTPCNGVEGFNCYFPLQSYGFQPTNGVGYQPYRVVVLSFELLHAPATVCGPKKSTNLVKNKCVNFNFNGLTGTGVLTESNKKFLPFQQFGRDIADTTDAVRDPQTLEILDITPCSFGGVSVITPGTNTSNQVAVLYQDVNCTEVPVAIHADQLTPTWRVYSTGSNVFQTRAGCLIGAEHVNNSYECDIPIGAGICASYQTQTNSPRRARSVASQSIIAYTMSLGAENSVAYSNNSIAIPTNFTISVTTEILPVSMTKTSVDCTMYICGDSTECSNLLLQYGSFCTQLNRALTGIAVEQDKNTQEVFAQVKQIYKTPPIKDFGGFNFSQILPDPSKPSKRSFIEDLLFNKVTLADAGFIKQYGDCLGDIAARDLICAQKFNGLTVLPPLLTDEMIAQYTSALLAGTITSGWTFCAGAALQIPFAMQMAYRFNGIGVTQNVLYENQKLIANQFNSAIGKIQDSLSSTASALGKLQDVVNQNAQALNTLVKQLSSNFGAISSVLNDILSRLDKVEAEVQIDRLITGRLQSLQTYVTQQLIRAAEIRASANLAATKMSECVCGQSKRVDFCGKGYHLMSFPQSAPHGVVFLHVTYVPAQEKNFTTAPAICHDGKAHFPREGVFVSNGTHWFVTQRNFYEPQIITTDNTFVSGNCDVVIGIVNNTVYDPLQPELDSFKEELDKYFKNHTSPDVDLGDISGINASVVNIQKEIDRLNEVAKNLNESLIDLQELGKYEQYIK

SEQ ID NO: 2156 - protein, 1211 aa, Artificial Sequence
  SARS-CoV-2/France/IDF0372/2020__EPI_ISL_406596 spike protein (1-1211)(G889C_L1034C)
MFVFLVLLPLVSSQCVNLTTRTQLPPAYTNSFTRGVYYPDKVFRSSVLHSTQDLFLPFFSNVTWFHAIHVSGTNGTKRFDNPVLPFNDGVYFASTEKSNIIRGWIFGTTLDSKTQSLLIVNNATNVVIKVCEFQFCNDPFLGVYYHKNNKSWMESEFRVYSSANNCTFEYVSQPFLMDLEGKQGNFKNLREFVFKNIDGYFKIYSKHTPINLVRDLPQGFSALEPLVDLPIGINITRFQTLLALHRSYLTPGDSSSGWTAGAAAYYVGYLQPRTFLLKYNENGTITDAVDCALDPLSETKCTLKSFTVEKGIYQTSNFRVQPTESIVRFPNITNLCPFGEVFNATRFASVYAWNRKRISNCVADYSFLYNSASFSTFKCYGVSPTKLNDLCFTNVYADSFVIRGDEVRQIAPGQTGKIADYNYKLPDDFTGCVIAWNSNNLDSKVGGNYNYLYRLFRKSNLKPFERDISTEIYQAGSTPCNGVEGFNCYFPLQSYGFQPTNGVGYQPYRVVVLSFELLHAPATVCGPKKSTNLVKNKCVNFNFNGLTGTGVLTESNKKFLPFQQFGRDIADTTDAVRDPQTLEILDITPCSFGGVSVITPGTNTSNQVAVLYQDVNCTEVPVAIHADQLTPTWRVYSTGSNVFQTRAGCLIGAEHVNNSYECDIPIGAGICASYQTQTNSPRRARSVASQSIIAYTMSLGAENSVAYSNNSIAIPTNFTISVTTEILPVSMTKTSVDCTMYICGDSTECSNLLLQYGSFCTQLNRALTGIAVEQDKNTQEVFAQVKQIYKTPPIKDFGGFNFSQILPDPSKPSKRSFIEDLLFNKVTLADAGFIKQYGDCLGDIAARDLICAQKFNGLTVLPPLLTDEMIAQYTSALLAGTITSGWTFCAGAALQIPFAMQMAYRFNGIGVTQNVLYENQKLIANQFNSAIGKIQDSLSSTASALGKLQDVVNQNAQALNTLVKQLSSNFGAISSVLNDILSRLDKVEAEVQIDRLITGRLQSLQTYVTQQLIRAAEIRASANLAATKMSECVCGQSKRVDFCGKGYHLMSFPQSAPHGVVFLHVTYVPAQEKNFTTAPAICHDGKAHFPREGVFVSNGTHWFVTQRNFYEPQIITTDNTFVSGNCDVVIGIVNNTVYDPLQPELDSFKEELDKYFKNHTSPDVDLGDISGINASVVNIQKEIDRLNEVAKNLNESLIDLQELGKYEQYIK

SEQ ID NO: 2157 - protein, 1211 aa, Artificial Sequence
  SARS-CoV-2/Australia/VIC01/2020__EPI_ISL_406844 spike protein (1-1211)(G889C_L1034C)
MFVFLVLLPLVSSQCVNLTTRTQLPPAYTNSFTRGVYYPDKVFRSSVLHSTQDLFLPFFSNVTWFHAIHVSGTNGTKRFDNPVLPFNDGVYFASTEKSNIIRGWIFGTTLDSKTQSLLIVNNATNVVIKVCEFQFCNDPFLGVYYHKNNKSWMESEFRVYSSANNCTFEYVSQPFLMDLEGKQGNFKNLREFVFKNIDGYFKIYSKHTPINLVRDLPQGFSALEPLVDLPIGINITRFQTLLALHRRYLTPGDSSSGWTAGAAAYYVGYLQPRTFLLKYNENGTITDAVDCALDPLSETKCTLKSFTVEKGIYQTSNFRVQPTESIVRFPNITNLCPFGEVFNATRFASVYAWNRKRISNCVADYSVLYNSASFSTFKCYGVSPTKLNDLCFTNVYADSFVIRGDEVRQIAPGQTGKIADYNYKLPDDFTGCVIAWNSNNLDSKVGGNYNYLYRLFRKSNLKPFERDISTEIYQAGSTPCNGVEGFNCYFPLQSYGFQPTNGVGYQPYRVVVLSFELLHAPATVCGPKKSTNLVKNKCVNFNFNGLTGTGVLTESNKKFLPFQQFGRDIADTTDAVRDPQTLEILDITPCSFGGVSVITPGTNTSNQVAVLYQDVNCTEVPVAIHADQLTPTWRVYSTGSNVFQTRAGCLIGAEHVNNSYECDIPIGAGICASYQTQTNSPRRARSVASQSIIAYTMSLGAENSVAYSNNSIAIPTNFTISVTTEILPVSMTKTSVDCTMYICGDSTECSNLLLQYGSFCTQLNRALTGIAVEQDKNTQEVFAQVKQIYKTPPIKDFGGFNFSQILPDPSKPSKRSFIEDLLFNKVTLADAGFIKQYGDCLGDIAARDLICAQKFNGLTVLPPLLTDEMIAQYTSALLAGTITSGWTFCAGAALQIPFAMQMAYRFNGIGVTQNVLYENQKLIANQFNSAIGKIQDSLSSTASALGKLQDVVNQNAQALNTLVKQLSSNFGAISSVLNDILSRLDKVEAEVQIDRLITGRLQSLQTYVTQQLIRAAEIRASANLAATKMSECVCGQSKRVDFCGKGYHLMSFPQSAPHGVVFLHVTYVPAQEKNFTTAPAICHDGKAHFPREGVFVSNGTHWFVTQRNFYEPQIITTDNTFVSGNCDVVIGIVNNTVYDPLQPELDSFKEELDKYFKNHTSPDVDLGDISGINASVVNIQKEIDRLNEVAKNLNESLIDLQELGKYEQYIK

SEQ ID NO: 2158 - protein, 1211 aa, Artificial Sequence
  SARS-CoV-2/Germany/BavPat1/2020__EPI_ISL_406862 spike protein (1-1211)(G889C_L1034C)
MFVFLVLLPLVSSQCVNLTTRTQLPPAYTNSFTRGVYYPDKVFRSSVLHSTQDLFLPFFSNVTWFHAIHVSGTNGTKRFDNPVLPFNDGVYFASTEKSNIIRGWIFGTTLDSKTQSLLIVNNATNVVIKVCEFQFCNDPFLGVYYHKNNKSWMESEFRVYSSANNCTFEYVSQPFLMDLEGKQGNFKNLREFVFKNIDGYFKIYSKHTPINLVRDLPQGFSALEPLVDLPIGINITRFQTLLALHRSYLTPGDSSSGWTAGAAAYYVGYLQPRTFLLKYNENGTITDAVDCALDPLSETKCTLKSFTVEKGIYQTSNFRVQPTESIVRFPNITNLCPFGEVFNATRFASVYAWNRKRISNCVADYSVLYNSASFSTFKCYGVSPTKLNDLCFTNVYADSFVIRGDEVRQIAPGQTGKIADYNYKLPDDFTGCVIAWNSNNLDSKVGGNYNYLYRLFRKSNLKPFERDISTEIYQAGSTPCNGVEGFNCYFPLQSYGFQPTNGVGYQPYRVVVLSFELLHAPATVCGPKKSTNLVKNKCVNFNFNGLTGTGVLTESNKKFLPFQQFGRDIADTTDAVRDPQTLEILDITPCSFGGVSVITPGTNTSNQVAVLYQGVNCTEVPVAIHADQLTPTWRVYSTGSNVFQTRAGCLIGAEHVNNSYECDIPIGAGICASYQTQTNSPRRARSVASQSIIAYTMSLGAENSVAYSNNSIAIPTNFTISVTTEILPVSMTKTSVDCTMYICGDSTECSNLLLQYGSFCTQLNRALTGIAVEQDKNTQEVFAQVKQIYKTPPIKDFGGFNFSQILPDPSKPSKRSFIEDLLFNKVTLADAGFIKQYGDCLGDIAARDLICAQKFNGLTVLPPLLTDEMIAQYTSALLAGTITSGWTFCAGAALQIPFAMQMAYRFNGIGVTQNVLYENQKLIANQFNSAIGKIQDSLSSTASALGKLQDVVNQNAQALNTLVKQLSSNFGAISSVLNDILSRLDKVEAEVQIDRLITGRLQSLQTYVTQQLIRAAEIRASANLAATKMSECVCGQSKRVDFCGKGYHLMSFPQSAPHGVVFLHVTYVPAQEKNFTTAPAICHDGKAHFPREGVFVSNGTHWFVTQRNFYEPQIITTDNTFVSGNCDVVIGIVNNTVYDPLQPELDSFKEELDKYFKNHTSPDVDLGDISGINASVVNIQKEIDRLNEVAKNLNESLIDLQELGKYEQYIK

SEQ ID NO: 2159 - protein, 1211 aa, Artificial Sequence
  SARS-CoV-2/Wuhan/HBCDC-HB-02/2020__EPI_ISL_412978 spike protein (1-1211)(G889C_L1034C)
MFVFLVLLPLVSSQCVNLTTRTQLPPAYTNSFTRGVYYPDKVFRSSVLHSTQDLFLPFFSNVTWFHAIHVSGTNGTKRFDNPVLPFNDGVYFASTEKSNIIRGWIFGTTLDSKTQSLLIVNNATNVVIKVCEFQFCNDPFLGVYYHKNNKSWMESEFRVYSSANNCTFEYVSQPFLMDLEGKQGNFKNLREFVFKNIDGYFKIYSKHTPINLVRDLPQGFSALEPLVDLPIGINITRFQTLLALHRSYLTPGDSSSGWTAGAAAYYVGYLQPRTFLLKYNENGTITDAVDCALDPLSETKCTLKSFTVEKGIYQTSNFRVQPTESIVRFPNITNLCPFGEVFNATRFASVYAWNRKRISNCVADYSVLYNSASFSTFKCYGVSPTKLNDLCFTNVYADSFVIRGDEVRQIAPGQTGKIADYNYKLPDDFTGCVIAWNSNNLDSKVGGNYNYLYRLFRKSNLKPFERDISTEIYQAGSTPCNGVEGFNCYFPLQSYGFQPTNGVGYQPYRVVVLSFELLHAPATVCGPKKSTNLVKNKCVNFNFNGLTGTGVLTESNKKFLPFQQFGRDIADTTDAVRDPQTLEILDITPCSFGGVSVITPGTNTSNQVAVLYQDVNCTEVPVAIHADQLTPTWRVYSTGSNVFQTRAGCLIGAEHVNNSYECDIPIGAGICASYQTQTNSPRRARSVASQSIIAYTMSLGAENSVAYSNNSIAIPTNFTISVTTEILPVSMTKTSVDCTMYICGDSTECSNFLLQYGSFCTQLNRALTGIAVEQDKNTQEVFAQVKQIYKTPPIKDFGGFNFSQILPDPSKPSKRSFIEDLLFNKVTLADAGFIKQYGDCLGDIAARDLICAQKFNGLTVLPPLLTDEMIAQYTSALLAGTITSGWTFCAGAALQIPFAMQMAYRFNGIGVTQNVLYENQKLIANQFNSAIGKIQDSLSSTASALGKLQDVVNQNAQALNTLVKQLSSNFGAISSVLNDILSRLDKVEAEVQIDRLITGRLQSLQTYVTQQLIRAAEIRASANLAATKMSECVCGQSKRVDFCGKGYHLMSFPQSAPHGVVFLHVTYVPAQEKNFTTAPAICHDGKAHFPREGVFVSNGTHWFVTQRNFYEPQIITTDNTFVSGNCDVVIGIVNNTVYDPLQPELDSFKEELDKYFKNHTSPDVDLGDISGINASVVNIQKEIDRLNEVAKNLNESLIDLQELGKYEQYIK

SEQ ID NO: 2160 - protein, 1211 aa, Artificial Sequence
  SARS-CoV-2/Australia/QLD02/2020__EPI_ISL_407896 spike protein (1-1211)(G889C_L1034C)
MFVFLVLLPLVSSQCVNLTTRTQLPPAYTNSFTRGVYYPDKVFRSSVLHSTQDLFLPFFSNVTWFHAIHVSGTNGTKRFDNPVLPFNDGVYFASTEKSNIIRGWIFGTTLDSKTQSLLIVNNATNVVIKVCEFQFCNDPFLGVYYHKNNKSWMESEFRVYSSANNCTFEYVSQPFLMDLEGKQGNFKNLREFVFKNIDGYFKIYSKHTPINLVRDLPQGFSALEPLVDLPIGINITRFQTLLALHRSYLTPGDSSSGWTAGAAAYYVGYLQPRTFLLKYNENGTITDAVDCALDPLSETKCTLKSFTVEKGIYQTSNFRVQPTESIVRFPNITNLCPFGEVFNATRFASVYAWNRKRISNCVADYSVLYNSASFSTFKCYGVSPTKLNDLCFTNVYADSFVIRGDEVRQIAPGQTGKIADYNYKLPDDFTGCVIAWNSNNLDSKVGGNYNYLYRLFRKSNLKPFERDISTEIYQAGSTPCNGVEGFNCYFPLQSYGFQPTNGVGYQPYRVVVLSFELLHAPATVCGPKKSTNLVKNKCVNFNFNGLTGTGVLTESNKKFLPFQQFGRDIADTTDAVRDPQTLEILDITPCSFGGVSVITPGTNTSNQVAVLYQDVNCTEVPVAIHADQLTPTWRVYSTGSNVFQTRAGCLIGAEHVNNSYECDIPIGAGICASYQTQTNSPRRARSVASQSIIAYTMSLGAENSVAYSNNSIAIPTNFTISVTTEILPVSMTKTSVDCTMYICGDSTECSNLLLQYGSFCTQLNRALTGIAVEQDKNTQEVFAQVKQIYKTPPIKDFGGFNFSQILPDPSKPSKRSFIEDLLFNKVTLADAGFIKQYGDCLGDIAARDLICAQKFNGLTVLPPLLTDEMIAQYTSALLAGTITSGWTFCAGAALQIPFAMQMAYRFNGIGVTQNVLYENQKLIANQFNSAIGKIQDSLSSTASALGKLQDVVNQNAQALNTLVKQLSSNFGAISSVLNDILSRLDKVEAEVQIDRLITGRLQSLQTYVTQQLIRAAEIRASANLAATKMSECVCGQSKRVDFCGKGYHLMSFPQSAPHGVVFLHVTYVPAQEKNFTTAPAICHDGKAHFPREGVFVSNGTHWFVTQRNFYEPQIITTDNTFVSGNCDVVIGIVNNTVYDPLQLELDSFKEELDKYFKNHTSPDVDLGDISGINASVVNIQKEIDRLNEVAKNLNESLIDLQELGKYEQYIK

SEQ ID NO: 2161 - protein, 1211 aa, Artificial Sequence
  SARS-CoV-2/India/1-31/2020__EPI_ISL_413523 spike protein (1-1211)(G889C_L1034C)
MFVFLVLLPLVSSQCVNLTTRTQLPPAYTNSFTRGVYYPDKVFRSSVLHSTQDLFLPFFSNVTWFHAIHVSGTNGTKRFDNPVLPFNDGVYFASTEKSNIIRGWIFGTTLDSKTQSLLIVNNATNVVIKVCEFQFCNDPFLGVYYHKNNKSWMESEFRVYSSANNCTFEYVSQPFLMDLEGKQGNFKNLREFVFKNIDGYFKIYSKHTPINLVRDLPQGFSALEPLVDLPIGINITRFQTLLALHRSYLTPGDSSSGWTAGAAAYYVGYLQPRTFLLKYNENGTITDAVDCALDPLSETKCTLKSFTVEKGIYQTSNFRVQPTESIVRFPNITNLCPFGEVFNATRFASVYAWNRKRISNCVADYSVLYNSASFSTFKCYGVSPTKLNDLCFTNVYADSFVIRGDEVRQIAPGQTGKIADYNYKLPDDFTGCVIAWNSNNLDSKVGGNYNYLYRLFRKSNLKPFERDISTEIYQAGSTPCNGVEGFNCYFPLQSYGFQPTNGVGYQPYRVVVLSFELLHAPATVCGPKKSTNLVKNKCVNFNFNGLTGTGVLTESNKKFLPFQQFGRDIADTTDAVRDPQTLEILDITPCSFGGVSVITPGTNTSNQVAVLYQDVNCTEVPVAIHADQLTPTWRVYSTGSNVFQTRAGCLIGAEHVNNSYECDIPIGAGICASYQTQTNSPRRARSVASQSIIAYTMSLGAENSVAYSNNSIAIPTNFTISVTTEILPVSMTKTSVDCTMYICGDSTECSNLLLQYGSFCTQLNRALTGIAVEQDKNTQEVFAQVKQIYKTPPIKDFGGFNFSQILPDPSKPSKRSFIEDLLFNKVTLADAGFIKQYGDCLGDIAARDLICAQKFNGLTVLPPLLTDEMIAQYTSALLAGTITSGWTFCAGAALQIPFAMQMAYRFNGIGVTQNVLYENQKLIANQFNSVIGKIQDSLSSTASALGKLQDVVNQNAQALNTLVKQLSSNFGAISSVLNDILSRLDKVEAEVQIDRLITGRLQSLQTYVTQQLIRAAEIRASANLAATKMSECVCGQSKRVDFCGKGYHLMSFPQSAPHGVVFLHVTYVPAQEKNFTTAPAICHDGKAHFPREGVFVSNGTHWFVTQRNFYEPQIITTDNTFVSGNCDVVIGIVNNTVYDPLQPELDSFKEELDKYFKNHTSPDVDLGDISGINASVVNIQKEIDRLNEVAKNLNESLIDLQELGKYEQYIK

SEQ ID NO: 2162 - protein, 1211 aa, Artificial Sequence
  SARS-CoV-2/Guangdong/GD2020087-P0008/2020__EPI_ISL_413863 spike protein (1-1211)(G889C_L1034C)
MFVFLVLLPLVSSQCVNLTTRTQLPPAYTNSFTRGVYYPDKVFRSSVLHSTQDLFLPFFSNVTWFHAIHVSGTNGTKRFDNPVLPFNDGVYFASTEKSNIIRGWIFGTTLDSKTQSLLIVNNATNVVIKVCEFQFCNDPFLGVYYHKNNKSWMESEFRVYSSANNCTFEYVSQPFLMDLEGKQGNFKNLREFVFKNIDGYFKIYSKHTPINLVRDLPQGFSALEPLVDLPIGINITRFQTLLALHRSYLTPGDSSSGWTAGAAAYYVGYLQPRTFLLKYNENGTITDAVDCALDPLSETKCTLKSFTVEKGIYQTSNFRVQPTESIVRFPNITNLCPFGEVFNATRFASVYAWNRKRISNCVADYSVLYNSASFSTFKCYGVSPTKLNDLCFTNVYADSFVIRGDEVREIAPGQTGKIADYNYKLPDDFTGCVIAWNSNNLDSKVGGNYNYLYRLFRKSNLKPFERDISTEIYQAGSTPCNGVEGFNCYFPLQSYGFQPTNGVGYQPYRVVVLSFELLHAPATVCGPKKSTNLVKNKCVNFNFNGLTGTGVLTESNKKFLPFQQFGRDIADTTDAVRDPQTLEILDITPCSFGGVSVITPGTNTSNQVAVLYQDVNCTEVPVAIHADQLTPTWRVYSTGSNVFQTRAGCLIGAEHVNNSYECDIPIGAGICASYQTQTNSPRRARSVASQSIIAYTMSLGAENSVAYSNNSIAIPTNFTISVTTEILPVSMTKTSVDCTMYICGDSTECSNLLLQYGSFCTQLNRALTGIAVEQDKNTQEVFAQVKQIYKTPPIKDFGGFNFSQILPDPSKPSKRSFIEDLLFNKVTLADAGFIKQYGDCLGDIAARDLICAQKFNGLTVLPPLLTDEMIAQYTSALLAGTITSGWTFCAGAALQIPFAMQMAYRFNGIGVTQNVLYENQKLIANQFNSAIGKIQDSLSSTASALGKLQDVVNQNAQALNTLVKQLSSNFGAISSVLNDILSRLDKVEAEVQIDRLITGRLQSLQTYVTQQLIRAAEIRASANLAATKMSECVCGQSKRVDFCGKGYHLMSFPQSAPHGVVFLHVTYVPAQEKNFTTAPAICHDGKAHFPREGVFVSNGTHWFVTQRNFYEPQIITTDNTFVSGNCDVVIGIVNNTVYDPLQPELDSFKEELDKYFKNHTSPDVDLGDISGINASVVNIQKEIDRLNEVAKNLNESLIDLQELGKYEQYIK

SEQ ID NO: 2163 - protein, 1211 aa, Artificial Sequence
  SARS-CoV-2/Sweden/01/2020__EPI_ISL_411951 spike protein (1-1211)(G889C_L1034C)
MFVFLVLLPLVSSQCVNLTTRTQLPPAYTNSFTRGVYYPDKVFRSSVLHSTQDLFLPFFSNVTWFHAIHVSGTNGTKRFDNPVLPFNDGVYFASTEKSNIIRGWIFGTTLDSKTQSLLIVNNATNVVIKVCEFQFCNDPFLGVYYHKNNKSWMESEFRVYSSANNCTFEYVSQPFLMDLEGKQGNFKNLREFVFKNIDGYFKIYSKHTPINLVRDLPQGFSALEPLVDLPIGINITRFQTLLALHRSYLTPGDSSSGWTAGAAAYYVGYLQPRTFLLKYNENGTITDAVDCALDPLSETKCTLKSFTVEKGIYQTSNFRVQPTESIVRFPNITNLCPFGEVFNATRFASVYAWNRKRISNCVADYSVLYNSASFSTFKCYGVSPTKLNDLCFTNVYADSFVIRGDEVRQIAPGQTGKIADYNYKLPDDFTGCVIAWNSNNLDSKVGGNYNYLYRLFRKSNLKPFERDISTEIYQAGSTPCNGVEGFNCYFPLQSYGFQPTNGVGYQPYRVVVLSFELLHAPATVCGPKKSTNLVKNKCVNFNFNGLTGTGVLTESNKKFLPFQQFGRDIADTTDAVRDPQTLEILDITPCSFGGVSVITPGTNTSNQVAVLYQDVNCTEVPVAIHADQLTPTWRVYSTGSNVFQTRAGCLIGAEHVNNSYECDIPIGAGICASYQTQTNSPRRARSVASQSIIAYTMSLGAENSVAYSNNSIAIPTNFTISVTTEILPVSMTKTSVDCTMYICGDSTECSNLLLQYGSFCTQLNRALTGIAVEQDKNTQEVFAQVKQIYKTPPIKDCGGFNFSQILPDPSKPSKRSFIEDLLFNKVTLADAGFIKQYGDCLGDIAARDLICAQKFNGLTVLPPLLTDEMIAQYTSALLAGTITSGWTFCAGAALQIPFAMQMAYRFNGIGVTQNVLYENQKLIANQFNSAIGKIQDSLSSTASALGKLQDVVNQNAQALNTLVKQLSSNFGAISSVLNDILSRLDKVEAEVQIDRLITGRLQSLQTYVTQQLIRAAEIRASANLAATKMSECVCGQSKRVDFCGKGYHLMSFPQSAPHGVVFLHVTYVPAQEKNFTTAPAICHDGKAHFPREGVFVSNGTHWFVTQRNFYEPQIITTDNTFVSGNCDVVIGIVNNTVYDPLQPELDSFKEELDKYFKNHTSPDVDLGDISGINASVVNIQKEIDRLNEVAKNLNESLIDLQELGKYEQYIK

SEQ ID NO: 2164 - protein, 1211 aa, Artificial Sequence
  SARS-CoV-2/Tianmen/HBCDC-HB-07/2020__EPI_ISL_412983 spike protein (1-1211)(G889C_L1034C)
MFVFLVLLPLVSSQCVNLTTRTQLPPAYTNSFTRGVYYPDKVFRSSVLHSTQDLFLPFFSNVTWFHAIHVSGTNGTKRFDNPVLPFNDGVYFASTEKSNIIRGWIFGTTLDSKTQSLLIVNNATNVVIKVCEFQFCNDPFLGVYYHKNNKSWMESEFRVYSSANNCTFEYVSQPFLMDLEGKQGNFKNLREFVFKNIDGYFKIYSKHTPINLVRDLPQGFSALEPLVDLPIGINITRFQTLLALHRSYLTPGDSSSGWTAGAAAYYVGYLQPRTFLLKYNENGTITDAVDCALDPLSETKCTLKSFTVEKGIYQTSNFRVQPTESIVRFPNITNLCPFGEVFNATRFASVYAWNRKRISNCVADYSVLYNSASFSTFKCYGVSPTKLNDLCFTNVYADSFVIRGDEVRQIAPGQTGKIADYNYKLPDDFTGCVIAWNSNNLDSKVGGNYNYLYRLFRKSNLKPFERDISTEIYQAGSTPCNGVEGFNCYFPLQSYGFQPTNGVGYQPYRVVVLSFELLHAPATVCGPKKSTNLVKNKCVNFNFNGLTGTGVLTESNKKFLPFQQFGRDIADTTDAVRDPQTLEILDITPCSFGGVSVITPGTNTSNQVAVLYQDLNCTEVPVAIHADQLTPTWRVYSTGSNVFQTRAGCLIGAEHVNNSYECDIPIGAGICASYQTQTNSPRRARSVASQSIIAYTMSLGAENSVAYSNNSIAIPTNFTISVTTEILPVSMTKTSVDCTMYICGDSTECSNLLLQYGSFCTQLNRALTGIAVEQDKNTQEVFAQVKQIYKTPPIKDFGGFNFSQILPDPSKPSKRSFIEDLLFNKVTLADAGFIKQYGDCLGDIAARDLICAQKFNGLTVLPPLLTDEMIAQYTSALLAGTITSGWTFCAGAALQIPFAMQMAYRFNGIGVTQNVLYENQKLIANQFNSAIGKIQDSLSSTASALGKLQDVVNQNAQALNTLVKQLSSNFGAISSVLNDILSRLDKVEAEVQIDRLITGRLQSLQTYVTQQLIRAAEIRASANLAATKMSECVCGQSKRVDFCGKGYHLMSFPQSAPHGVVFLHVTYVPAQEKNFTTAPAICHDGKAHFPREGVFVSNGTHWFVTQRNFYEPQIITTDNTFVSGNCDVVIGIVNNTVYDPLQPELDSFKEELDKYFKNHTSPDVDLGDISGINASVVNIQKEIDRLNEVAKNLNESLIDLQELGKYEQYIK

SEQ ID NO: 2165 - protein, 1211 aa, Artificial Sequence
  SARS-CoV-2/Hong Kong/case42_VM20002493/2020__EPI_ISL_414527 spike protein (1-1211)(G889C_L1034C)
MFVFLVLLPLVSSQCVNLTTRTQLPPAYTNSFTRGVYYPDKVFRSSVLHSTQDLFLPFFSNVTWFHAIHVSGTNGTKRFDNPVLPFNDGVYFASTEKSNIIRGWIFGTTLDSKTQSLLIVNNATNVVIKVCEFQFCNDPFLGVYYHKNNKSWMESEFRVYSSANNCTFEYVSQPFLMDLEGKQGNFKNLREFVFKNIDGYFKIYSKHTPINLVRDLPQGFSALEPLVDLPIGINITRFQTLLALHRSYLTPGDSSSGWTAGAAAYYVGYLQPRTFLLKYNENGTITDAVDCALDPLSETKCTLKSFTVEKGIYQTSNFRVQPTESIVRFPNITNLCPFGEVFNATRFASVYAWNRKRISNCVADYSVLYNSASFSTFKCYGVSPTKLNDLCFTNVYADSFVIRGDEVRQIAPGQTGKIADYNYKLPDDFTGCVIAWNSNNLDSKVGGNYNYLYRLFRKSNLKPFERDISTEIYQAGSTPCNGVEGFNCYFPLQSYGFQPTNGVGYQPYRVVVLSFELLHAPATVCGPKKSTNLVKNKCVNFNFNGLTGTGVLTESNKKFLPFQQFGRDIADTTDAVRDPQTLEILDITPCSFGGVSVITPGTNTSNQVAVLYQDVNCTEVPVAIHADQLTPTWRVYSTGSNVFQTRAGCLIGAEHVNNSYECDIPIGAGICASYQTQTNSPRRARSVASQSIIAYTMSLGAENSVAYSNNSIAIPTNFAISVTTEILPVSMTKTSVDCTMYICGDSTECSNLLLQYGSFCTQLNRALTGIAVEQDKNTQEVFAQVKQIYKTPPIKDFGGFNFSQILPDPSKPSKRSFIEDLLFNKVTLADAGFIKQYGDCLGDIAARDLICAQKFNGLTVLPPLLTDEMIAQYTSALLAGTITSGWTFCAGAALQIPFAMQMAYRFNGIGVTQNVLYENQKLIANQFNSAIGKIQDSLSSTASALGKLQDVVNQNAQALNTLVKQLSSNFGAISSVLNDILSRLDKVEAEVQIDRLITGRLQSLQTYVTQQLIRAAEIRASANLAATKMSECVCGQSKRVDFCGKGYHLMSFPQSAPHGVVFLHVTYVPAQEKNFTTAPAICHDGKAHFPREGVFVSNGTHWFVTQRNFYEPQIITTDNTFVSGNCDVVIGIVNNTVYDPLQPELDSFKEELDKYFKNHTSPDVDLGDISGINASVVNIQKEIDRLNEVAKNLNESLIDLQELGKYEQYIK

SEQ ID NO: 2166 - protein, 1211 aa, Artificial Sequence
  SARS-CoV-2/USA/CruiseA-23/2020__EPI_ISL_414482 spike protein (1-1211)(G889C_L1034C)
MFVFLVLLPLVSSQCVNLTTRTQLPPAYTNSFTRGVYYPDKVFRSSVLHSTQDLFLPFFSNVTWFHAIHVSGTNGTKRFDNPVLPFNDGVYFASTEKSNIIRGWIFGTTLDSKTQSLLIVNNATNVVIKVCEFQFCNDPFLGVYYHKNNKSWMESEFRVYSSANNCTFEYVSQPFLMDLEVKQGNFKNLREFVFKNIDGYFKIYSKHTPINLVRDLPQGFSALEPLVDLPIGINITRFQTLLALHRSYLTPGDSSSGWTAGAAAYYVGYLQPRTFLLKYNENGTITDAVDCALDPLSETKCTLKSFTVEKGIYQTSNFRVQPTESIVRFPNITNLCPFGEVFNATRFASVYAWNRKRISNCVADYSVLYNSASFSTFKCYGVSPTKLNDLCFTNVYADSFVIRGDEVRQIAPGQTGKIADYNYKLPDDFTGCVIAWNSNNLDSKVGGNYNYLYRLFRKSNLKPFERDISTEIYQAGSTPCNGVEGFNCYFPLQSYGFQPTNGVGYQPYRVVVLSFELLHAPATVCGPKKSTNLVKNKCVNFNFNGLTGTGVLTESNKKFLPFQQFGRDIADTTDAVRDPQTLEILDITPCSFGGVSVITPGTNTSNQVAVLYQDVNCTEVPVAIHADQLTPTWRVYSTGSNVFQTRAGCLIGAEHVNNSYECDIPIGAGICASYQTQTNSPRRARSVASQSIIAYTMSLGAENSVAYSNNSIAIPTNFTISVTTEILPVSMTKTSVDCTMYICGDSTECSNLLLQYGSFCTQLNRALTGIAVEQDKNTQEVFAQVKQIYKTPPIKDFGGFNFSQILPDPSKPSKRSFIEDLLFNKVTLADAGFIKQYGDCLGDIAARDLICAQKFNGLTVLPPLLTDEMIAQYTSALLAGTITSGWTFCAGAALQIPFAMQMAYRFNGIGVTQNVLYENQKLIANQFNSAIGKIQDSLSSTASALGKLQDVVNQNAQALNTLVKQLSSNFGAISSVLNDILSRLDKVEAEVQIDRLITGRLQSLQTYVTQQLIRAAEIRASANLAATKMSECVCGQSKRVDFCGKGYHLMSFPQSAPHGVVFLHVTYVPAQEKNFTTAPAICHDGKAHFPREGVFVSNGTHWFVTQRNFYEPQIITTDNTFVSGNCDVVIGIVNNTVYDPLQPELDSFKEELDKYFKNHTSPDVDLGDISGINASVVNIQKEIDRLNEVAKNLNESLIDLQELGKYEQYIK

SEQ ID NO: 2167 - protein, 1211 aa, Artificial Sequence
  SARS-CoV-2/Hong Kong/case85_VM20002868/2020__EPI_ISL_414519 spike protein (1-1211)(G889C_L1034C)
MFVFLVLVPLVSSQCVNLTTRTQLPPAYTNSFTRGVYYPDKVFRSSVLHSTQDLFLPFFSNVTWFHAIHVSGTNGTKRFDNPVLPFNDGVYFASTEKSNIIRGWIFGTTLDSKTQSLLIVNNATNVVIKVCEFQFCNDPFLGVYYHKNNKSWMESEFRVYSSANNCTFEYVSQPFLMDLEGKQGNFKNLREFVFKNIDGYFKIYSKHTPINLVRDLPQGFSALEPLVDLPIGINITRFQTLLALHRSYLTPGDSSSGWTAGAAAYYVGYLQPRTFLLKYNENGTITDAVDCALDPLSETKCTLKSFTVEKGIYQTSNFRVQPTESIVRFPNITNLCPFGEVFNATRFASVYAWNRKRISNCVADYSVLYNSASFSTFKCYGVSPTKLNDLCFTNVYADSFVIRGDEVRQIAPGQTGKIADYNYKLPDDFTGCVIAWNSNNLDSKVGGNYNYLYRLFRKSNLKPFERDISTEIYQAGSTPCNGVEGFNCYFPLQSYGFQPTNGVGYQPYRVVVLSFELLHAPATVCGPKKSTNLVKNKCVNFNFNGLTGTGVLTESNKKFLPFQQFGRDIADTTDAVRDPQTLEILDITPCSFGGVSVITPGTNTSNQVAVLYQDVNCTEVPVAIHADQLTPTWRVYSTGSNVFQTRAGCLIGAEHVNNSYECDIPIGAGICASYQTQTNSPRRARSVASQSIIAYTMSLGAENSVAYSNNSIAIPTNFTISVTTEILPVSMTKTSVDCTMYICGDSTECSNLLLQYGSFCTQLNRALTGIAVEQDKNTQEVFAQVKQIYKTPPIKDFGGFNFSQILPDPSKPSKRSFIEDLLFNKVTLADAGFIKQYGDCLGDIAARDLICAQKFNGLTVLPPLLTDEMIAQYTSALLAGTITSGWTFCAGAALQIPFAMQMAYRFNGIGVTQNVLYENQKLIANQFNSAIGKIQDSLSSTASALGKLQDVVNQNAQALNTLVKQLSSNFGAISSVLNDILSRLDKVEAEVQIDRLITGRLQSLQTYVTQQLIRAAEIRASANLAATKMSECVCGQSKRVDFCGKGYHLMSFPQSAPHGVVFLHVTYVPAQEKNFTTAPAICHDGKAHFPREGVFVSNGTHWFVTQRNFYEPQIITTDNTFVSGNCDVVIGIVNNTVYDPLQPELDSFKEELDKYFKNHTSPDVDLGDISGINASVVNIQKEIDRLNEVAKNLNESLIDLQELGKYEQYIK

SEQ ID NO: 2168 - protein, 1211 aa, Artificial Sequence; identical to SEQ ID NO: 2158
  SARS-CoV-2/England/200990660/2020__EPI_ISL_414523 spike protein (1-1211)(G889C_L1034C)

SEQ ID NO: 2169 - protein, 1211 aa, Artificial Sequence
  SARS-CoV-2/Australia/NSW09/2020__EPI_ISL_413595 spike protein (1-1211)(G889C_L1034C)
MFVFLVLLPLVSSQCVNLTTRTQLPPAYTNSFTRGVYYPDKVFRSSVLHSTQDLFLPFFSNVTWFHAIHVSGTNGTKRFDNPVLPFNDGVYFASTEKSNIIRGWIFGTTLDSKTQSLLIVNNATNVVIKVCEFQFCNDPFLGVYYHKNNKSWMESEFRVYSSANNCTFEYVSQPFLMDLEGKQGNFKNLREFVFKNIDGYFKIYSKHTPINLVRDLPQGFSALEPLVDLPIGINITRFQTLLALHRSYLTPGDSSSGWTAGAAAYYVGYLQPRTFLLKYNENGTITDAVDCALDPLSETKCTLKSFTVEKGIYQTSNFRVQPTESIVRFPNITNLCPFGEVFNATRFASVYAWNRKRISNCVADYSVLYNSASFSTFKCYGVSPTKLNDLCFTNVYADSFVIRGDEVRQIAPGQTGKIADYNYKLPDDFTGCVIAWNSNNLDSKVGGNYNYLYRLFRKSNLKPFERDISTEIYQAGSTPCNGVEGFNCYFPLQSYGFQPTNGVGYQPYRVVVLSFELLHAPATVCGPKKSTNLVKNKCVNFNFNGLTGTGVLTESNKKFLPFQQFGRDIADTTDAVRDPQTLEILDITPCSFGGVSVITPGTNTSNQVAVLYQDVNCTEVPVAIHADQLTPTWRVYSTGSNVFQTRAGCLIGAEHVNNSYECDIPIGAGICASYQTQTNSPRRARSVASQSIIAYTMSLGAENSVAYSNNSIAIPTNFTISVTTEILPVSMTKTSVDCTMYICGDSTECSNLLLQYGSFCTQLNRALTGIAVEQDKNTQEVFAQVKQIYKTPPIKDFGGFNFSQILPDPSKPSKRSFIEDLLFNKVTLADAGFIKQYGDCLGDIAARDLICAQKFNGLTVLPPLLTDEMIAQYTSALLAGTITSGWTFCAGAALQIPFAMQMAYRFNGIGVTQNVLYENQKLIANQFNSAIGKIQDSLSFTASALGKLQDVVNQNAQALNTLVKQLSSNFGAISSVLNDILSRLDKVEAEVQIDRLITGRLQSLQTYVTQQLIRAAEIRASANLAATKMSECVCGQSKRVDFCGKGYHLMSFPQSAPHGVVFLHVTYVPAQEKNFTTAPAICHDGKAHFPREGVFVSNGTHWFVTQRNFYEPQIITTDNTFVSGNCDVVIGIVNNTVYDPLQPELDSFKEELDKYFKNHTSPDVDLGDISGINASVVNIQKEIDRLNEVAKNLNESLIDLQELGKYEQYIK

SEQ ID NO: 2170 - protein, 1211 aa, Artificial Sequence; identical to SEQ ID NO: 2150
  SARS-CoV-2/Australia/NSW10/2020__EPI_ISL_413596 spike protein (1-1211)(G889C_L1034C)

SEQ ID NO: 2171 - protein, 1211 aa, Artificial Sequence
  SARS-CoV-2/Switzerland/1000477797/2020__EPI_ISL_413023 spike protein (1-1211)(G889C_L1034C)
MFVFLVLLPLVSSQCVNLTTRTQLPPAYTNSFTRGVYYPDKVFRSSVLHSTQDLFLPFFSNVTWFHAIHVSGTNGTKRFDNPVLPFNDGVYFASTEKSNIIRGWIFGTTLDSKTQSLLIVNNATNVVIKVCEFQFCNDPFLGVYYHKNNKSWMESEFRVYSSANNCTFEYVSQPFLMDLEGKQGNFKNLREFVFKNIDGYFNIYSKHTPINLVRDLPQGFSALEPLVDLPIGINITRFQTLLALHRSYLTPGDSSSGWTAGAAAYYVGYLQPRTFLLKYNENGTITDAVDCALDPLSETKCTLKSFTVEKGIYQTSNFRVQPTESIVRFPNITNLCPFGEVFNATRFASVYAWNRKRISNCVADYSVLYNSASFSTFKCYGVSPTKLNDLCFTNVYADSFVIRGDEVRQIAPGQTGKIADYNYKLPDDFTGCVIAWNSNNLDSKVGGNYNYLYRLFRKSNLKPFERDISTEIYQAGSTPCNGVEGFNCYFPLQSYGFQPTNGVGYQPYRVVVLSFELLHAPATVCGPKKSTNLVKNKCVNFNFNGLTGTGVLTESNKKFLPFQQFGRDIADTTDAVRDPQTLEILDITPCSFGGVSVITPGTNTSNQVAVLYQGVNCTEVPVAIHADQLTPTWRVYSTGSNVFQTRAGCLIGAEHVNNSYECDIPIGAGICASYQTQTNSPRRARSVASQSIIAYTMSLGAENSVAYSNNSIAIPTNFTISVTTEILPVSMTKTSVDCTMYICGDSTECSNLLLQYGSFCTQLNRALTGIAVEQDKNTQEVFAQVKQIYKTPPIKDFGGFNFSQILPDPSKPSKRSFIEDLLFNKVTLADAGFIKQYGDCLGDIAARDLICAQKFNGLTVLPPLLTDEMIAQYTSALLAGTITSGWTFCAGAALQIPFAMQMAYRFNGIGVTQNVLYENQKLIANQFNSAIGKIQDSLSSTASALGKLQDVVNQNAQALNTLVKQLSSNFGAISSVLNDILSRLDKVEAEVQIDRLITGRLQSLQTYVTQQLIRAAEIRASANLAATKMSECVCGQSKRVDFCGKGYHLMSFPQSAPHGVVFLHVTYVPAQEKNFTTAPAICHDGKAHFPREGVFVSNGTHWFVTQRNFYEPQIITTDNTFVSGNCDVVIGIVNNTVYDPLQPELDSFKEELDKYFKNHTSPDVDLGDISGINASVVNIQKEIDRLNEVAKNLNESLIDLQELGKYEQYIK

SEQ ID NO: 2172 - protein, 1211 aa, Artificial Sequence
  SARS-CoV-2/Belgium/BA-02291/2020__EPI_ISL_415159 spike protein (1-1211)(G889C_L1034C)
MFVFLVLLPLVSSQCVNLTTRTQLPPAYTNSFTRGVYYPDKVFRSSVLHSTQDLFLPFFSNVTWFHAIHVSGTNGTKRFDNPVLPFNDGVYFASTEKSNIIRGWIFGTTLDSKTQSLLIVNNATNVVIKVCEFQFCNDPFLGVYYHKNNKSWMESEFRVYSSANNCTFEYVSQPFLMDLEGKQGNFKNLREFVFKNIDGYFKIYSKHTPINLVRDLPQGFSALEPLVDLPIGINITRFQTLLALHRSYLTPGDSSSGWTAGAAAYYVGYLQPRTFLLKYNENGTITDAVDCALDPLSETKCTLKSFTVEKGIYQTSNFRVQPTESIVRFPNITNLCPFGEVFNATRFASVYAWNRKRISNCVADYSVLYNSASFSTFKCYGVSPTKLNDLCFTNVYADSFVIRGDEVRQIAPGQTGKIADYNYKLPDDFTGCVIAWNSNNLDSKVGGNYNYLYRLFRRSNLKPFERDISTEIYQAGSTPCNGVEGFNCYFPLQSYGFQPTNGVGYQPYRVVVLSFELLPAPATVCGPKKSTNLVKNKCVNFNFNGLTGTGVLTESNKKFLPFQQFGRDIADTTDAVRDPQTLEILDITPCSFGGVSVITPGTNTSNQVAVLYQGVNCTEVPVAIHADQLTPTWRVYSTGSNVFQTRAGCLIGAEHVNNSYECDIPIGAGICASYQTQTNSPRRARSVASQSIIAYTMSLGAENSVAYSNNSIAIPTNFTISVTTEILPVSMTKTSVDCTMYICGDSTECSNLLLQYGSFCTQLNRALTGIAVEQDKNTQEVFAQVKQIYKTPPIKDFGGFNFSQILPDPSKPSKRSFIEDLLFNKVTLADAGFIKQYGDCLGDIAARDLICAQKFNGLTVLPPLLTDEMIAQYTSALLAGTITSGWTFCAGAALQIPFAMQMAYRFNGIGVTQNVLYENQKLIANQFNSAIGKIQDSLSSAAPALGKLQDVVNQNAQALNTLVKQLSSNFGAISSVLNDILSRLDKVEAEVQIDRLITGRLQSLQTYVTQQLIRAAEIRASANLAATKMSECVCGQSKRVDFCGKGYHLMSFPQSAPHGVVFLHVTYVPAQEKNFTTAPAICHDGKAHFPREGVFVSNGTHWFVTQRNFYEPQIITTDNTFVSGNCDVVIGIVNNTVYDPLQPELDSFKEELDKYFKNHTSPDVDLGDISGINASVVNIQKEIDRLNEVAKNLNESLIDLQELGKYEQYIK

SEQ ID NO: 2173 - protein, 1211 aa, Artificial Sequence
  SARS-CoV-2/USA/WA8-UW5/2020__EPI_ISL_413486 spike protein (1-1211)(G889C_L1034C)
MFVFLVLLPLVSSQCVNLTTRTQLPPAYTNSFTRGVYYPDKVFRSSVLHSTQDLFLPFFSNVTWFHAIHVSGTNGTKRFDNPVLPFNDGVYFASTEKSNIIRGWIFGTTLDSKTQSLLIVNNATNVVIKVCEFQFCNDPFLGVYYHKNNKSWMESEFRVYSSANNCTFEYVSQPFLMDLEGKQGNFKNLREFVFKNIDGYFKIYSKHTPINLVRDLPQGFSALEPLVDLPIGINITRFQTLLALHRSYLTPGDSSSGWTAGAAAYYVGYLQPRTFLLKYNENGTITDAVDCALDPLSETKCTLKSFTVEKGIYQTSNFRVQPTESIVRFPNITNLCPFGEVFNATRFASVYAWNRKRISNCVADYSVLYNSASFSTFKCYGVSPTKLNDLCFTNVYADSFVIRGDEVRQIAPGQTGKIADYNYKLPDDFTGCVIAWNSNNLDSKVGGNYNYLYRLFRKSNLKPFERDISTEIYQAGSTPCNGVEGFNCYFPLQSYGFQPTNGVGYQPYRVVVLSFELLHAPATVCGPKKSTNLVKNKCVNFNFNGLTGTGVLTESNKKFLPFQQFGRDIADTTDAVRDPQTLEILDITPCSFGGVSVITPGTNTSNQVAVLYQDVNCTEVPVAIHADQLTPTWRVYSTGSNVFQTRAGCLIGAEYVNNSYECDIPIGAGICASYQTQTNSPRRARSVASQSIIAYTMSLGAENSVAYSNNSIAIPTNFTISVTTEILPVSMTKTSVDCTMYICGDSTECSNLLLQYGSFCTQLNRALTGIAVEQDKNTQEVFAQVKQIYKTPPIKDFGGFNFSQILPDPSKPSKRSFIEDLLFNKVTLADAGFIKQYGDCLGDIAARDLICAQKFNGLTVLPPLLTDEMIAQYTSALLAGTITSGWTFCAGAALQIPFAMQMAYRFNGIGVTQNVLYENQKLIANQFNSAIGKIQDSLSSTASALGKLQDVVNQNAQALNTLVKQLSSNFGAISSVLNDILSRLDKVEAEVQIDRLITGRLQSLQTYVTQQLIRAAEIRASANLAATKMSECVCGQSKRVDFCGKGYHLMSFPQSAPHGVVFLHVTYVPAQEKNFTTAPAICHDGKAHFPREGVFVSNGTHWFVTQRNFYEPQIITTDNTFVSGNCDVVIGIVNNTVYDPLQPELDSFKEELDKYFKNHTSPDVDLGDISGINASVVNIQKEIDRLNEVAKNLNESLIDLQELGKYEQYIK

SEQ ID NO: 2174 - protein, 1211 aa, Artificial Sequence
  SARS-CoV-2/England/20102000506/2020__EPI_ISL_415147 spike protein (1-1211)(G889C_L1034C)
MFVFLVLLPLVSSQCVNLTTRTQLPPAYTNSFTRGVYYPDKVFRSSVLHSTQDLFLPFFSNVTWFHAIHVSGTNGTKRFDNPVLPFNDGVYFASTEKSNIIRGWIFGTTLDSKTQSLLIVNNATNVVIKVCEFQFCNDPFLGVYYHKNNKSWMESEFRVYSSANNCTFEYVSQPFLMDLEGKQGNFKNLREFVFKNIDGYFKIYSKHTPINLVRDLPQGFSALEPLVDLPIGINITRFQTLLALHRSYLTPGDSSSGWTAGAAAYYVGYLQPRTFLLKYNENGTITDAVDCALDPLSETKCTLKSFTVEKGIYQTSNFRVQPTESIVRFPNITNLCPFGEVFNATRFASVYAWNRKRISNCVADYSVLYNSASFSTFKCYGVSPTKLNDLCFTNVYADSFVIRGDEVRQIAPGQTGKIADYNYKLPDDFTGCVIAWNSNNLDSKVGGNYNYLYRLFRKSNLKPFERDISTEIYQAGSTPCNGVEGFNCYFPLQSYGFQPTNGVGYQPYRVVVLSFELLHAPATVCGPKKSTNLVKNKCVNFNFNGLTGTGVLTESNKKFLPFQQFGRDIADTTDAVRDPQTLEILDITPCSFGGVSVITPGTNTSNQVAVLYQGVNCTEVPVAIHADQLTPTWRVYSTGSNVFQTRAGCLIGAEHVNNSYECDIPIGAGICASYQTQTNSPRRARSVASQSIIAYTMSLGAENSVAYSNNSIAIPTNFTISVTTEILPVSMTKTSVDCTMYICGDSTECSNLLLQYGSFCTQLNRALTGIAVEQDKNTQEVFAQVKQIYKTPPIKDFGGFNFSQILPDPSKPSKRSFIEDLLFNKVTLADAGFIKQYGYCLGDIAARDLICAQKFNGLTVLPPLLTDEMIAQYTSALLAGTITSGWTFCAGAALQIPFAMQMAYRFNGIGVTQNVLYENQKLIANQFNSAIGKIQDSLSSTASALGKLQDVVNQNAQALNTLVKQLSSNFGAISSVLNDILSRLDKVEAEVQIDRLITGRLQSLQTYVTQQLIRAAEIRASANLAATKMSECVCGQSKRVDFCGKGYHLMSFPQSAPHGVVFLHVTYVPAQEKNFTTAPAICHDGKAHFPREGVFVSNGTHWFVTQRNFYEPQIITTDNTFVSGNCDVVIGIVNNTVYDPLQPELDSFKEELDKYFKNHTSPDVDLGDISGINASVVNIQKEIDRLNEVAKNLNESLIDLQELGKYEQYIK

SEQ ID NO: 2175 - protein, 1211 aa, Artificial Sequence
  SARS-CoV-2/Belgium/VAG-03013/2020__EPI_ISL_415155 spike protein (1-1211)(G889C_L1034C)
MFVFLVLLPLVSSQCVNLTTRTQLPPAYTNSFTRGVYYPDKVFRSSVLHSTQDLFLPFFSNVTWFHAIHVSGTNGTKRFDNPVLPFNDGVYFASTEKSNIIRGWIFGTTLDSKTQSLLIVNNATNVVIKVCEFQFCNDPFLGVYYHKNNKSWMESEFRVYSSANNCTFEYVSQPFLMDLEGKQGNFKNLREFVFKNIDGYFKIYSKHTPINLVRDLPQGFSALEPLVDLPIGINITRFQTLLALHRSYLTPGDSSSGWTAGAAAYYVGYLQPRTFLLKYNENGTITDAVDCALDPLSETKCTLKSFTVEKGIYQTSNFRVQPTESIVRFPNITNLCPFGEVFNATRFASVYAWNRKRISNCVADYSVLYNSASFSTFKCYGVSPTKLNDLCFTNVYADSFVIRGDEVRQIAPGQTGKIADYNYKLPDDFTGCVIAWNSNNLDSKVGGNYNYLYRLFRKSNLKPFERDISTEIYQAGSTPCNGVEGFNCYFPLQSYGFQPTNGVGYQPYRVVVLSFELLHAPATVCGPKKSTNLVKNKCVNFNFNGLTGTGVLTESNKKFLPFQQFGRDIADTTDAVRDPQTLEILDITPCSFGGVSVITPGTNTSNQVAVLYQGVNCTEVPVAIHADQLTPTWRVYSTGSNVFQTRAGCLIGAEHVNNSYECDIPIGAGICASYQTQTNSPRRARSVASQSIIAYTMSLGAENSVAYSNNSIAIPTNFTISVTTEILPVSMTKTSVDCTMYICGDSTECSNLLLQYGSFCTQLNRALTGIAVEQDKNTQEVFAQVKQIYKTPPIKDFGGFNFSQILPDPSKPSKRSFIEDLLFNKVTLADAGFIKQYGDCLGDIAARDLICAQKFNGLTVLPPLLTDEMIAQYTSALLAGTITSGWTFCAGAALQIPFAMQMAYRFNGIGVTQNVLYENQKLIANQFNSAIGKIQDSLSSTATALGKLQDVVNQNAQALNTLVKQLSSNFGAISSVLNDILSRLDKVEAEVQIDRLITGRLQSLQTYVTQQLIRAAEIRASANLAATKMSECVCGQSKRVDFCGKGYHLMSFPQSAPHGVVFLHVTYVPAQEKNFTTAPAICHDGKAHFPREGVFVSNGTHWFVTQRNFYEPQIITTDNTFVSGNCDVVIGIVNNTVYDPLQPELDSFKEELDKYFKNHTSPDVDLGDISGINASVVNIQKEIDRLNEVAKNLNESLIDLQELGKYEQYIK

SEQ ID NO: 2176 - protein, 1211 aa, Artificial Sequence
  SARS-CoV-2/Belgium/BC-03016/2020__EPI_ISL_415157 spike protein (1-1211)(G889C_L1034C)
MFVFLVLLPLVSSQCVNLTTRTQLPPAYTNSFTRGVYYPDKVFRSSVLHSTQDLFLPFFSNVTWFHAIHVSGTNGTKRFDNPVLPFNDGVYFASTEKSNIIRGWIFGTTLDSKTQSLLIVNNATNVVIKVCEFQFCNDPFLGVYYHKNNKSWMESEFRVYSSANNCTFEYVSQPFLMDLEGKQGNFKNLREFVFKNIDGYFKIYSKHTPINLVRDLPQGFSALEPLVDLPIGINITRFQTLLALHRSYLTPGDSSSGWTAGAAAYYVGYLQPRTFLLKYNENGTITDAVDCALDPLSETKCTLKSFTVEKGIYQTSNFRVQPTESIVRFPNITNLCPFGEVFNATRFASVYAWNRKRISNCVADYSVLYNSASFSTFKCYGVSPTKLNDLCFTNVYADSFVIRGDEVRQIAPGQTGKIADYNYKLPDDFTGCVIAWNSNNLDSKVGGNYNYLYRLFRKSNLKPFERDISTEIYQAGSTPCNGVEGFNCYFPLQSYGFQPTNGVGYQPYRVVVLSFELLHAPATVCGPKKSTNLVKNKCVNFNFNGLTGTGVLTESNKKFLPFQQFGRDIADTTDAVRDPQTLEILDITPCSFGGVSVITPGTNTSNQVAVLYQGVNCTEVPVAIHADQLTPTWRVYSTGSNVFQTRAGCLIGAEHVNNSYECDIPIGAGICASYQTQTNSPRRARSVASQSIIAYTMSLGAENSVAYSNNSIAIPTNFTISVTTEILPVSMTKTSVDCTMYICGDSTECSNLLLQYGSFCTQLNRALTGIAVEQDKNTQEVFAQVKQIYKTPPIKDFGGFNFSQILPDPSKPSKRSFIEDLLFNKVTLADAGFIKQYGDCLGDIAARDLICAQKFNGLTVLPPLLTDEMIAQYTSALLAGTITSGWTFCAGAALQIPFAMQMAYRFNGIGVTQNVLYENQKLIANQFNSAIGKIQDSLSSTAPALGKLQDVVNQNAQALNTLVKQLSSNFGAISSVLNDILSRLDKVEAEVQIDRLITGRLQSLQTYVTQQLIRAAEIRASANLAATKMSECVCGQSKRVDFCGKGYHLMSFPQSAPHGVVFLHVTYVPAQEKNFTTAPAICHDGKAHFPREGVFVSNGTHWFVTQRNFYEPQIITTDNTFVSGNCDVVIGIVNNTVYDPLQPELDSFKEELDKYFKNHTSPDVDLGDISGINASVVNIQKEIDRLNEVAKNLNESLIDLQELGKYEQYIK

SEQ ID NO: 2177 - protein, 1211 aa, Artificial Sequence
  SARS-CoV-2/Germany/BavPat3/2020__EPI_ISL_414521 spike protein (1-1211)(G889C_L1034C)
MFVFLVLLPLVSSQCVNLTTRTQLPPAYTNSFTRGVYYPDKVFRSSVLHSTQDLFLPFFSNVTWFHAIHVSGTNGTKRFDNPVLPFNDGVYFASTEKSNIIRGWIFGTTLDSKTQSLLIVNNATNVVIKVCEFQFCNDPFLGVYYHKNNKSWMESEFRVYSSANNCTFEYVSQPFLMDLEGKQGNFKNLREFVFKNIDGYFKIYSKHTPINLVRDLPQGFSALEPLVDLPIGINITRFQTLLALHRSYLTPGDSSSGWTAGAAAYYVGYLQPRTFLLKYNENGTITDAVDCALDPLSETKCTLKSFTVEKGIYQTSNFRVQPTESIVRFPNITNLCPFGEVFNATRFASVYAWNRKRISNCVADYSVLYNSASFSTFKCYGVSPTKLNDLCFTNVYADSFVIRGDEVRQIAPGQTGKIADYNYKLPDDFTGCVIAWNSNNLDSKVGGNYNYLYRLFRKSNLKPFERDISTEIYQAGSTPCNGVEGFNCYFPLQSYGFQPTNGVGYQPYRVVVLSFELLHAPATVCGPKKSTNLVKNKCVNFNFNGLTGTGVLTESNKKFLPFQQFGRDIADTTDAVRDPQTLEILDITPCSFGGVSVITPGTNTSNQVAVLYQDVNCTEVPVAIHADQLTPTWRVYSTGSNVFQTRAGCLIGAEHVNNSYECDIPIGAGICASYQTQTNSPRRARSVASQSIIAYTMSLGAENSVAYSNNSIAIPTNFTISVTTEILPVSMTKTSVDCTMYICGDSTECSNLLLQYGSFCTQLNRALTGIAVEQDKNTQQVFAQVKQIYKTPPIKDFGGFNFSQILPDPSKPSKRSFIEDLLFNKVTLADAGFIKQYGDCLGDIAARDLICAQKFNGLTVLPPLLTDEMIAQYTSALLAGTITSGWTFCAGAALQIPFAMQMAYRFNGIGVTQNVLYENQKLIANQFNSAIGKIQDSLSSTASALGKLQDVVNQNAQALNTLVKQLSSNFGAISSVLNDILSRLDKVEAEVQIDRLITGRLQSLQTYVTQQLIRAAEIRASANLAATKMSECVCGQSKRVDFCGKGYHLMSFPQSAPHGVVFLHVTYVPAQEKNFTTAPAICHDGKAHFPREGVFVSNGTHWFVTQRNFYEPQIITTDNTFVSGNCDVVIGIVNNTVYDPLQPELDSFKEELDKYFKNHTSPDVDLGDISGINASVVNIQKEIDRLNEVAKNLNESLIDLQELGKYEQYIK

SEQ ID NO: 2178 - protein, 1211 aa, Artificial Sequence
  SARS-CoV-2/France/HF1805/2020__EPI_ISL_414628 spike protein (1-1211)(G889C_L1034C)
MFVFLVLLPLVSSQCVNLTTRTQLPPAYTNSFTRGVYYPDKVFRSSVLHSTQDLFLPFFSNVTWFHAIHVSGTNGTKRFDNPVLPFNDGVYFASTEKSNIIRGWIFGTTLDSKTQSLLIVNNATNVVIKVCEFQFCNDPFLGVYYHKNNKSWMESEFRVYSSANNCTFEYVSQPFLMDLEGKQGNFKNLREFVFKNIDGYFKIYSKHTPINLVRDLPQGFSALEPLVDLPIGINITRFQTLLALHRSYLTPGDSSSGWTAGAAAYYVGYLQPRTFLLKYNENGTITDAVDCALDPLSETKCTLKSFTVEKGIYQTSNFRVQPTESIVRFPNITNLCPFGEVFNATRFASVYAWNRKRISNCVADYSVLYNSASFSTFKCYGVSPTKLNDLCFTNVYADSFVIRGDEVRQIAPGQTGKIADYNYKLPDDFTGCVIAWNSNNLDSKVGGNYNYLYRLFRKSNLKPFERDISTEIYQAGSTPCNGVEGFNCYFPLQSYGFQPTNGVGYQPYRVVVLSFELLHAPATVCGPKKSTNLVKNKCVNFNFNGLTGTGVLTESNKKFLPFQQFGRDIADTTDAVRDPQTLEILDITPCSFGGVSVITPGTNTSNQVAVLYQGVNCTEVPVAIHADQLTPTWRVYSTGSNVFQTRAGCLIGAEHVNNSYECDIPIGAGICASYQTQTNSPRRARSVASQSIIAYTMSLGAENSVAYSNNSIAIPTNFTISVTTEILPVSMTKTSVDCTMYICGDSTECSNLLLQYGSFCTQLNRALTGIAVEQDKNTQEVFAQVKQIYKTPPIKDFGGFNFSQILPDPSKPSKRSFIEDLLFNKVTLADAGFIKQYGDCLGDIAARDLICAQKFNGLTVLPPLLTDEMIAQYTSALLAGTITSGWTFCAGAALQIPFAMQMAYRFNGIGVTQNVLYENQKLIANQFNSAIGKIQDSLSSTASALGKLQDVVNQNAQALNTLVKQLSSNFGAISSVLNDILSRLDKVEAEVQIDRLITGRLQSLQTYVTQQLIRAAEIRASANLAATKMSECVCGQSKRVDFCGKGYHLMSFPQSAPHGVVFLHVTYVPAQEKNFTTAPAICHDGKAHFPREGVFVSNGTHWFVTQRNFYEPQIITTDNTFVSGNCDVVIGVVNNTVYDPLQPELDSFKEELDKYFKNHTSPDVDLGDISGINASVVNIQKEIDRLNEVAKNLNESLIDLQELGKYEQYIK

SEQ ID NO: 2179 - protein, 1211 aa, Artificial Sequence
  SARS-CoV-2/Netherlands/ZuidHolland_9/2020__EPI_ISL_414445 spike protein (1-1211)(G889C_L1034C)
MFVFLVLLPLVSSQCVNLTTRTQLPPAYTNSFTRGVYYPDKVFRSSVLHSTQDLFLPFFSNVTWFHAIHVSGTNGTKRFDNPVLPFNDGVYFASTEKSNIIRGWIFGTTLDSKTQSLLIVNNATNVVIKVCEFQFCNDPFLGVYYHKNNKSWMESEFRVYSSANNCTFEYVSQPFLMDLEGKQGNFKNLREFVFKNIDGYFKIYSKHTPINLVRDLPQGFSALEPLVDLPIGINITRFQTLLALHRSYLTPGDSSSGWTAGAAAYYVGYLQPRTFLLKYNENGTITDAVDCALDPLSETKCTLKSFTVEKGIYQTSNFRVQPTESIVRFPNITNLCPFGEVFNATRFASVYAWNRKRISNCVADYSVLYNSASFSTFKCYGVSPTKLNDLCFTNVYADSFVIRGDEVRQIAPGQTGKIADYNYKLPDDFTGCVIAWNSNNLDSKVGGNYNYLYRLFRKSNLKPFERDISTEIYQAGSTPCNGVEGFNCYFPLQSYGFQPTNGVGYQPYRVVVLSFELLHAPATVCGPKKSTNLVKNKCVNFNFNGLTGTGVLTESNKKFLPFQQFGRDIADTTDAVRDPQTLEILDITPCSFGGVSVITPGTNTSNQVAVLYQGVNCTEVPVAIHADQLTPTWRVYSTGSNVFQTRAGCLIGAEHVNNSYECDIPIGAGICASYQTQTNSPRRARSVASQSIIAYTMSLGAENSVAYSNNSIAIPTNFTISVTTEILPVSMTKTSVDCTMYICGDSTECSNLLLQYGSFCTQLNRALTGIAVEQDKNTQEVFAQVKQIYKTPPIKDFGGFNFSQILPDPSKPSKRSFIEDLLFNKVTLADAGFIKQYGDCLGDIAARDLICVQKFNGLTVLPPLLTDEMIAQYTSALLAGTITSGWTFCAGAALQIPFAMQMAYRFNGIGVTQNVLYENQKLIANQFNSAIGKIQDSLSSTASALGKLQDVVNQNAQALNTLVKQLSSNFGAISSVLNDILSRLDKVEAEVQIDRLITGRLQSLQTYVTQQLIRAAEIRASANLAATKMSECVCGQSKRVDFCGKGYHLMSFPQSAPHGVVFLHVTYVPAQEKNFTTAPAICHDGKAHFPREGVFVSNGTHWFVTQRNFYEPQIITTDNTFVSGNCDVVIGIVNNTVYDPLQPELDSFKEELDKYFKNHTSPDVDLGDISGINASVVNIQKEIDRLNEVAKNLNESLIDLQELGKYEQYIK

SEQ ID NO: 2180 - protein, 1211 aa, Artificial Sequence
  SARS-CoV-2/Finland/FIN03032020A/2020__EPI_ISL_413602 spike protein (1-1211)(G889C_L1034C)
MFVFLVLLPLVSSQCVNLTTRTQLPPAYTNSFTRGVYYPDKVFRSSVLHSTQDLFLPFFSNVTWFHAIHVSGTNGTKRFDNPVLPFNDGVYFASTEKSNIIRGWIFGTTLDSKTQSLLIVNNATNVVIKVCEFQFCNDPFLGVYYHKNNKSWMESEFRVYSSANNCTFEYVSQPFLMDLEGKQGNFKNLREFVFKNIDGYFKIYSKHTPINLVRDLPQGFSALEPLVDLPIGINITRFQTLLALHRSYLTPGDSSSGWTAGAAAYYVGYLQPRTFLLKYNENGTITDAVDCALDPLSETKCTLKSFTVEKGIYQTSNFRVQPTESIVRFPNITNLCPFGEVFNATRFASVYAWNRKRISNCVADYSVLYNSASFSTFKCYGVSPTKLNDLCFTNVYADSFVIRGDEVRQIAPGQTGKIADYNYKLPDDFTGCVISWNSNNLDSKVGGNYNYLYRLFRKSNLKPFERDISTEIYQAGSTPCNGVEGFNCYFPLQSYGFQPTNGVGYQPYRVVVLSFELLHAPATVCGPKKSTNLVKNKCVNFNFNGLTGTGVLTESNKKFLPFQQFGRDIADTTDAVRDPQTLEILDITPCSFGGVSVITPGTNTSNQVAVLYQGVNCTEVPVAIHADQLTPTWRVYSTGSNVFQTRAGCLIGAEHVNNSYECDIPIGAGICASYQTQTNSPRRARSVASQSIIAYTMSLGAENSVAYSNNSIAIPTNFTISVTTEILPVSMTKTSVDCTMYICGDSTECSNLLLQYGSFCTQLNRALTGIAVEQDKNTQEVFAQVKQIYKTPPIKDFGGFNFSQILPDPSKPSKRSFIEDLLFNKVTLADAGFIKQYGDCLGDIAARDLICAQKFNGLTVLPPLLTDEMIAQYTSALLAGTITSGWTFCAGAALQIPFAMQMAYRFNGIGVTQNVLYENQKLIANQFNSAIGKIQDSLSSTASALGKLQDVVNQNAQALNTLVKQLSSNFGAISSVLNDILSRLDKVEAEVQIDRLITGRLQSLQTYVTQQLIRAAEIRASANLAATKMSECVCGQSKRVDFCGKGYHLMSFPQSAPHGVVFLHVTYVPAQEKNFTTAPAICHDGKAHFPREGVFVSNGTHWFVTQRNFYEPQIITTDNTFVSGNCDVVIGIVNNTVYDPLQPELDSFKEELDKYFKNHTSPDVDLGDISGINASVVNIQKEIDRLNEVAKNLNESLIDLQELGKYEQYIK

SEQ ID NO: 2181 - protein, 1211 aa, Artificial Sequence
  SARS-CoV-2/France/GE1977/2020__EPI_ISL_414632 spike protein (1-1211)(G889C_L1034C)
MFVFLVLLPLVSSQCVNLTTRTQLPPAYTNSFTRGVYYPDKVFRSSVLHSTQDLFLPFFSNVTWFHAIHVSGTNGTKRFDNPVLPFNDGVYFASTEKSNIIRGWIFGTTLDSKTQSLLIVNNATNVVIKVCEFQFCNDPFLGVYYHKNNKSWMESEFRVYSSANNCTFEYVSQPFLMDLEGKQGNFKNLREFVFKNIDGYFKIYSKHTPINLVRDLPQGFSALEPLVDLPIGINITRFQTLLALHRSYLTPGDSSSGWTAGAAAYYVGYLQPRTFLLKYNENGTITDAVDCALDPLSETKCTLKSFTVEKGIYQTSNFRVQPTESIVRFPNITNLCPFGEVFNATRFASVYAWNRKRISNCVADYSVLYNSASFSTFKCYGVSPTKLNDLCFTNVYADSFVIRGDEVRQIAPGQTGKIADYNYKLPDDFTGCVIAWNSNNLDSKVGGNYNYLYRLFRKSNLKPFERDISTEIYQAGSTPCNGVEGFNCYFPLQSYGFQPTNGVGYQPYRVVVLSFELLHAPATVCGPKKSTNLVKNKCVNFNFNGLTGTGVLTESNKKFLPFQQFGRDIADTTDAVRDPQTLEILDITPCSFGGVSVITPGTNTSNQVAVLYQGVNCTEVPVAIHADQLTPTWRVYSTGSNVFQTRAGCLIGAEHVNNSYECDIPIGAGICASYQTQTNSPRRARSVASQSIIAYTMSLGAENSVAYSNNSIAIPTNFTISVTTEILPVSMTKTSVDCTMYICGDSTECSNLLLQYGSFCTQLNRALTGIAVEQDKNTQEVFAQVKQIYKTPPIKDFGGFNFSQILPDPSKPSKRSFIEDLLFNKVTLADAGFIKQYGDCLGDIAARDLICAQKFNGLTVLPPLLTDEMIAQYTSALLAGTITSGWTFCAGAALQIPFAMQMAYRFNGIGVTQNVLYENQKLIANQFNSAIGKIQDSLFSTASALGKLQDVVNQNAQALNTLVKQLSSNFGAISSVLNDILSRLDKVEAEVQIDRLITGRLQSLQTYVTQQLIRAAEIRASANLAATKMSECVCGQSKRVDFCGKGYHLMSFPQSAPHGVVFLHVTYVPAQEKNFTTAPAICHDGKAHFPREGVFVSNGTHWFVTQRNFYEPQIITTDNTFVSGNCDVVIGIVNNTVYDPLQPELDSFKEELDKYFKNHTSPDVDLGDISGINASVVNIQKEIDRLNEVAKNLNESLIDLQELGKYEQYIK

SEQ ID NO: 2182 - protein, 1211 aa, Artificial Sequence
  SARS-CoV-2/Finland/FIN-313/2020__EPI_ISL_414641 spike protein (1-1211)(G889C_L1034C)
MFVFLVLLPLVSSQCVNLTTRTQLPPAYTNSFTRGVYYPDKVFRSSVLHSTQDLFLPFFSNVTWFHAIHVSGTNGTKRFDNPVLPFNDGVYFASTEKSNIIRGWIFGTTLDSKTQSLLIVNNATNVVIKVCEFQFCNDPFLGVYYHKNNKSWMESEFRVYSSANNCTFEYVSQPFLMDLEGKQGNFKNLREFVFKNIDGYFKIYSKHTPINLVRDLPQGFSALEPLVDLPIGINITRFKTLLALHRSYLTPGDSSSGWTAGAAAYYVGYLQPRTFLLKYNENGTITDAVDCALDPLSETKCTLKSFTVEKGIYQTSNFRVQPTESIVRFPNITNLCPFGEVFNATRFASVYAWNRKRISNCVADYSVLYNSASFSTFKCYGVSPTKLNDLCFTNVYADSFVIRGDEVRQIAPGQTGKIADYNYKLPDDFTGCVIAWNSNNLDSKVGGNYNYLYRLFRKSNLKPFERDISTEIYQAGSTPCNGVEGFNCYFPLQSYGFQPTNGVGYQPYRVVVLSFELLHAPATVCGPKKSTNLVKNKCVNFNFNGLTGTGVLTESNKKFLPFQQFGRDIADTTDAVRDPQTLEILDITPCSFGGVSVITPGTNTSNQVAVLYQGVNCTEVPVAIHADQLTPTWRVYSTGSNVFQTRAGCLIGAEHVNNSYECDIPIGAGICASYQTQTNSPRRARSVASQSIIAYTMSLGAENSVAYSNNSIAIPTNFTISVTTEILPVSMTKTSVDCTMYICGDSTECSNLLLQYGSFCTQLNRALTGIAVEQDKNTQEVFAQVKQIYKTPPIKDFGGFNFSQILPDPSKPSKRSFIEDLLFNKVTLADAGFIKQYGDCLGDIAARDLICAQKFNGLTVLPPLLTDEMIAQYTSALLAGTITSGWTFCAGAALQIPFAMQMAYRFNGIGVTQNVLYENQKLIANQFNSAIGKIQDSLSSTASALGKLQDVVNQNAQALNTLVKQLSSNFGAISSVLNDILSRLDKVEAEVQIDRLITGRLQSLQTYVTQQLIRAAEIRASANLAATKMSECVCGQSKRVDFCGKGYHLMSFPQSAPHGVVFLHVTYVPAQEKNFTTAPAICHDGKAHFPREGVFVSNGTHWFVTQRNFYEPQIITTDNTFVSGNCDVVIGIVNNTVYDPLQPELDSFKEELDKYFKNHTSPDVDLGDISGINASVVNIQKEIDRLNEVAKNLNESLIDLQELGKYEQYIK

SEQ ID NO: 2183 - protein, 1211 aa, Artificial Sequence
  SARS-CoV-2/Netherlands/ZuidHolland_2/2020__EPI_ISL_414556 spike protein (1-1211)(G889C_L1034C)
MFVFLVLLPLVSSQCVNLTTRTQLPPAYTNSFTRGVYYPDKVFRSSVLHSTQDLFLPFFSNVTWFHAIHVSGTNGTKRFDNPVLPFNDGVYFASTEKSNIIRGWIFGTTLDSKTQSLLIVNNATNVVIKVCEFQFCNDPFLGVYYHKNNKSWMESEFRVYSSANNCTFEYVSQPFLMDLEGKQGNFKNLREFVFKNIDGYFKIYSKHTPINLVRDLPQGFSALEPLVDLPIGINITRFQTLLALHRSYLTPGDSSSGWTAGAAAYYVGYLQPRTFLLKYNENGTITDAVDCALDPLSETKCTLKSFTVEKGIYQTSNFRVQPTESIVRFPNITNLCPFGEVFNATRFASVYAWNRKRISNCVADYSVLYNSASFSTFKCYGVSPTKLNDLCFTNVYADSFVIRGDEVRQIAPGQTGKIADYNYKLPDDFTGCVIAWNSNNLDSKVGGNYNYLYRLFRKSNLKPFERDISTEIYQAGSTPCNGVEGFNCYFPLQSYGFQPTNGVGYQPYRVVVLSFELLHAPATVCGPKKSTNLVKNKCVNFNFNGLTGTGVLTESNKKFLPFQQFGRDIADTTDAVRDPQTLEILDITPCSFGGVSVITPGTNTSNQVAVLYQGVNCTEVPVAIHADQLTPTWRVYSTGSNVFQTRAGCLIGAEHVNNSYECDIPIGAGICASYQTQTNSPRRARSVASQSIIAYTMSLGAENSVAYSNNSIAIPTNFTISVTTEILPVSMTKTSVDCTMYICGDSTECSNLLLQYGSFCTQLNRALTGIALEQDKNTQEVFAQVKQIYKTPPIKDFGGFNFSQILPDPSKPSKRSFIEDLLFNKVTLADAGFIKQYGDCLGDIAARDLICAQKFNGLTVLPPLLTDEMIAQYTSALLAGTITSGWTFCAGAALQIPFAMQMAYRFNGIGVTQNVLYENQKLIANQFNSAIGKIQDSLSSTASALGKLQDVVNQNAQALNTLVKQLSSNFGAISSVLNDILSRLDKVEAEVQIDRLITGRLQSLQTYVTQQLIRAAEIRASANLAATKMSECVCGQSKRVDFCGKGYHLMSFPQSAPHGVVFLHVTYVPAQEKNFTTAPAICHDGKAHFPREGVFVSNGTHWFVTQRNFYEPQIITTDNTFVSGNCDVVIGIVNNTVYDPLQPELDSFKEELDKYFKNHTSPDVDLGDISGINASVVNIQKEIDRLNEVAKNLNESLIDLQELGKYEQYIK

SEQ ID NO: 2184 - protein, 1211 aa, Artificial Sequence
  SARS-CoV-2/USA/WA-UW31/2020__EPI_ISL_414618 spike protein (1-1211)(G889C_L1034C)
MFVFLVLLPLVSSQCVNLTTRTQLPPAYTNSFTRGVYYPDKVFRSSVLHSTQDLFLPFFSNVTWFHAIHVSGTNGTKRFDNPVLPFNDGVYFASTEKSNIIRGWIFGTTLDSKTQSLLIVNNATNVVIKVCEFQFCNDPFLGVYYHKNNKSWMESEFRVYSSANNCTFEYVSQPFLMDLEGKQGNFKNLREFVFKNIDGYFKIYSKHTPINLVRDLPQGFSALEPLVDLPIGINITRFQTLLALHRSYLTPGDSSSGWTAGAAAYYVGYLQPRTFLLKYNENGTITDAVDCALDPLSETKCTLKSFTVEKGIYQTSNFRVQPTESIVRFPNITNLCPFGEVFNATRFASVYAWNRKRISNCVADYSVLYNSASFSTFKCYGVSPTKLNDLCFTNVYADSFVIRGDEVRQIAPGQTGKIADYNYKLPDDFTGCVIAWNSNNLDSKVGGNYNYLYRLFRKSNLKPFERDISTEIYQAGSTPCNGAEGFNCYFPLQSYGFQPTNGVGYQPYRVVVLSFELLHAPATVCGPKKSTNLVKNKCVNFNFNGLTGTGVLTESNKKFLPFQQFGRDIADTTDAVRDPQTLEILDITPCSFGGVSVITPGTNTSNQVAVLYQDVNCTEVPVAIHADQLTPTWRVYSTGSNVFQTRAGCLIGAEHVNNSYECDIPIGAGICASYQTQTNSPRRARSVASQSIIAYTMSLGAENSVAYSNNSIAIPTNFTISVTTEILPVSMTKTSVDCTMYICGDSTECSNLLLQYGSFCTQLNRALTGIAVEQDKNTQEVFAQVKQIYKTPPIKDFGGFNFSQILPDPSKPSKRSFIEDLLFNKVTLADAGFIKQYGDCLGDIAARDLICAQKFNGLTVLPPLLTDEMIAQYTSALLAGTITSGWTFCAGAALQIPFAMQMAYRFNGIGVTQNVLYENQKLIANQFNSAIGKIQDSLSSTASALGKLQDVVNQNAQALNTLVKQLSSNFGAISSVLNDILSRLDKVEAEVQIDRLITGRLQSLQTYVTQQLIRAAEIRASANLAATKMSECVCGQSKRVDFCGKGYHLMSFPQSAPHGVVFLHVTYVPAQEKNFTTAPAICHDGKAHFPREGVFVSNGTHWFVTQRNFYEPQIITTDNTFVSGNCDVVIGIVNNTVYDPLQPELDSFKEELDKYFKNHTSPDVDLGDISGINASVVNIQKEIDRLNEVAKNLNESLIDLQELGKYEQYIK

SEQ ID NO: 2185 - protein, 1211 aa, Artificial Sequence
  SARS-CoV-2/South Korea/SNU01/2020__EPI_ISL_411929 spike protein (1-1211)(G889C_L1034C)
MFVFLVLLPLVSSQCVNLTTRTQLPPAYTNSFTRGVYYPDKVFRSSVLHSTQDLFLPFFSNVTWFHAIHVSGTNGTKRFDNPVLPFNDGVYFASTEKSNIIRGWIFGTTLDSKTQSLLIVNNATNVVIKVCEFQFCNDPFLGVYYHKNNKSWMESEFRVYSSANNCTFEYVSQPFLMDLEGKQGNFKNLREFVFKNIDGYFKIYSKHTPINLVRDLPQGFWALEPLVDLPIGINITRFQTLLALHRSYLTPGDSSSGWTAGAAAYYVGYLQPRTFLLKYNENGTITDAVDCALDPLSETKCTLKSFTVEKGIYQTSNFRVQPTESIVRFPNITNLCPFGEVFNATRFASVYAWNRKRISNCVADYSVLYNSASFSTFKCYGVSPTKLNDLCFTNVYADSFVIRGDEVRQIAPGQTGKIADYNYKLPDDFTGCVIAWNSNNLDSKVGGNYNYLYRLFRKSNLKPFERDISTEIYQAGSTPCNGVEGFNCYFPLQSYGFQPTNGVGYQPYRVVVLSFELLHAPATVCGPKKSTNLVKNKCVNFNFNGLTGTGVLTESNKKFLPFQQFGRDIADTTDAVRDPQTLEILDITPCSFGGVSVITPGTNTSNQVAVLYQDVNCTEVPVAIHADQLTPTWRVYSTGSNVFQTRAGCLIGAEHVNNSYECDIPIGAGICASYQTQTNSPRRARSVASQSIIAYTMSLGAENSVAYSNNSIAIPTNFTISVTTEILPVSMTKTSVDCTMYICGDSTECSNLLLQYGSFCTQLNRALTGIAVEQDKNTQEVFAQVKQIYKTPPIKDFGGFNFSQILPDPSKPSKRSFIEDLLFNKVTLADAGFIKQYGDCLGDIAARDLICAQKFNGLTVLPPLLTDEMIAQYTSALLAGTITSGWTFCAGAALQIPFAMQMAYRFNGIGVTQNVLYENQKLIANQFNSAIGKIQDSLSSTASALGKLQDVVNQNAQALNTLVKQLSSNFGAISSVLNDILSRLDKVEAEVQIDRLITGRLQSLQTYVTQQLIRAAEIRASANLAATKMSECVCGQSKRVDFCGKGYHLMSFPQSAPHGVVFLHVTYVPAQEKNFTTAPAICHDGKAHFPREGVFVSNGTHWFVTQRNFYEPQIITTDNTFVSGNCDVVIGIVNNTVYDPLQPELDSFKEELDKYFKNHTSPDVDLGDISGINASVVNIQKEIDRLNEVAKNLNESLIDLQELGKYEQYIK

SEQ ID NO: 2186 - protein, 1211 aa, Artificial Sequence
  SARS-CoV-2/China/WF0004/2020__EPI_ISL_413694 spike protein (1-1211)(G889C_L1034C)
MFVFLVLLPLVSSQCVNLTTRTQLPPAYTNSFTRGVYYPDKVFRSSVLHSTQDLFLPFFSNVTWFHAIHVSGTNGTKRFDNPVLPFNDGVYFASTEKSNIIRGWIFGTTLDSKTQSLLIVNNATNVVIKVCEFQFCNDPFLGVYYHKNNKSWTESEFRVYSSANNCTFEYVSQPFLMDLEGKQGNFKNLREFVFKNIDGYFKIYSKHTPINLVRDLPQGFSALEPLVDLPIGINITRFQTLLALHRSYLTPGDSSSGWTAGAAAYYVGYLQPRTFLLKYNENGTITDAVDCALDPLSETKCTLKSFTVEKGIYQTSNFRVQPTESIVRFPNITNLCPFGEVFNATRFASVYAWNRKRISNCVADYSVLYNSASFSTFKCYGVSPTKLNDLCFTNVYADSFVIRGDEVRQIAPGQTGKIADYNYKLPDDFTGCVIAWNSNNLDSKVGGNYNYLYRLFRKSNLKPFERDISTEIYQAGSTPCNGVEGFNCYFPLQSYGFQPTNGVGYQPYRVVVLSFELLHAPATVCGPKKSTNLVKNKCVNFNFNGLTGTGVLTESNKKFLPFQQFGRDIADTTDAVRDPQTLEILDITPCSFGGVSVITPGTNTSNQVAVLYQDVNCTEVPVAIHADQLTPTWRVYSTGSNVFQTRAGCLIGAEHVNNSYECDIPIGAGICASYQTQTNSPRRARSVASQSIIAYTMSLGAENSVAYSNNSIAIPTNFTISVTTEILPVSMTKTSVDCTMYICGDSTECSNLLLQYGSFCTQLNRALTGIAVEQDKNTQEVFAQVKQIYKTPPIKDFGGFNFSQILPDPSKPSKRSFIEDLLFNKVTLADAGFIKQYGDCLGDIAARDLICAQKFNGLTVLPPLLTDEMIAQYTSALLAGTITSGWTFCAGAALQIPFAMQMAYRFNGIGVTQNVLYENQKLIANQFNSAIGKIQDSLSSTASALGKLQDVVNQNAQALNTLVKQLSSNFGAISSVLNDILSRLDKVEAEVQIDRLITGRLQSLQTYVTQQLIRAAEIRASANLAATKMSECVCGQSKRFDFCGKGYHLMSFPQSAPHGVVFLHVTYVPAQEKNFTTAPAICHDGKAHFPREGVFVSNGTHWFVTQRNFYEPQIITTDNTFVSGNCDVVIGIVNNTVYDPLQPELDSFKEELDKYFKNHTSPDVDLGDISGINASVVNIQKEIDRLNEVAKNLNESLIDLQELGKYEQYIK

SEQ ID NO: 2187 - protein, 1211 aa, Artificial Sequence
  SARS-CoV-2/China/WF0028/2020__EPI_ISL_413791 spike protein (1-1211)(G889C_L1034C)
MFVFLVLLPLVSSQCVNLTTRTQLPPAYTNSFTRGVYYPDKVFRSSVLHSTQDLFLPFFSNVTWFHAIHVSGTNGTKRFDNPVLPFNDGVYFASTEKSNIIRGWIFGTTLDSKTQSLLIVNNATNVVIKVCEFQFCNDPFLGVYYHKNNKSWMESEFRVYSSANNCTFEYVSQPFLMDLEGKQGNFKNLREFVFKNIDGYFKIYSKHTPINLVRDLPQGFSALEPLVDLPIGINITRFQTLLALHRSYLTPGDSSSGWTAGAAAYYVGYLQPRTFLLKYNENGTITDAVDCALDPLSETKCTLKSFTVEKGIYQTSNFRVQPTESIVRFPNITNLCPFGEVFNATRFASVYAWNRKRISNCVADYSVLYNSASFSTFKCYGVSPTKLNDLCFTNVYADSFVIRGDEVRQIAPGQTGKIADYNYKLPDDFTGCVIAWNSNNLDSKVGGNYNYLYRLFRKSNLKPFERDISTEIYQAGSTPCNGVEGFNCYFPLQSYGFQPTNGVGYQPYRVVVLSFELLHAPATVCGPKKSTNLVKNKCVNFNFNGLTGTGVLTESNKKFLPFQQFGRDIADTTDAVRDPQTLEILDITPCSFGGVSVITPGTNTSNQVAVLYQDVNCTEVPVAIHADQLTPTWRVYSTGSNVFQTRAGCLIGAEHVNNSYECDIPIGAGICASYQTQTNSPRRARSVASQSIIAYTMSLGAENSVAYSNNSIAIPTNFTISVTTEILPVSMTKTSVDCTMYICGDSTECSNLLLQYGSFCTQLNRALTGIAVEQDKNTQEVFAQVKQIYKTPPIKDFGGFNFSQILPDPSKPSKRSFIEDLLFNKVTLADAGFIKQYGDCLGDIAARDLICAQKFNGLTVLPPLLTDEMIAQYTSALLAGTITSGWTFCAGAALQIPFAMQMAYRFNGIGVTQNVLYENQKLIANQFNSAIGKIQDSLSSTASALGKLQDVVNQNAQALNTLVKQLSSNFGAISSVLNDILSRLDKVEAEVQIDRLITGRLQSLQTYVTQQLIRAAEIRASANLAATKMSECVCGQSKRVDFCGKGYHLMSFPQSAPHGVVFLHVTYVPAQEKNFTTAPAICHDGKAHFPREGVFVSNGTHWFVTQRNFYEPQIITTDNTFVSGNCDVVIGIVNNTVYDPLQPELESFKEELDKYFKNHTSPDVDLGDISGINASVVNIQKEIDRLNEVAKNLNESLIDLQELGKYEQYIK

SEQ ID NO: 2188 - protein, 1211 aa, Artificial Sequence
  SARS-CoV-2/2019-nCoV/USA-CruiseA-18/2020__MT159716.1 spike protein (1-1211)(G889C_L1034C)
MFVFLVLLPLVSSQCVNLTTRTQLPPAYTNSFTRGVYYPDKVFRSSVLHSTQDLFLPFFSNVTWFHAIHVSGTNGTKRFDNPVLPFNDGVYFASTEKSNIIRGWIFGTTLDSKTQSLLIVNNATNVVIKVCEFQFCNDPFLGVYYHKNNKSWMESELRVYSSANNCTFEYVSQPFLMDLEGKQGNFKNLREFVFKNIDGYFKIYSKHTPINLVRDLPQGFSALEPLVDLPIGINITRFQTLLALHRSYLTPGDSSSGWTAGAAAYYVGYLQPRTFLLKYNENGTITDAVDCALDPLSETKCTLKSFTVEKGIYQTSNFRVQPTESIVRFPNITNLCPFGEVFNATRFASVYAWNRKRISNCVADYSVLYNSASFSTFKCYGVSPTKLNDLCFTNVYADSFVIRGDEVRQIAPGQTGKIADYNYKLPDDFTGCVIAWNSNNLDSKVGGNYNYLYRLFRKSNLKPFERDISTEIYQAGSTPCNGVEGFNCYFPLQSYGFQPTNGVGYQPYRVVVLSFELLHAPATVCGPKKSTNLVKNKCVNFNFNGLTGTGVLTESNKKFLPFQQFGRDIADTTDAVRDPQTLEILDITPCSFGGVSVITPGTNTSNQVAVLYQDVNCTEVPVAIHADQLTPTWRVYSTGSNVFQTRAGCLIGAEHVNNSYECDIPIGAGICASYQTQTNSPRRARSVASQSIIAYTMSLGAENSVAYSNNSIAIPTNFTISVTTEILPVSMTKTSVDCTMYICGDSTECSNLLLQYGSFCTQLNRALTGIAVEQDKNTQEVFAQVKQIYKTPPIKDFGGFNFSQILPDPSKPSKRSFIEDLLFNKVTLADAGFIKQYGDCLGDIAARDLICAQKFNGLTVLPPLLTDEMIAQYTSALLAGTITSGWTFCAGAALQIPFAMQMAYRFNGIGVTQNVLYENQKLIANQFNSAIGKIQDSLSSTASALGKLQDVVNQNAQALNTLVKQLSSNFGAISSVLNDILSRLDKVEAEVQIDRLITGRLQSLQTYVTQQLIRAAEIRASANLAATKMSECVCGQSKRVDFCGKGYHLMSFPQSAPHGVVFLHVTYVPAQEKNFTTAPAICHDGKAHFPREGVFVSNGTHWFVTQRNFYEPQIITTDNTFVSGNCDVVIGIVNNTVYDPLQPELDSFKEELDKYFKNHTSPDVDLGDISGINASVVNIQKEIDRLNEVAKNLNESLIDLQELGKYEQYIK

SEQ ID NO: 2189 - protein, 1211 aa, Artificial Sequence
  SARS-CoV-2/SARS-CoV-2/Yunnan-01/human/2020/CHN__MT049951.1 spike protein (1-1211)(G889C_L1034C)
MFVFLVLLPLVSSQCVNLTTRTQLPPANTNSFTRGVYYPDKVFRSSVLHSTQDLFLPFFSNVTWFHAIHVSGTNGTKRFDNPVLPFNDGVYFASTEKSNIIRGWIFGTTLDSKTQSLLIVNNATNVVIKVCEFQFCNDPFLGVYYHKNNKSWMESEFRVYSSANNCTFEYVSQPFLMDLEGKQGNFKNLREFVFKNIDGYFKIYSKHTPINLVRDLPQGFSALEPLVDLPIGINITRFQTLLALHRSYLTPGDSSSGWTAGAAAYYVGYLQPRTFLLKYNENGTITDAVDCALDPLSETKCTLKSFTVEKGIYQTSNFRVQPTESIVRFPNITNLCPFGEVFNATRFASVYAWNRKRISNCVADYSVLYNSASFSTFKCYGVSPTKLNDLCFTNVYADSFVIRGDEVRQIAPGQTGKIADYNYKLPDDFTGCVIAWNSNNLDSKVGGNYNYLYRLFRKSNLKPFERDISTEIYQAGSTPCNGVEGFNCYFPLQSYGFQPTNGVGYQPYRVVVLSFELLHAPATVCGPKKSTNLVKNKCVNFNFNGLTGTGVLTESNKKFLPFQQFGRDIADTTDAVRDPQTLEILDITPCSFGGVSVITPGTNTSNQVAVLYQDVNCTEVPVAIHADQLTPTWRVYSTGSNVFQTRAGCLIGAEHVNNSYECDIPIGAGICASYQTQTNSPRRARSVASQSIIAYTMSLGAENSVAYSNNSIAIPTNFTISVTTEILPVSMTKTSVDCTMYICGDSTECSNLLLQYGSFCTQLNRALTGIAVEQDKNTQEVFAQVKQIYKTPPIKDFGGFNFSQILPDPSKPSKRSFIEDLLFNKVTLADAGFIKQYGDCLGDIAARDLICAQKFNGLTVLPPLLTDEMIAQYTSALLAGTITSGWTFCAGAALQIPFAMQMAYRFNGIGVTQNVLYENQKLIANQFNSAIGKIQDSLSSTASALGKLQDVVNQNAQALNTLVKQLSSNFGAISSVLNDILSRLDKVEAEVQIDRLITGRLQSLQTYVTQQLIRAAEIRASANLAATKMSECVCGQSKRVDFCGKGYHLMSFPQSAPHGVVFLHVTYVPAQEKNFTTAPAICHDGKAHFPREGVFVSNGTHWFVTQRNFYEPQIITTDNTFVSGNCDVVIGIVNNTVYDPLQPELDSFKEELDKYFKNHTSPDVDLGDISGINASVVNIQKEIDRLNEVAKNLNESLIDLQELGKYEQYIK

SEQ ID NO: 2190 - protein, 1211 aa, Artificial Sequence
  SARS-CoV-2/USA/WA-UW292/2020__EPI_ISL_418077 spike protein (1-1211)(G889C_L1034C)
MFVFLVLLPLVSSQCVNLTTRTQLPPAYTNSFTRGVYYPDKVFRSSVLHSTQDLFLPFFSNVTWFHAIHVSGTNGTKRFDNPVLPFNDGVYFASTEKSNIIRGWIFGTTLDSKTQSLLIVNNATNVVIKVCEFQFCNDPFLGVYYHKNNKSWMESEFRVYSSANNCTFEYVSQPFLMDLEGKQGNFKNLREFVFKNIDGYFKIYSKHTPINLVRDLPQGFSALEPLVDLPIGINITRFQTLLALHRSYLTPGDSSSGWTAGAAAYYVGYLQPRTFLLKYNENGTITDAVDCALDPLSETKCTLKSFTVEKGIYQTSNFRVQPTESIVRFPNITNLCPFGEVFNATRFASVYAWNRKRISNCVADYSVLYNSASFSTFKCYGVSPTKLNDLCFTNVYADSFVIRGDEVRQIAPGQTGKIADYNYKLPDDFTGCVIAWNSNNLDSKVGGNYNYLYRLFRKSNLKPFERDISTEIYQASSTPCNGVEGFNCYFPLQSYGFQPTNGVGYQPYRVVVLSFELLHAPATVCGPKKSTNLVKNKCVNFNFNGLTGTGVLTESNKKFLPFQQFGRDIADTTDAVRDPQTLEILDITPCSFGGVSVITPGTNTSNQVAVLYQDVNCTEVPVAIHADQLTPTWRVYSTGSNVFQTRAGCLIGAEHVNNSYECDIPIGAGICASYQTQTNSPRRARSVASQSIIAYTMSLGAENSVAYSNNSIAIPTNFTISVTTEILPVSMTKTSVDCTMYICGDSTECSNLLLQYGSFCTQLNRALTGIAVEQDKNTQEVFAQVKQIYKTPPIKDFGGFNFSQILPDPSKPSKRSFIEDLLFNKVTLADAGFIKQYGDCLGDIAARDLICAQKFNGLTVLPPLLTDEMIAQYTSALLAGTITSGWTFCAGAALQIPFAMQMAYRFNGIGVTQNVLYENQKLIANQFNSAIGKIQDSLSSTASALGKLQDVVNQNAQALNTLVKQLSSNFGAISSVLNDILSRLDKVEAEVQIDRLITGRLQSLQTYVTQQLIRAAEIRASANLAATKMSECVCGQSKRVDFCGKGYHLMSFPQSAPHGVVFLHVTYVPAQEKNFTTAPAICHDGKAHFPREGVFVSNGTHWFVTQRNFYEPQIITTDNTFVSGNCDVVIGIVNNTVYDPLQPELDSFKEELDKYFKNHTSPDVDLGDISGINASVVNIQKEIDRLNEVAKNLNESLIDLQELGKYEQYIK

SEQ ID NO: 2191 - protein, 1211 aa, Artificial Sequence
  SARS-CoV-2/Iceland/192/2020__EPI_ISL_417819 spike protein (1-1211)(G889C_L1034C)
MFVFFVLLPLVSSQCVNLTTRTQLPPAYTNSFTRGVYYPDKVFRSSVLHSTQDLFLPFFSNVTWFHAIHVSGTNGTKRFDNPVLPFNDGVYFASTEKSNIIRGWIFGTTLDSKTQSLLIVNNATNVVIKVCEFQFCNDPFLGVYYHKNNKSWMESEFRVYSSANNCTFEYVSQPFLMDLEGKQGNFKNLREFVFKNIDGYFKIYSKHTPINLVRDLPQGFSALEPLVDLPIGINITRFQTLLALHRSYLTPGDSSSGWTAGAAAYYVGYLQPRTFLLKYNENGTITDAVDCALDPLSETKCTLKSFTVEKGIYQTSNFRVQPTESIVRFPNITNLCPFGEVFNATRFASVYAWNRKRISNCVADYSVLYNSASFSTFKCYGVSPTKLNDLCFTNVYADSFVIRGDEVRQIAPGQTGKIADYNYKLPDDFTGCVIAWNSNNLDSKVGGNYNYLYRLFRKSNLKPFERDISTEIYQAGSTPCNGVEGFNCYFPLQSYGFQPTNGVGYQPYRVVVLSFELLHAPATVCGPKKSTNLVKNKCVNFNFNGLTGTGVLTESNKKFLPFQQFGRDIADTTDAVRDPQTLEILDITPCSFGGVSVITPGTNTSNQVAVLYQGVNCTEVPVAIHADQLTPTWRVYSTGSNVFQTRAGCLIGAEHVNNSYECDIPIGAGICASYQTQTNSPRRARSVASQSIIAYTMSLGAENSVAYSNNSIAIPTNFTISVTTEILPVSMTKTSVDCTMYICGDSTECSNLLLQYGSFCTQLNRALTGIAVEQDKNTQEVFAQVKQIYKTPPIKDFGGFNFSQILPDPSKPSKRSFIEDLLFNKVTLADAGFIKQYGDCLGDIAARDLICAQKFNGLTVLPPLLTDEMIAQYTSALLAGTITSGWTFCAGAALQIPFAMQMAYRFNGIGVTQNVLYENQKLIANQFNSAIGKIQDSLSSTASALGKLQDVVNQNAQALNTLVKQLSSNFGAISSVLNDILSRLDKVEAEVQIDRLITGRLQSLQTYVTQQLIRAAEIRASANLAATKMSECVCGQSKRVDFCGKGYHLMSFPQSAPHGVVFLHVTYVPAQEKNFTTAPAICHDGKAHFPREGVFVSNGTHWFVTQRNFYEPQIITTDNTFVSGNCDVVIGIVNNTVYDPLQPELDSFKEELDKYFKNHTSPDVDLGDISGINASVVNIQKEIDRLNEVAKNLNESLIDLQELGKYEQYIK

SEQ ID NO: 2192 - protein, 1211 aa, Artificial Sequence
  SARS-CoV-2/Belgium/ULG-6939/2020__EPI_ISL_417020 spike protein (1-1211)(G889C_L1034C)
MFVFLVLLPLVSSQCVNLTTRTQLPPAYTNSFTRGVYYPDKVFRSSVLHSTQDLFLPFFSNVTWFHAIHVSGTNGTKRFDNPVLPFNDGVYFASTEKSNIIRGWIFGTTLDSKTQSLLIVNNATNVVIKVCEFQFCNDPFLGVYYHKNNKSWMESEFRVYSSANNCTFEYVSQPFLMDLEGKQGNFKNLREFVFKNIDGYFKIYSKHTPINLVRDLPQGFSALEPLVDLPIGINITRFQTLLALHRSYLTPGDSSSGWTAGAAAYYVGYLQPRTFLLKYNENGTITDAVDCALDPLSETKCTLKSFTVEKGIYQTSNFRVQPTESIVRFPNITNLCPFGEVFNATRFASVYAWNRKRISNCVADYSVLYNSASFSTFKCYGVSPTKLNDLCFTNVYADSFVIRGDEVRQIAPGQTGKIADYNYKLPDDFTGCVIAWNSNNLDSKVGGNYNYLYRLFRKSNLKPFERDISTEIYQAGSTPCNGVEGFNCYFPLQSYGFQPTNGVGYQPYRVVVLSFELLHAPATVCGPKKSTNLVKNKCVNFNFNGLTGTGVLTESNKKFLPFQQFGRDIADTTDAVRDPQTLEILDITPCSFGGVSVITPGTNTSNQVAVLYQGVNCTEVPVAIHADQLTPTWRVYSTGSNVFQTRAGCLIGAEHVNNSYECDIPIGAGICASYQTQTNSPRRARSVASQSIIAYTMSLGAENSVVYSNNSIAIPTNFTISVTTEILPVSMTKTSVDCTMYICGDSTECSNLLLQYGSFCTQLNRALTGIAVEQDKNTQEVFAQVKQIYKTPPIKDFGGFNFSQILPDPSKPSKRSFIEDLLFNKVTLADAGFIKQYGDCLGDIAARDLICAQKFNGLTVLPPLLTDEMIAQYTSALLAGTITSGWTFCAGAALQIPFAMQMAYRFNGIGVTQNVLYENQKLIANQFNSAIGKIQDSLSSTASALGKLQDVVNQNAQALNTLVKQLSSNFGAISSVLNDILSRLDKVEAEVQIDRLITGRLQSLQTYVTQQLIRAAEIRASANLAATKMSECVCGQSKRVDFCGKGYHLMSFPQSAPHGVVFLHVTYVPAQEKNFTTAPAICHDGKAHFPREGVFVSNGTHWFVTQRNFYEPQIITTDNTFVSGNCDVVIGIVNNTVYDPLQPELDSFKEELDKYFKNHTSPDVDLGDISGINASVVNIQKEIDRLNEVAKNLNESLIDLQELGKYEQYIK

SEQ ID NO: 2193 - protein, 1211 aa, Artificial Sequence
  SARS-CoV-2/France/HF2496/2020__EPI_ISL_418231 spike protein (1-1211)(G889C_L1034C)
MFVFLVLLPLVSSQCVNLTTRTQLPPAYTNSFTRGVYYPDKVFRSSVLHSTQDLFLPFFSNVTWFHAIHVSGTNGTKRFDNPVLPFNDGVYFASTEKSNIIRGWIFGTTLDSKTQSLLIVNNATNVVIKVCEFQFCNDPFLGVYYHKNNKSWMESEFRVYSSANNCTFEYVSQPFLMDLEGKQGNFKNLREFVFKNIDGYFKIYSKHTPINLVRDLPQGFSALEPLVDLPIGINITRFQTLLALHRSYLTPGDSSSGWTAGAAAYYVGYLQPRTFLLKYNENGTITDAVDCALDPLSETKCTLKSFTVEKGIYQTSNFRVQPTESIVRFPNITNLCPFGEVFNATRFASVYAWNRKRISNCVADYSVLYNSASFSTFKCYGVSPTKLNDLCFTNVYADSFVIRGDEVRQIAPGQTGKIADYNYKLPDDFTGCVIAWNSNNLDSKVGGNYNYLYRLFRKSNLKPFERDISTEIYQAGSTPCNGVEGFNCYFPLQSYGFQPTNGVGYQPYRVVVLSFELLHAPATVCGPKKSTNLVKNKCVNFNFNGLTGTGVLTESNKKFLPFQQFGRDIADTTDAVRDPQTLEILDITPCSFGGVSVITPGTNTSNQVAVLYQGVNCTEVPVAIHADQLTPTWRVYSTGSNVFQTRAGCLIGAEHVNNSYECDIPIGAGICASYQTQTNSPRRARSVASQSIIAYTMSLGAENSVAYSNNSIAIPTNFTISVTTEILPVSMTKTSVDCTMYICGDSTECSNLLLQYGSFCTQLNRALTGIAVEQDKNTQEVFAQVKQIYKTPPIKDFGGFNFSQILPDPSKPSKRSFIEDLLFNKVTLADAGFIKQYGDCLGDIVARDLICAQKFNGLTVLPPLLTDEMIAQYTSALLAGTITSGWTFCAGAALQIPFAMQMAYRFNGIGVTQNVLYENQKLIANQFNSAIGKIQDSLSSTASALGKLQDVVNQNAQALNTLVKQLSSNFGAISSVLNDILSRLDKVEAEVQIDRLITGRLQSLQTYVTQQLIRAAEIRASANLAATKMSECVCGQSKRVDFCGKGYHLMSFPQSAPHGVVFLHVTYVPAQEKNFTTAPAICHDGKAHFPREGVFVSNGTHWFVTQRNFYEPQIITTDNTFVSGNCDVVIGIVNNTVYDPLQPELDSFKEELDKYFKNHTSPDVDLGDISGINASVVNIQKEIDRLNEVAKNLNESLIDLQELGKYEQYIK

SEQ ID NO: 2194 - protein, 1211 aa, Artificial Sequence
  SARS-CoV-2/USA/WA-UW291/2020__EPI_ISL_418076 spike protein (1-1211)(G889C_L1034C)
MFVFLVLLPLVSSQCVNLTTRTQLPPAYTNSFTRGVYYPDKVFRSSVLHSTQDLFLPFFSNVTWFHAIHVSGTNGTKRFDNPVLPFNDGVYFASTEKSNIIRGWIFGTTLDSKTQSLLIVNNATNVVIKVCEFQFCNDPFLGVYYHKNNKSWMESEFRVYSSANNCTFEYVSQPFLMDLEGKQGNFKNLREFVFKNIDGYFKIYSKHTPINLVRDLPQGFSALEPLVDLPIGINITRFQTLLALHRSYLTPGDSSSGWTAGAAAYYVGYLQPRTFLLKYNENGTITDAVDCALDPLSETKCTLKSFTVEKGIYQTSNFRVQPTESIVRFPNITNLCPFGEVFNATRFASVYAWNRKRISNCVADYSVLYNSASFSTFKCYGVSPTKLNDLCFTNVYADSFVIRGDEVRQIAPGQTGKIADYNYKLPDDFTGCVIAWNSNNLDSKVGGNYNYLYRLFRKSNLKPFERDISTEIYQAGSTPCNGVEGFNCYFPLQSYGFQPTNGVGYQPYRVVVLSFELLHAPATVCGPKKSTNLVKNKCVNFNFNGLTGTGVLTESNKKFLPFQQFGRDIADTTDAVRDPQTLEILDITPCSFGGVSVITPGTNTSNQVAVLYQGVNCTEVPVAIHADQLTPTWRVYSTGSNVFQTRAGCLIGAEHVNNSYECDIPIGAGICASYQTQTNSPRRARSVASQSIIAYTMSLGAENSVAYSNNSIAIPTNFTISVTTEILPVSMTKTSVDCTMYICGDSTECSNLLLQYGSFCTQLNRALTGIAVEQDKNTQEVFAQVKQIYKTPPIKDFGGFNFSQILPDPSKPSKRSFIEDLLFNKVTLADAGFIKQYGDCLGDIAARDLICAQKFNGLTVLPPLLTDEMIAQYTSALLAGTITSGWTFCAGAALQIPFAMQMAYRFNGIGVTQNVLYENQKLIANQFNSAIGKIQYSLSSTASALGKLQDVVNQNAQALNTLVKQLSSNFGAISSVLNDILSRLDKVEAEVQIDRLITGRLQSLQTYVTQQLIRAAEIRASANLAATKMSECVCGQSKRVDFCGKGYHLMSFPQSAPHGVVFLHVTYVPAQEKNFTTAPAICHDGKAHFPREGVFVSNGTHWFVTQRNFYEPQIITTDNTFVSGNCDVVIGIVNNTVYDPLQPELDSFKEELDKYFKNHTSPDVDLGDISGINASVVNIQKEIDRLNEVAKNLNESLIDLQELGKYEQYIK

SEQ ID NO: 2195 - protein, 1211 aa, Artificial Sequence; identical to SEQ ID NO: 2158
  SARS-CoV-2/Portugal/PT0034/2020__EPI_ISL_418019 spike protein (1-1211)(G889C_L1034C)

SEQ ID NO: 2196 - protein, 1211 aa, Artificial Sequence
  SARS-CoV-2/Iceland/202/2020__EPI_ISL_417750 spike protein (1-1211)(G889C_L1034C)
MFVFLVLLPLVSSQCVNLTTRTQLPPAYTNSFTRGVYYPDKVFRSSVLHSTQDLFLPFFSNVTWFHAIHVSGTNGTKRFDNPVLPFNDGVYFASTEKSNIIRGWIFGTTLDSKTQSLLIVNNATNVVIKVCEFQFCNDPFLGVYYHKNNKSWMESEFRVYSSANNCTFEYVSQPFLMDLEGKQGNFKNLREFVFKNIDGYFKIYSKHTPINLVRDLPQGFSALEPLVDLPIGINITRFQTLLALHRSYLTPGDSSSGWTAGAAAYYVGYLQPRTFLLKYNENGTITDAVDCALDPLSETKCTLKSFTVEKGIYQTSNFRVQPTESIVRFPNITNLCPFGEVFNATRFASVYAWNRKRISNCVADYSVLYNSASFSTFKCYGVSPTKLNDLCFTNVYADSFVIRGDEVRQIAPGQTGKIADYNYKLPDDFTGCVIAWNSNNLDSKVGGNYNYLYRLFRKSNLKPFERDISTEIYQAGSTPCNGVEGFNCYFPLQSYGFQPTNGVGYQPYRVVVLSFELLHAPATVCGPKKSTNLVKNKCVNFNFNGLTGTGVLTESNKKFLPFQQFGRDIADTTDAVRDPQTLEILDITPCSFGGVSVITPGTNTSNQVAVLYQDVNCTEVPVAIHADQLTPTWRVYSTGSNVFQTRAGCLIGAEHVNNSYECDIPIGAGICASYQTQTNSPRRARSVASQSIIAYTMSLGAENSVAYSNNSIAIPTNFTISVTTEILPVSMTKTSVDCTMYICGDSTECSNLLLQYGSFCTQLNRALTGIAVEQDKNTQEVFAQVKQIYKTPPIKDFGGFNFSQILPDPSKPSKRSFIEDLLFNKVTLADAGFIKQYGDCLGDIAARDLICAQKFNGLTVLPPLLTDEMIAQYTSALLAGTITSGWTFCAGAALQIPFAMQMAYRFNGIGVTQNVLYENQKLIANQFNSAIGKIQDSLSSTASALGKLQDVVNQNAQALNTLVKQLSSNFGAISSVLNDILSRLDKVEAEVQIDRLITGRLQSLQTYVTQQLIRAAEIRASANLAATKMSECVCGQSKRVDFCGKGYHLMSFPQSAPHGVVFLHVTYVPAQEKNFTTAPAICHDGKAHFPREGVFVSNGTHWFVTQRNFYEPQIITTDNTFVSGNCDVVIGIVNNTVYDPLQPELDSFKEELDKYFKNHTSPDVDLGDIPGINASVVNIQKEIDRLNEVAKNLNESLIDLQELGKYEQYIK

SEQ ID NO: 2197 - protein, 1211 aa, Artificial Sequence
  SARS-CoV-2/USA/WA-UW261/2020__EPI_ISL_418046 spike protein (1-1211)(G889C_L1034C)
MFVFLVLLPLVSSQCVNLTTRTQLPPAYTNSFTRGVYYPDKVFRSSVLHSTQDLFLPFFSNVTWFHAIHVSGTNGTKRFDNPVLPFNDGVYFASTEKSNIIRGWIFGTTLDSKTQSLLIVNNATNVVIKVCEFQFCNDPFLGVYYHKNNKSWMESEFRVYSSANNCTFEYVSQPFLMDLEGKQGNFKNLREFVFKNIDGYFKIYSKHTPINLVRDLPQGFSALEPLVDLPIGINITRFQTLLALHRSYLTPGDSSSGWTAGAAAYYVGYLQPRTFLLKYNENGTITDAVDCALDPLSETKCTLKSFTVEKGIYQTSNFRVQPTESIVRFPNITNLCPFGEVFNATRFTSVYAWNRKRISNCVADYSVLYNSASFSTFKCYGVSPTKLNDLCFTNVYADSFVIRGDEVRQIAPGQTGKIADYNYKLPDDFTGCVIAWNSNNLDSKVGGNYNYLYRLFRKSNLKPFERDISTEIYQAGSTPCNGVEGFNCYFPLQSYGFQPTNGVGYQPYRVVVLSFELLHAPATVCGPKKSTNLVKNKCVNFNFNGLTGTGVLTESNKKFLPFQQFGRDIADTTDAVRDPQTLEILDITPCSFGGVSVITPGTNTSNQVAVLYQDVNCTEVPVAIHADQLTPTWRVYSTGSNVFQTRAGCLIGAEHVNNSYECDIPIGAGICASYQTQTNSPRRARSVASQSIIAYTMSLGAENSVAYSNNSIAIPTNFTISVTTEILPVSMTKTSVDCTMYICGDSTECSNLLLQYGSFCTQLNRALTGIAVEQDKNTQEVFAQVKQIYKTPPIKDFGGFNFSQILPDPSKPSKRSFIEDLLFNKVTLADAGFIKQYGDCLGDIAARDLICAQKFNGLTVLPPLLTDEMIAQYTSALLAGTITSGWTFCAGAALQIPFAMQMAYRFNGIGVTQNVLYENQKLIANQFNSAIGKIQDSLSSTASALGKLQDVVNQNAQALNTLVKQLSSNFGAISSVLNDILSRLDKVEAEVQIDRLITGRLQSLQTYVTQQLIRAAEIRASANLAATKMSECVCGQSKRVDFCGKGYHLMSFPQSAPHGVVFLHVTYVPAQEKNFTTAPAICHDGKAHFPREGVFVSNGTHWFVTQRNFYEPQIITTDNTFVSGNCDVVIGIVNNTVYDPLQPELDSFKEELDKYFKNHTSPDVDLGDISGINASVVNIQKEIDRLNEVAKNLNESLIDLQELGKYEQYIK

SEQ ID NO: 2198 - protein, 1211 aa, Artificial Sequence
  SARS-CoV-2/Portugal/PT0035/2020__EPI_ISL_418020 spike protein (1-1211)(G889C_L1034C)
MFVFLVLLPLVSSQCVNLTTRTQLPPAYTNSFTRGVYYPDKVFRSSVLHSTQDLFLPFFSNVTWFHAIHVSGTNGTKRFDNPVLPFNDGVYFASTEKSNIIRGWIFGTTLDSKTQSLLIVNNATNVVIKVCEFQFCNDPFLGVYYHKNNKSWMESEFRVYSSANNCTFEYVSQPFLMDLEGKQGNFKNLREFVFKNIDGYFKIYSKHTPINLVRDLPQGFSALEPLVDLPIGINITRFQTLLALHRSYLTPGDSSSGWTAGAAAYYVGYLQPRTFLLKYNENGTITDAVDCALDPLSETKCTLKSFTVEKGIYQTSNFRVQPTESIVRFPNITNLCPFGEVFNATRFASVYAWNRKRISNCVADYSVLYNSASFSTFKCYGVSPTKLNDLCFTNVYADSFVIRGDEVRQIAPGQTGKIADYNYKLPDDFTGCVIAWNSNNLDSKVGGNYNYLYRLFRKSNLKPFERDISTEIYQAGSTPCNGVEGFNCYFPLQSYGFQPTNGVGYQPYRVVVLSFELLHAPATVCGPKKSTNLVKNKCVNFNFNGLTGTGVLTESNKKFLPFQQFGRDIADTTDAVRDPQTLEILDITPCSFGGVSVITPGTNTSNQVAVLYQDVNCTEVPVAIHADQLTPTWRVYSTGSNVFQTRAGCLIGAEHVNNSYECDIPIGAGICASYQTQTNSPRRARSVASQSIIAYTMSLGAENSVAYSNNSIAIPTNFTISVTTEILPVSMTKTSVDCTMYICGDSTECSNLLLQYGSFCTQLNRALTGIAVEQDKNTQEVFAQVKQIYKTPPIKDFGGFNFSQILPDPSKPSKRSFIEDLLFNKVTLADAGFIKQYGDCLGDISARDLICAQKFNGLTVLPPLLTDEMIAQYTSALLAGTITSGWTFCAGAALQIPFAMQMAYRFNGIGVTQNVLYENQKLIANQFNSAIGKIQDSLSSTASALGKLQDVVNQNAQALNTLVKQLSSNFGAISSVLNDILSRLDKVEAEVQIDRLITGRLQSLQTYVTQQLIRAAEIRASANLAATKMSECVCGQSKRVDFCGKGYHLMSFPQSAPHGVVFLHVTYVPAQEKNFTTAPAICHDGKAHFPREGVFVSNGTHWFVTQRNFYEPQIITTDNTFVSGNCDVVIGIVNNTVYDPLQPELDSFKEELDKYFKNHTSPDVDLGDISGINASVVNIQKEIDRLNEVAKNLNESLIDLQELGKYEQYIK

SEQ ID NO: 2199 - protein, 1211 aa, Artificial Sequence
  SARS-CoV-2/USA/NY-NYUMC7/2020__EPI_ISL_418192 spike protein (1-1211)(G889C_L1034C)
MFVFLVLLPLVSSQCVNLTTRTQLPPAYTNSFTRGVYYPDKVFRSSVLHSTQDLFLPFFSNVTWFHAIHVSGTNGTKRFDNPVLPFNDGVYFASTEKSNIIRGWIFGTTLDSKTQSLLIVNNATNVVIKVCEFQFCNDPFLGVYHHKNNKSWMESEFRVYSSANNCTFEYVSQPFLMDLEGKQGNFKNLREFVFKNIDGYFKIYSKHTPINLVRDLPQGFSALEPLVDLPIGINITRFQTLLALHRSYLTPGDSSSGWTAGAAAYYVGYLQPRTFLLKYNENGTITDAVDCALDPLSETKCTLKSFTVEKGIYQTSNFRVQPTESIVRFPNITNLCPFGEVFNATRFASVYAWNRKRISNCVADYSVLYNSASFSTFKCYGVSPTKLNDLCFTNVYADSFVIRGDEVRQIAPGQTGKIADYNYKLPDDFTGCVIAWNSNNLDSKVGGNYNYLYRLFRKSNLKPFERDISTEIYQAGSTPCNGVEGFNCYFPLQSYGFQPTNGVGYQPYRVVVLSFELLHAPATVCGPKKSTNLVKNKCVNFNFNGLTGTGVLTESNKKFLPFQQFGRDIADTTDAVRDPQTLEILDITPCSFGGVSVITPGTNTSNQVAVLYQGVNCTEVPVAIHADQLTPTWRVYSTGSNVFQTRAGCLIGAEHVNNSYECDIPIGAGICASYQTQTNSPRRARSVASQSIIAYTMSLGAENSVAYSNNSIAIPTNFTISVTTEILPVSMTKTSVDCTMYICGDSTECSNLLLQYGSFCTQLNRALTGIAVEQDKNTQEVFAQVKQIYKTPPIKDFGGFNFSQILPDPSKPSKRSFIEDLLFNKVTLADAGFIKQYGDCLGDIAARDLICAQKFNGLTVLPPLLTDEMIAQYTSALLAGTITSGWTFCAGAALQIPFAMQMAYRFNGIGVTQNVLYENQKLIANQFNSAIGKIQDSLSSTASALGKLQDVVNQNAQALNTLVKQLSSNFGAISSVLNDILSRLDKVEAEVQIDRLITGRLQSLQTYVTQQLIRAAEIRASANLAATKMSECVCGQSKRVDFCGKGYHLMSFPQSAPHGVVFLHVTYVPAQEKNFTTAPAICHDGKAHFPREGVFVSNGTHWFVTQRNFYEPQIITTDNTFVSGNCDVVIGIVNNTVYDPLQPELDSFKEELDKYFKNHTSPDVDLGDISGINASVVNIQKEIDRLNEVAKNLNESLIDLQELGKYEQYIK

SEQ ID NO: 2200 - protein, 1211 aa, Artificial Sequence
  SARS-CoV-2/Iceland/189/2020__EPI_ISL_417709 spike protein (1-1211)(G889C_L1034C)
MFVFLVLLPLVSSQCVNLTTRTQLPPAYTNSFTRGVYYPDKVFRSSVLHSTQDLFLPFFSNVTWFHAIHVSGTNGTKRFDNPVLPFNDGVYFASTEKSNIIRGWIFGTTLDSKTQSLLIVNNATNVVIKVCEFQFCNDPFLGVYYHKNNKSWMESEFRVYSSANNCTFEYVSQPFLMDLEGKQGNFKNLREFVFKNIDGYFKIYSKHTPINLVRDLPQGFSALEPLVDLPIGINITRFQTLLALHRSYLTPGDSSSGWTAGAAAYYVGYLQPRTFLLKYNENGTITDAVDCALDPLSETKCTLKSFTVEKGIYQTSNFRVQPTESIVRFPNITNLCPFGEVFNATRFASVYAWNRKRISNCVADYSVLYNSASFSTFKCYGVSPTKLNDLCFTNVYADSFVIRGDEVRQIAPGQTGKIADYNYKLPDDFTGCVIAWNSNNLDSKVGGNYNYLYRLFRKSNLKPFERDISTEIYQAGSTPCNGVEGFNCYFPLQSYGFQPTNGVGYQPYRVVVLSFELLHAPATVCGPKKSTNLVKNKCVNFNFNGLTGTGVLTESNKKFLPFQQFGRDIADTTDAVRDPQTLEILDITPCSFGGVSVITPGTNTSNQVAVLYQGVNCTEVPVAIHADQLTPTWRVYSTGSNVFQTRAGCLIGAEHVNNSYECDIPIGAGICASYQTQTNSPRRARSVASQSIIAYTMSLGAENSVAYSNNSIAIPTNFTISVTTEILPVSMTKTSVDCTMYICGDSTECSNLLLQYGSFCTQLNRALTGIAVEQDKNTQEVFAQVKQIYKTPPIKDFGGFNFSQILPDPSKPSKRSFIEDLLFNKVTLADAGFTKQYGDCLGDIAARDLICAQKFNGLTVLPPLLTDEMIAQYTSALLAGTITSGWTFCAGAALQIPFAMQMAYRFNGIGVTQNVLYENQKLIANQFNSAIGKIQDSLSSTASALGKLQDVVNQNAQALNTLVKQLSSNFGAISSVLNDILSRLDKVEAEVQIDRLITGRLQSLQTYVTQQLIRAAEIRASANLAATKMSECVCGQSKRVDFCGKGYHLMSFPQSAPHGVVFLHVTYVPAQEKNFTTAPAICHDGKAHFPREGVFVSNGTHWFVTQRNFYEPQIITTDNTFVSGNCDVVIGIVNNTVYDPLQPELDSFKEELDKYFKNHTSPDVDLGDISGINASVVNIQKEIDRLNEVAKNLNESLIDLQELGKYEQYIK

SEQ ID NO: 2201 - protein, 1211 aa, Artificial Sequence
  SARS-CoV-2/Australia/NSW56/2020__EPI_ISL_417408 spike protein (1-1211)(G889C_L1034C)
MFVFLVLLPLVSSQCVNLTTRTQLPPAYTNSFTRGVYYPDKVFRSSVLHSTQDLFLPFFSNVTWFHAIHVSGTNGTKRFDNPVLPFNDGVYFASTEKSNIIRGWIFGTTLDSKTQSLLIVNNATNVVIKVCEFQFCNDPFLGVYYHKNNKSWMESEFRVYSSANNCTFEYVSQPFLMDLEGKQGNFKNLREFVFKNIDGYFKIYSKHTPINLVRDLPQGFSALEPLVDLPIGINITRFQTLLALHRSYLTPGDSSSGWTAGAAAYYVGYLQPRTFLLKYNENGTITDAVDCALDPLSETKCTLKSFTVEKGIYQTSNFRVQPTESIVRFPNITNLCPFGEVFNATRFASVYAWNRKRISNCVADYSVLYNSASFSTFKCYGVSPTKLNDLCFTNVYADSFVIRGDEVRQIAPGQTGKIADYNYKLPDDFTGCVIAWNSNNLDSKVGGNYNYLYRLFRKSNLKPFERDISTEIYQAGSTPCNGVEGFNCYFPLQSYGFQPTNGVGYQPYRVVVLSFELLHAPATVCGPKKSTNLVKNKCVNFNFNGLTGTGVLTESNKKFLPFQQFGRDIADTTDAVRDPQTLEILDITPCSFGGVSVITPGTNTSNQVAVLYQDVNCTEVPVAIHADQLTPTWRVYSTGSNVFQTRAGCLIGAEHVNNSYECDIPIGAGICASYQTQTNSPRRARSVASQSIIAYTMSLGAENSVAYSNNSIAIPTNFTISVTTEILPVSMTKTSVDCTMYICGDSTECSNLLLQYGSFCTQLNRALTGIAVEQDKNTQEVFAQVKQIYKTPPIKDFGGFNFSQILPDSSKPSKRSFIEDLLFNKVTLADAGFIKQYGDCLGDIAARDLICAQKFNGLTVLPPLLTDEMIAQYTSALLAGTITSGWTFCAGAALQIPFAMQMAYRFNGIGVTQNVLYENQKLIANQFNSAIGKIQDSLSSTASALGKLQDVVNQNAQALNTLVKQLSSNFGAISSVLNDILSRLDKVEAEVQIDRLITGRLQSLQTYVTQQLIRAAEIRASANLAATKMSECVCGQSKRVDFCGKGYHLMSFPQSAPHGVVFLHVTYVPAQEKNFTTAPAICHDGKAHFPREGVFVSNGTHWFVTQRNFYEPQIITTDNTFVSGNCDVVIGIVNNTVYDPLQPELDSFKEELDKYFKNHTSPDVDLGDISGINASVVNIQKEIDRLNEVAKNLNESLIDLQELGKYEQYIK

SEQ ID NO: 2202 - protein, 1211 aa, Artificial Sequence
  SARS-CoV-2/Iceland/280/2020__EPI_ISL_417608 spike protein (1-1211)(G889C_L1034C)
MFVFLVLLPLVSSQCVNLTTRTQLPPAYTNSFTRGVYYPDKVFRSSVLHSTQDLFLPFFSNVTWFHAIHVSGTNGTKRFDNPVLPFNDGVYFASTEKSNIIRGWIFGTTLDSKTQSLLIVNNATNVVIKVCEFQFCNDPFLGVYYHKNNKSWMESEFRVYSSANNCTFEYVSQPFLMDLEGKQGNFKNLREFVFKNIDGYFKIYSKHTPINLVRDLPQGFSALEPLVDLPIGINITRFQTLLALHRSYLTPGDSSSGWTAGAAAYYVGYLQPRTFLLKYNENGTITDAVDCALDPLSETKCTLKSFTVEKGIYQTSNFRVQPTESIVRFPNITNLCPFGEVFNATRFASVYAWNRKRISNCVADYSVLYNSASFSTFKCYGVSPTKLNDLCFTNVYADSFVIRGDEVRQIAPGQTGKIADYNYKLPDDFTGCVIAWNSNNLDSKVGGNYNYLYRLFRKSNLKPFERDISTEIYQAGSTPCNGVEGFNCYFPLQSYGFQPTNGVGYQPYRVVVLSFELLHAPATVCGPKKSTNLVKNKCVNFNFNGLTGTGVLTESNKKFLPFQQFGRDIADTTDAVRDPQTLEILDITPCSFGGVSVITPGTNTSNQVAVLYQGVNCTEVPVAIHADQLTPTWRVYSTGSNVFQTRAGCLIGAEHVNNSYECDIPIGAGICASYHTQTNSPRRARSVASQSIIAYTMSLGAENSVAYSNNSIAIPTNFTISVTTEILPVSMTKTSVDCTMYICGDSTECSNLLLQYGSFCTQLNRALTGIAVEQDKNTQEVFAQVKQIYKTPPIKDFGGFNFSQILPDPSKPSKRSFIEDLLFNKVTLADAGFIKQYGDCLGDIAARDLICAQKFNGLTVLPPLLTDEMIAQYTSALLAGTITSGWTFCAGAALQIPFAMQMAYRFNGIGVTQNVLYENQKLIANQFNSAIGKIQDSLSSTASALGKLQDVVNQNAQALNTLVKQLSSNFGAISSVLNDILSRLDKVEAEVQIDRLITGRLQSLQTYVTQQLIRAAEIRASANLAATKMSECVCGQSKRVDFCGKGYHLMSFPQSAPHGVVFLHVTYVPAQEKNFTTAPAICHDGKAHFPREGVFVSNGTHWFVTQRNFYEPQIITTDNTFVSGNCDVVIGIVNNTVYDPLQPELDSFKEELDKYFKNHTSPDVDLGDISGINASVVNIQKEIDRLNEVAKNLNESLIDLQELGKYEQYIK

SEQ ID NO: 2203 - protein, 1211 aa, Artificial Sequence; identical to SEQ ID NO: 2158
  SARS-CoV-2/Iceland/247/2020__EPI_ISL_417575 spike protein (1-1211)(G889C_L1034C)

SEQ ID NO: 2204 - protein, 1211 aa, Artificial Sequence
  SARS-CoV-2/Iceland/238/2020__EPI_ISL_417566 spike protein (1-1211)(G889C_L1034C)
MFVFLVLLPLVSSQCVNLTTRTQLPPAYTNSFTRGVYYPDKVFRSSVLHSTQDLFLPFFSNVTWFHAIHVSGTNGTKRFDNPVLPFNDGVYFASTEKSNIIRGWIFGTTLDSKTQSLLIVNNATNVVIKVCEFQFCNDPFLGVYYHKNNKSWMESEFRVYSSANNCTFEYVSQPFLMDLEGKQGNFKNLREFVFKNIDGYFKIYSKHTPINLVRDLPQGFSALEPLVDLPIGINITRFQTLLALHRSYLTPGDSSSGWTAGAAAYYVGYLQPRTFLLKYNENGTITDAVDCALDPLSETKCTLKSFTVEKGIYQTSNFRVQPTESIVRFPNITNLCPFGEVFNATRFASVYAWNRKRISNCVADYSVLYNSASFSTFKCYGVSPTKLNDLCFTNVYADSFVIRGDEVRQIAPGQTGKIADYNYKLPDDFTGCVIAWNSNNLDSKVGGNYNYLYRLFRKSNLKPFERDISTEIYQAGSTPCNGVEGFNCYFPLQSYGFQPTNGVGYQPYRVVVLSFELLHAPATVCGPKKSTNLVKNKCVNFNFNGLTGTGVLTESNKKFLPFQQFGRDIADTTDAVRDPQTLEILDITPCSFGGVSVITPGTNTSNQVAVLYQGVNCTEVPVAIHADQLTPTWRVYSTGSNVFQTRAGCLIGAEHVNNSYECDIPIGAGICASYQTQTNSPRRARSVASQSIIAYTMSLGAENSVAYSNNSIAIPTNFTISVTTEILPVSMTKTSVDCTMYICGDSTECSNLLLQYGSFCTQLNRALTGIAVEQDKNTQEVFAQVKQIYKTPPIKDFGGFNFSQILPDPSKPSKRSFIEDLLFNKVTLADVGFIKQYGDCLGDIAARDLICAQKFNGLTVLPPLLTDEMIAQYTSALLAGTITSGWTFCAGAALQIPFAMQMAYRFNGIGVTQNVLYENQKLIANQFNSAIGKIQDSLSSTASALGKLQDVVNQNAQALNTLVKQLSSNFGAISSVLNDILSRLDKVEAEVQIDRLITGRLQSLQTYVTQQLIRAAEIRASANLAATKMSECVCGQSKRVDFCGKGYHLMSFPQSAPHGVVFLHVTYVPAQEKNFTTAPAICHDGKAHFPREGVFVSNGTHWFVTQRNFYEPQIITTDNTFVSGNCDVVIGIVNNTVYDPLQPELDSFKEELDKYFKNHTSPDVDLGDISGINASVVNIQKEIDRLNEVAKNLNESLIDLQELGKYEQYIK

SEQ ID NO: 2205 - protein, 1211 aa, Artificial Sequence
  SARS-CoV-2/Greece/16/2020__EPI_ISL_418265 spike protein (1-1211)(G889C_L1034C)
MFVFLVLLPLVSSQCVNLTTRTQLPPAYTNSFTRGVYYPDKVFRSSVLHSTQDLFLPFFSNVTWFHAIHVSGTNGTKRFDNPVLPFNDGVYFASTEKSNIIRGWIFGTTLDSKTQSLLIVNNATNVVIKVCEFQFCNDPFLGVYYHKNNKSWMESEFRVYSSANNCTFEYVSQPFLMDLEGKQGNFKNLREFVFKNVDGYFKIYSKHTPINLVRDLPQGFSALEPLVDLPIGINITRFQTLLALHRSYLTPGDSSSGWTAGAAAYYVGYLQPRTFLLKYNENGTITDAVDCALDPLSETKCTLKSFTVEKGIYQTSNFRVQPTESIVRFPNITNLCPFGEVFNATRFASVYAWNRKRISNCVADYSVLYNSASFSTFKCYGVSPTKLNDLCFTNVYADSFVIRGDEVRQIAPGQTGKIADYNYKLPDDFTGCVIAWNSNNLDSKVGGNYNYLYRLFRKSNLKPFERDISTEIYQAGSTPCNGVEGFNCYFPLQSYGFQPTNGVGYQPYRVVVLSFELLHAPATVCGPKKSTNLVKNKCVNFNFNGLTGTGVLTESNKKFLPFQQFGRDIADTTDAVRDPQTLEILDITPCSFGGVSVITPGTNTSNQVAVLYQDVNCTEVPVAIHADQLTPTWRVYSTGSNVFQTRAGCLIGAEHVNNSYECDIPIGAGICASYQTQTNSPRRARSVASQSIIAYTMSLGAENSVAYSNNSIAIPTNFTISVTTEILPVSMTKTSVDCTMYICGDSTECSNLLLQYGSFCTQLNRALTGIAVEQDKNTQEVFAQVKQIYKTPPIKDFGGFNFSQILPDPSKPSKRSFIEDLLFNKVTLADAGFIKQYGDCLGDIAARDLICAQKFNGLTVLPPLLTDEMIAQYTSALLAGTITSGWTFCAGAALQIPFAMQMAYRFNGIGVTQNVLYENQKLIANQFNSAIGKIQDSLSSTASALGKLQDVVNQNAQALNTLVKQLSSNFGAISSVLNDILSRLDKVEAEVQIDRLITGRLQSLQTYVTQQLIRAAEIRASANLAATKMSECVCGQSKRVDFCGKGYHLMSFPQSAPHGVVFLHVTYVPAQEKNFTTAPAICHDGKAHFPREGVFVSNGTHWFVTQRNFYEPQIITTDNTFVSGNCDVVIGIVNNTVYDPLQPELDSFKEELDKYFKNHTSPDVDLGDISGINASVVNIQKEIDRLNEVAKNLNESLIDLQELGKYEQYIK

SEQ ID NO: 2206 - protein, 1211 aa, Artificial Sequence
  SARS-CoV-2/Iceland/319/2020__EPI_ISL_417648 spike protein (1-1211)(G889C_L1034C)
MFVFLVLLPLVSSQCVNLTTRTQLPPAYTNSFTRGVYYPDKVFRSSVLHSTQDLFLPFFSNVTWFHAIHVSGTNGTKRFDNPVLPFNDGVYFASTEKSNIIRGWIFGTTLDSKTQSLLIVNNATNVVIKVCEFQFCNDPFLGVYYHKNNKSWMESEFRVYSSANNCTFEYVSQPFLIDLEGKQGNFKNLREFVFKNIDGYFKIYSKHTPINLVRDLPQGFSALEPLVDLPIGINITRFQTLLALHRSYLTPGDSSSGWTAGAAAYYVGYLQPRTFLLKYNENGTITDAVDCALDPLSETKCTLKSFTVEKGIYQTSNFRVQPTESIVRFPNITNLCPFGEVFNATRFASVYAWNRKRISNCVADYSVLYNSASFSTFKCYGVSPTKLNDLCFTNVYADSFVIRGDEVRQIAPGQTGKIADYNYKLPDDFTGCVIAWNSNNLDSKVGGNYNYLYRLFRKSNLKPFERDISTEIYQAGSTPCNGVEGFNCYFPLQSYGFQPTNGVGYQPYRVVVLSFELLHAPATVCGPKKSTNLVKNKCVNFNFNGLTGTGVLTESNKKFLPFQQFGRDIADTTDAVRDPQTLEILDITPCSFGGVSVITPGTNTSNQVAVLYQGVNCTEVPVAIHADQLTPTWRVYSTGSNVFQTRAGCLIGAEHVNNSYECDIPIGAGICASYQTQTNSPRRARSVASQSIIAYTMSLGAENSVAYSNNSIAIPTNFTISVTTEILPVSMTKTSVDCTMYICGDSTECSNLLLQYGSFCTQLNRALTGIAVEQDKNTQEVFAQVKQIYKTPPIKDFGGFNFSQILPDPSKPSKRSFIEDLLFNKVTLADAGFIKQYGDCLGDIAARDLICAQKFNGLTVLPPLLTDEMIAQYTSALLAGTITSGWTFCAGAALQIPFAMQMAYRFNGIGVTQNVLYENQKLIANQFNSAIGKIQDSLSSTASALGKLQDVVNQNAQALNTLVKQLSSNFGAISSVLNDILSRLDKVEAEVQIDRLITGRLQSLQTYVTQQLIRAAEIRASANLAATKMSECVCGQSKRVDFCGKGYHLMSFPQSAPHGVVFLHVTYVPAQEKNFTTAPAICHDGKAHFPREGVFVSNGTHWFVTQRNFYEPQIITTDNTFVSGNCDVVIGIVNNTVYDPLQPELDSFKEELDKYFKNHTSPDVDLGDISGINASVVNIQKEIDRLNEVAKNLNESLIDLQELGKYEQYIK

SEQ ID NO: 2207 - protein, 1211 aa, Artificial Sequence
  SARS-CoV-2/Congo/94/2020__EPI_ISL_417947 spike protein (1-1211)(G889C_L1034C)
MFVFLVLLPLVSSQCVNLTTRTQLPPAYTNSFTRGVYYPDKVFRSSVLHSTQDLFLPFFSNVTWFHAIHVSGTNGTKRFDNPVLPFNDGVYFASTEKSNIIRGWIFGTTLDSKTQSLLIVNNATNVVIKVCEFQFCNDPFLGVYYHKNNKSWMESEFRVYSSANNCTFEYVSQPFLMDLEGKQGNFKNLREFVFKNIDGYFKIYSKHTPINLVRDLPQGFSALEPLVDLPIGINITRFQTLLALHRSYLTPGDSSSGWTAGAAAYYVGYLQPRTFLLKYNENGTITDAVDCALDPLSETKCTLKSFTVEKGIYQTSNFRVQPTESIVRFPNITNLCPFGEVFNATRFASVYAWNRKRISNCVADYSVLYNSASFSTFKCYGVSPTKLNDLCFTNVYADSFVIRGDEVRQIAPGQTGKIADYNYKLPDDFTGCVIAWNSNNLDSKVGGNYNYLYRLFRKSNLKPFERDISTEIYQAGSTPCNGVEGFNCYFPLQSYGFQPTNGVGYQPYRVVVLSFELLHAPATVCGPKKSTNLVKNKCVNFNFNGLTGTGVLTESNKKFLPFQQFGRDIADTTDAVRDPQTLEILDITPCSFGGVSVITPGTNTSNQVAVLYQGVNCTEVPVAIHADQLTPTWRVYSTGSNVFQTRAGCLIGAEHVNNSYECDIPIGAGICASYQTQTNSPRRARSVASQSIIAYTMSLGAENSVAYSNNSIAIPTNFTISVTTEILPVSMTKTSVDCTMYICGDSTECSNLLLQYGSFCTQLNRALTGIAVEQDKNTQEVFAQVKQIYKTPPIKDFGGFNFSQILPDPSKPSKRSFIEDILFNKVTLADAGFIKQYGDCLGDIAARDLICAQKFNGLTVLPPLLTDEMIAQYTSALLAGTITSGWTFCAGAALQIPFAMQMAYRFNGIGVTQNVLYENQKLIANQFNSAIGKIQDSLSSTASALGKLQDVVNQNAQALNTLVKQLSSNFGAISSVLNDILSRLDKVEAEVQIDRLITGRLQSLQTYVTQQLIRAAEIRASANLAATKMSECVCGQSKRVDFCGKGYHLMSFPQSAPHGVVFLHVTYVPAQEKNFTTAPAICHDGKAHFPREGVFVSNGTHWFVTQRNFYEPQIITTDNTFVSGNCDVVIGIVNNTVYDPLQPELDSFKEELDKYFKNHTSPDVDLGDISGINASVVNIQKEIDRLNEVAKNLNESLIDLQELGKYEQYIK

SEQ ID NO: 2208 - protein, 1211 aa, Artificial Sequence
  SARS-CoV-2/Congo/158/2020__EPI_ISL_417950 spike protein (1-1211)(G889C_L1034C)
MFVFLVLLPLVSSQCVNLTTRTQLPPAYTNSFTRGVYYPDKVFRSSVLHSTQDLFLPFFSNVTWFHAIHVSGTNGTKRFDNPVLPFNDGVYFASTEKSNIIRGWIFGTTLDSKTQSLLIVNNATNVVIKVCEFQFCNDPFLGVYYHKNNKSWMESEFRVYSSANNCTFEYVSQPFLMDLEGKQGNFKNLREFVFKNIDGYFKIYSKHTPINLVRDLPQGFSALEPLVDLPIGINITRFQTLLALHRSYLTPGDSSSGWTAGAAAYYVGYLQPRTFLLKYNENGTITDAVDCALDPLSETKCTLKSFTVEKGIYQTSNFRVQPTESIVRFPNITNLCPFGEVFNATRFASVYAWNRKRISNCVADYSVLYNSASFSTFKCYGVSPTKLNDLCFTNVYADSFVIRGDEVRQIAPGQTGKIADYNYKLPDDFTGCVIAWNSNNLDSKVGGNYNYLYRLFRKSNLKPFERDISTEIYQAGSTPCNGVEGFNCYFPLQSYGFQPTNGVGYQPYRVVVLSFELLHAPATVCGPKKSTNLVKNKCVNFNFNGLTGTGVLTESNKKFLPFQQFGRDIADTTDAVRDPQTLEILDITPCSFGGVSVITPGTNTSNQVAVLYQDVNCTEVPVAIHADQLTPTWRVYSTGSNVFQTRAGCLIGAEHVNNSYECDIPIGAGICASYQTQTNSPRRARSVASQSIIAYTMSLGAENSVAYSNNSIAIPTNFTISVTTEILPVSMTKTSVDCTMYICGDSTECSNLLLQYGSFCTQLNRALTGIAVEQDKNTQEVFAQVKQIYKTPPIKDFGGFNFSQILPDPSKPSKRSFIEDLLFNKVTLADAGFIKQYGDCLGDIAARDLICAQKFNGLTVLPPLLTDEMIAQYTSALLAGTITSGWTFCAGAALQIPFAMQMAYRFNGIGVTQNVLYENQKLIANQFNSAIGKIQDSLSSTASALGKLQDVVNQNAQALNTLVKQLSSNFGAISSVLNDILSRLDKVEAEVQIDRLITGRLQSLQTYVTQQLIRAAEIRASANLAATKMSECVCGQSKRVDFCGKGYHLMSFPQSAPHGVVFLHVTYVPAQEKNFTTAPAICHDGKAHFPREGVFVSNGTHWFVTQRNFYEPQIITTDNTFLSGNCDVVIGIVNNTVYDPLQPELDSFKEELDKYFKNHTSPDVDLGDISGINASVVNIQKEIDRLNEVAKNLNESLIDLQELGKYEQYIK

SEQ ID NO: 2209 - protein, 1211 aa, Artificial Sequence
  SARS-CoV-2/USA/UT-00034/2020__EPI_ISL_417977 spike protein (1-1211)(G889C_L1034C)
MFVFLVLLPLVSSQCVNLTTRTQLPPAYTNSFTRGVYYPDKVFRSSVLHSTQDLFLPFFSNVTWFHAIHVSGTNGTKRFDNPVLPFNDGVYFASTEKSNIIRGWIFGTTLDSKTQSLLIVNNATNVVIKVCEFQFCNDPFLGVYYYKNNKSWMESEFRVYSSANNCTFEYVSQPFLMDLEGKQGNFKNLREFVFKNIDGYFKIYSKHTPINLVRDLPQGFSALEPLVDLPIGINITRFQTLLALHRSYLTPGDSSSGWTAGAAAYYVGYLQPRTFLLKYNENGTITDAVDCALDPLSETKCTLKSFTVEKGIYQTSNFRVQPTESIVRFPNITNLCPFGEVFNATRFASVYAWNRKRISNCVADYSVLYNSASFSTFKCYGVSPTKLNDLCFTNVYADSFVIRGDEVRQIAPGQTGKIADYNYKLPDDFTGCVIAWNSNNLDSKVGGNYNYLYRLFRKSNLKPFERDISTEIYQAGSTPCNGVEGFNCYFPLQSYGFQPTNGVGYQPYRVVVLSFELLHAPATVCGPKKSTNLVKNKCVNFNFNGLTGTGVLTESNKKFLPFQQFGRDIADTTDAVRDPQTLEILDITPCSFGGVSVITPGTNTSNQVAVLYQGVNCTEVPVAIHADQLTPTWRVYSTGSNVFQTRAGCLIGAEHVNNSYECDIPIGAGICASYQTQTNSPRRARSVASQSIIAYTMSLGAENSVAYSNNSIAIPTNFTISVTTEILPVSMTKTSVDCTMYICGDSTECSNLLLQYGSFCTQLNRALTGIAVEQDKNTQEVFAQVKQIYKTPPIKDFGGFNFSQILPDPSKPSKRSFIEDLLFNKVTLADAGFIKQYGDCLGDIAARDLICAQKFNGLTVLPPLLTDEMIAQYTSALLAGTITSGWTFCAGAALQIPFAMQMAYRFNGIGVTQNVLYENQKLIANQFNSAIGKIQDSLSSTASALGKLQDVVNQNAQALNTLVKQLSSNFGAISSVLNDILSRLDKVEAEVQIDRLITGRLQSLQTYVTQQLIRAAEIRASANLAATKMSECVCGQSKRVDFCGKGYHLMSFPQSAPHGVVFLHVTYVPAQEKNFTTAPAICHDGKAHFPREGVFVSNGTHWFVTQRNFYEPQIITTDNTFVSGNCDVVIGIVNNTVYDPLQPELDSFKEELDKYFKNHTSPDVDLGDISGINASVVNIQKEIDRLNEVAKNLNESLIDLQELGKYEQYIK

SEQ ID NO: 2210 - protein, 1211 aa, Artificial Sequence
  SARS-CoV-2/USA/UT-00033/2020__EPI_ISL_417976 spike protein (1-1211)(G889C_L1034C)
MFVFLVLLPLVSSQCVNLTTRTQLPPAYTNSFTRGVYYPDKVFRSSVLHSTQDLFLPFFSNVTWFHAIHVSGTNGTKRFDNPVLPFNDGVYFASTEKSNIIRGWIFGTTLDSKTQSLLIVNNATNVVIKVCEFQFCNDPFLGVYYHKNNKSWMESEFRVYSSANNCTFEYVSQPFLMDLEGKQGNFKNLREFVFKNIDGYFKIYSKHTPINLVRDLPQGFSALEPLVDLPIGINITRFQTLLALHRSYLTPGDSSSGLTAGAAAYYVGYLQPRTFLLKYNENGTITDAVDCALDPLSETKCTLKSFTVEKGIYQTSNFRVQPTESIVRFPNITNLCPFGEVFNATRFASVYAWNRKRISNCVADYSVLYNSASFSTFKCYGVSPTKLNDLCFTNVYADSFVIRGDEVRQIAPGQTGKIADYNYKLPDDFTGCVIAWNSNNLDSKVGGNYNYLYRLFRKSNLKPFERDISTEIYQAGSTPCNGVEGFNCYFPLQSYGFQPTNGVGYQPYRVVVLSFELLHAPATVCGPKKSTNLVKNKCVNFNFNGLTGTGVLTESNKKFLPFQQFGRDIADTTDAVRDPQTLEILDITPCSFGGVSVITPGTNTSNQVAVLYQGVNCTEVPVAIHADQLTPTWRVYSTGSNVFQTRAGCLIGAEHVNNSYECDIPIGAGICASYQTQTNSPRRARSVASQSIIAYTMSLGAENSVAYSNNSIAIPTNFTISVTTEILPVSMTKTSVDCTMYICGDSTECSNLLLQYGSFCTQLNRALTGIAVEQDKNTQEVFAQVKQIYKTPPIKDFGGFNFSQILPDPSKPSKRSFIEDLLFNKVTLADAGFIKQYGDCLGDIAARDLICAQKFNGLTVLPPLLTDEMIAQYTSALLAGTITSGWTFCAGAALQIPFAMQMAYRFNGIGVTQNVLYENQKLIANQFNSAIGKIQDSLSSTASALGKLQDVVNQNAQALNTLVKQLSSNFGAISSVLNDILSRLDKVEAEVQIDRLITGRLQSLQTYVTQQLIRAAEIRASANLAATKMSECVCGQSKRVDFCGKGYHLMSFPQSAPHGVVFLHVTYVPAQEKNFTTAPAICHDGKAHFPREGVFVSNGTHWFVTQRNFYEPQIITTDNTFVSGNCDVVIGIVNNTVYDPLQPELDSFKEELDKYFKNHTSPDVDLGDISGINASVVNIQKEIDRLNEVAKNLNESLIDLQELGKYEQYIK

SEQ ID NO: 2211 - protein, 1211 aa, Artificial Sequence
  SARS-CoV-2/USA/WI-13/2020__EPI_ISL_417516 spike protein (1-1211)(G889C_L1034C)
MFVFLVLLPLVSSQCVNLTTRTQLPPAYTNSFTRGVYYPDKVFRSSVLHSTQDLFLPFFSNVTWFHAIHVSGTNGTKRFDNPVLPFNDGVYFASTEKSNIIRGWIFGTTLDSKTQSLLIVNNATNVVIKVCEFQFCNDPFLGVYYHKNNKSWMESEFRVYSSANNCTFEYVSQPFLMDLEGKQGNFKNLREFVFKNIDGYFKIYSKHTPINLVRDLPQGFSALEPLVDLPIGINITRFQTLLALHRSYLTPGDSSSGWTAGAAAYYVGYLQPRTFLLKYNENGTITDAVDCALDPLSETKCTLKSFTVEKGIYQTSNFRVLPTESIVRFPNITNLCPFGEVFNATRFASVYAWNRKRISNCVADYSVLYNSASFSTFKCYGVSPTKLNDLCFTNVYADSFVIRGDEVRQIAPGQTGKIADYNYKLPDDFTGCVIAWNSNNLDSKVGGNYNYLYRLFRKSNLKPFERDISTEIYQAGSTPCNGVEGFNCYFPLQSYGFQPTNGVGYQPYRVVVLSFELLHAPATVCGPKKSTNLVKNKCVNFNFNGLTGTGVLTESNKKFLPFQQFGRDIADTTDAVRDPQTLEILDITPCSFGGVSVITPGTNTSNQVAVLYQGVNCTEVPVAIHADQLTPTWRVYSTGSNVFQTRAGCLIGAEHVNNSYECDIPIGAGICASYQTQTNSPRRARSVASQSIIAYTMSLGAENSVAYSNNSIAIPTNFTISVTTEILPVSMTKTSVDCTMYICGDSTECSNLLLQYGSFCTQLNRALTGIAVEQDKNTQEVFAQVKQIYKTPPIKDFGGFNFSQILPDPSKPSKRSFIEDLLFNKVTLADAGFIKQYGDCLGDIAARDLICAQKFNGLTVLPPLLTDEMIAQYTSALLAGTITSGWTFCAGAALQIPFAMQMAYRFNGIGVTQNVLYENQKLIANQFNSAIGKIQDSLSSTASALGKLQDVVNQNAQALNTLVKQLSSNFGAISSVLNDILSRLDKVEAEVQIDRLITGRLQSLQTYVTQQLIRAAEIRASANLAATKMSECVCGQSKRVDFCGKGYHLMSFPQSAPHGVVFLHVTYVPAQEKNFTTAPAICHDGKAHFPREGVFVSNGTHWFVTQRNFYEPQIITTDNTFVSGNCDVVIGIVNNTVYDPLQPELDSFKEELDKYFKNHTSPDVDLGDISGINASVVNIQKEIDRLNEVAKNLNESLIDLQELGKYEQYIK

SEQ ID NO: 2212 - protein, 1210 aa, Artificial Sequence
  SARS-CoV-2/India/1-27/2020__EPI_ISL_413522 spike protein (1-1210)(G888C_L1033C)
MFVFLVLLPLVSSQCVNLTTRTQLPPAYTNSFTRGVYYPDKVFRSSVLHSTQDLFLPFFSNVTWFHAIHVSGTNGTKRFDNPVLPFNDGVYFASTEKSNIIRGWIFGTTLDSKTQSLLIVNNATNVVIKVCEFQFCNDPFLGVYHKNNKSWMESEFRVYSSANNCTFEYVSQPFLMDLEGKQGNFKNLREFVFKNIDGYFKIYSKHTPINLVRDLPQGFSALEPLVDLPIGINITRFQTLLALHRSYLTPGDSSSGWTAGAAAYYVGYLQPRTFLLKYNENGTITDAVDCALDPLSETKCTLKSFTVEKGIYQTSNFRVQPTESIVRFPNITNLCPFGEVFNATRFASVYAWNRKRISNCVADYSVLYNSASFSTFKCYGVSPTKLNDLCFTNVYADSFVIRGDEVIQIAPGQTGKIADYNYKLPDDFTGCVIAWNSNNLDSKVGGNYNYLYRLFRKSNLKPFERDISTEIYQAGSTPCNGVEGFNCYFPLQSYGFQPTNGVGYQPYRVVVLSFELLHAPATVCGPKKSTNLVKNKCVNFNFNGLTGTGVLTESNKKFLPFQQFGRDIADTTDAVRDPQTLEILDITPCSFGGVSVITPGTNTSNQVAVLYQDVNCTEVPVAIHADQLTPTWRVYSTGSNVFQTRAGCLIGAEHVNNSYECDIPIGAGICASYQTQTNSPRRARSVASQSIIAYTMSLGAENSVAYSNNSIAIPTNFTISVTTEILPVSMTKTSVDCTMYICGDSTECSNLLLQYGSFCTQLNRALTGIAVEQDKNTQEVFAQVKQIYKTPPIKDFGGFNFSQILPDPSKPSKRSFIEDLLFNKVTLADAGFIKQYGDCLGDIAARDLICAQKFNGLTVLPPLLTDEMIAQYTSALLAGTITSGWTFCAGAALQIPFAMQMAYRFNGIGVTQNVLYENQKLIANQFNSAIGKIQDSLSSTASALGKLQDVVNQNAQALNTLVKQLSSNFGAISSVLNDILSRLDKVEAEVQIDRLITGRLQSLQTYVTQQLIRAAEIRASANLAATKMSECVCGQSKRVDFCGKGYHLMSFPQSAPHGVVFLHVTYVPAQEKNFTTAPAICHDGKAHFPREGVFVSNGTHWFVTQRNFYEPQIITTDNTFVSGNCDVVIGIVNNTVYDPLQPELDSFKEELDKYFKNHTSPDVDLGDISGINASVVNIQKEIDRLNEVAKNLNESLIDLQELGKYEQYIK

SEQ ID NO: 2213 - protein, 1205 aa, Artificial Sequence
  SARS-CoV-2/pangolin/Guangxi/P4L/2017__EPI_ISL_410538 spike protein (1-1205)(G883C_L1028C)
MFVFLFVLPLVSSQCVNLTTRTGIPPGYTNSSTRGVYYPDKVFRSSILHLTQDLFLPFFSNVTWFNTINYQGGFKKFDNPVLPFNDGVYFASTEKSNIIRGWIFGTTLDARTQSLLIVNNATNVVIKVCEFQFCTDPFLGVYYHNNNKTWVENEFRVYSSANNCTFEYISQPFLMDLEGKQGNFKNLREFVFKNVDGYFKIYSKHTPIDLVRDLPRGFAALEPLVDLPIGINITRFQTLLALHRSYLTPGNLESGWTTGAAAYYVGYLQQRTFLLSYNQNGTITDAVDCSLDPLSETKCTLKSLTVEKGIYQTSNFRVQPTISIVRFPNITNLCPFGEVFNASKFASVYAWNRKRISNCVADYSVLYNSTSFSTFKCYGVSPTKLNDLCFTNVYADSFVVKGDEVRQIAPGQTGVIADYNYKLPDDFTGCVIAWNSVKQDALTGGNYGYLYRLFRKSKLKPFERDISTEIYQAGSTPCNGQVGLNCYYPLERYGFHPTTGVNYQPFRVVVLSFELLNGPATVCGPKLSTTLVKDKCVNFNFNGLTGTGVLTTSKKQFLPFQQFGRDISDTTDAVRDPQTLEILDITPCSFGGVSVITPGTNTSNQVAVLYQDVNCTEVPMAIHAEQLTPAWRVYSAGANVFQTRAGCLVGAEHVNNSYECDIPVGAGICASYHSMSSLRSVNQRSIIAYTMSLGAENSVAYSNNSIAIPTNFTISVTTEILPVSMTKTSVDCTMYICGDSIECSNLLLQYGSFCTQLNRALTGIAVEQDKNTQEVFAQVKQIYKTPPIKDFGGFNFSQILPDPSKPSKRSFIEDLLFNKVTLADAGFIKQYGDCLGDIAARDLICAQKFNGLTVLPPLLTDEMIAQYTSALLAGTITSGWTFCAGAALQIPFAMQMAYRFNGIGVTQNVLYENQKLIANQFNSAIGKIQDSLSSTASALGKLQDVVNQNAQALNTLVKQLSSNFGAISSVLNDILSRLDKVEAEVQIDRLITGRLQSLQTYVTQQLIRAAEIRASANLAATKMSECVCGQSKRVDFCGKGYHLMSFPQSAPHGVVFLHVTYVPAQEKNFTTAPAICHEGKAHFPREGVFVSNGTHWFITQRNFYEPQIITTDNTFVSGSCDVVIGIVNNTVYDPLQPELDSFKEELDKYFKNHTSPDVDLGDISGINASVVNIQKEIDRLNEVAKNLNESPIDLQELGKYEQYIK

SEQ ID NO: 2214 - protein, 1205 aa, Artificial Sequence
  SARS-CoV-2/pangolin/Guangxi/P5L/2017__EPI_ISL_410540 spike protein (1-1205)(G883C_L1028C)
MFVFLFVLPLVSSQCVNLTTRTGIPPGYTNSSTRGVYYPDKVFRSSILHLTQDLFLPFFSNVTWFNTINYQGGFKKFDNPVLPFNDGVYFASTEKSNIIRGWIFGTTLDARTQSLLIVNNATNVVIKVCEFQFCTDPFLGVYYHNNNKTWVENEFRVYSSANNCTFEYISQPFLMDLEGKQGNFKNLREFVFKNVDGYFKIYSKHTPIDLVRDLPRGFAALEPLVDLPIGINITRFQTLLALHRSYLTPGKLESGWTTGAAAYYVGYLQQRTFLLSYNQNGTITDAVDCSLDPLSETKCTLKSLTVEKGIYQTSNFRVQPTISIVRFPNITNLCPFGEVFNASKFASVYAWNRKRISNCVADYSVLYNSTSFSTFKCYGVSPTKLNDLCFTNVYADSFVVKGDEVRQIAPGQTGVIADYNYKLPDDFTGCVIAWNSVKQDALTGGNYGYLYRLFRKSKLKPFERDISTEIYQAGSTPCNGQVGLNCYYPLERYGFHPTTGVNYQPFRVVVLSFELLNGPATVCGPKLSTTLVKDKCVNFNFNGLTGTGVLTTSKKQFLPFQQFGRDISDTTDAVRDPQTLEILDITPCSFGGVSVITPGTNTSNQVAVLYQDVNCTEVPMAIHAEQLTPAWRVYSAGANVFQTRAGCLVGAEHVNNSYECDIPVGAGICASYHSMSSFRSVNQRSIIAYTMSLGAENSVAYSNNSIAIPTNFTISVTTEILPVSMTKTSVDCTMYICGDSIECSNLLLQYGSFCTQLNRALTGIAVEQDKNTQEVFAQVKQIYKTPPIKDFGGFNFSQILPDPSKPSKRSFIEDLLFNKVTLADAGFIKQYGDCLGDIAARDLICAQKFNGLTVLPPLLTDEMIAQYTSALLAGTITSGWTFCAGAALQIPFAMQMAYRFNGIGVTQNVLYENQKLIANQFNSAIGKIQDSLSSTASALGKLQDVVNQNAQALNTLVKQLSSNFGAISSVLNDILSRLDKVEAEVQIDRLITGRLQSLQTYVTQQLIRAAEIRASANLAATKMSECVCGQSKRVDFCGKGYHLMSFPQSAPHGVVFLHVTYVPAQEKNFTTAPAICHEGKAHFPREGVFVSNGTHWFITQRNFYEPQIITTDNTFVSGSCDVVIGIVNNTVYDPLQPELDSFKEELDKYFKNHTSPDVDLGDISGINASVVNIQKEIDRLNEVAKNLNESLIDLQELGKYEQYIK

SEQ ID NO: 2215 - protein, 1205 aa, Artificial Sequence
  SARS-CoV-2/pangolin/Guangxi/P5E/2017__EPI_ISL_410541 spike protein (1-1205)(G883C_L1028C)
MFVFLFVLPLVSSQCVNLTTRTGIPPGYTNSSTRGVYYPDKVFRSSILHLTQDLFLPFFSNVTWFNTITYQGGSKKFDNPVLPFNDGVYFASTEKSNIIRGWIFGTTLDARTQSLLIVNNATNVVIKVCEFQFCTDPFLGVYYHNNNKTWVENEFRVYSSANNCTFEYISQPFLMDLEGKQGNFKNLREFVFKNVDGYFKIYSKHTPIDLVRDLPRGFAALEPLVDLPIGINITRFQTLLALHRSYLTPGKLESGWTTGAAAYYVGYLQQRTFLLSYNQNGTITDAVDCSLDPLSETKCTLKSLTVEKGIYQTSNFRVQPTISIVRFPNITNLCPFGEVFNASKFASVYAWNRKRISNCVADYSVLYNSTSFSTFKCYGVSPTKLNDLCFTNVYADSFVVKGDEVRQIAPGQTGVIADYNYKLPDDFTGCVIAWNSVKQDALTGDNYGYLYRLFRKSKLKPFERDISTEIYQAGSTPCNGQVGLNCYYPLERYGFHPTTGVNYQPFRVVVLSFELLNGPATVCGPKLSTTLVKDKCVNFNFNGLTGTGVLTTSKKQFLPFQQFGRDISDTTDAVRDPQTLEILDITPCSFGGVSVITPGTNTSNQVAVLYQDVNCTEVPMAIHAEQLTPAWRVYSAGANVFQTRAGCLVGAEHVNNSYECDIPVGAGICASYHSMSSFRSVNQRSIIAYTMSLGAENSVAYSNNSIAIPTNFTISVTTEILPVSMTKTSVDCTMYICGDSIECSNLLLQYGSFCTQLNRALTGIAVEQDKNTQEVFAQVKQIYKTPPIKDFGGFNFSQILPDPSKPSKRSFIEDLLFNKVTLADAGFIKQYGDCLGDIAARDLICAQKFNGLTVLPPLLTDEMIAQYTSALLAGTITSGWTFCAGAALQIPFAMQMAYRFNGIGVTQNVLYENQKLIANQFNSAIGKIQDSLSSTASALGKLQDVVNQNAQALNTLVKQLSSNFGAISSVLNDILSRLDKVEAEVQIDRLITGRLQSLQTYVTQQLIRAAEIRASANLAATKMSECVCGQSKRVDFCGKGYHLMSFPQSAPHGVVFLHVTYVPAQEKNFTTAPAICHEGKAHFPREGVFVSNGTHWFITQRNFYEPQIITTDNTFVSGSCDVVIGIVNNTVYDPLQPELDSFKEELDKYFKNHTSPDVDLGDISGINASVVNIQKEIDRLNEVAKNLNESLIDLQELGKYEQYIK

SEQ ID NO: 2216 - protein, 1203 aa, Artificial Sequence
  SARS-CoV-2/pangolin/Guangxi/P1E/2017__EPI_ISL_410539 spike protein (1-1203)(G881C_L1026C)
MFVFLFVLPLVSSQCVNLTTRTGIQPGYTNSSTRGVYYPDKVFRSSILHLTQDLFLPFFSNVTWFNTINYQGGFKKFDNPVLPFNDGVYFASTEKSNIIRGWIFGTTLDARTQSLLIVNNATNVVIKVCEFQFCTDPFLGVYYHNNNKTWVENEFRVYSSANNCTFEYISQPFLMDLEGKQGNFKNLREFVFKNVDGYFKIYSKHTPIDLVRDLPRGFAALEPLVDLPIGINITRFQTLLALHRSYLTPGKLESGWTTGAAAYYVGYLQQRTFLLSYNQNGTITDAVDCSLDPLSETKCTLKSLTVEKGIYQTSNFRVQPTISIVRFPNITNLCPFGEVFNASKFASVYAWNRKRISNCVADYSVLYNSTSFSTFKCYGVSPTKLNDLCFTNVYADSFVVKGDEVRQIAPGQTGVIADYNYKLPDDFTGCVIAWNSVKQDALTGGNYLYRLFRKSKLKPFERDISTEIYQAGSTPCNGQVGLNCYYPLERYGFHPTTGVNYQPFRVVVLSFELLNGPATVCGPKLSTTLVKDKCVNFNFNGLTGTGVLTTSKKQFLPFQQFGRDISDTTDAVRDPQTLEILDITPCSFGGVSVITPGTNTSNQVAVLYQDVNCTEVPMAIHAEQLTPAWRVYSAGANVFQTRAGCLVGAEHVNNSYECDIPVGAGICASYHSMSSLRSVNQRSIIAYTMSLGAENSVAYSNNSIAIPTNFTISVTTEILPVSMTKTSVDCTMYICGDSIECSNLLLQYGSFCTQLNRALTGIAVEQDKNTQEVFAQVKQIYKTPPIKDFGGFNFSQILPDPSKPSKRSFIEDLLFNKVTLADAGFIKQYGDCLGDIAARDLICAQKFNGLTVLPPLLTDEMIAQYTSALLAGTITSGWTFCAGAALQIPFAMQMAYRFNGIGVTQNVLYENQKLIANQFNSAIGKIQDSLSSTASALGKLQDVVNQNAQALNTLVKQLSSNFGAISSVLNDILSRLDKVEAEVQIDRLITGRLQSLQTYVTQQLIRAAEIRASANLAATKMSECVCGQSKRVDFCGKGYHLMSFPQSAPHGVVFLHVTYVPAQEKNFTTAPAICHEGKAHFPREGVFVSNGTHWFITQRNFYEPQIITTDNTFVSGSCDVVIGIVNNTVYDPLQPELDSFKEELDKYFKNHTSPDVDLGDISGINASVVNIQKEIDRLNEVAKNLNESLIDLQELGKYEQYIK

SEQ ID NO: 2217 - protein, 1211 aa, Artificial Sequence
  SARS-CoV-2/Wuhan/WIV05/2019__EPI_ISL_402128 spike protein (1-1211)(I909C_Y1047C)
MFVFLVLLPLVSSQCVNLTTRTQLPPAYTNSFTRGVYYPDKVFRSSVLHSTQDLFLPFFSNVTWFHAIHVSGTNGTKRFDNPVLPFNDGVYFASTEKSNIIRGWIFGTTLDSKTQSLLIVNNATNVVIKVCEFQFCNDPFLGVYYHKNNKSWMESEFRVYSSANNCTFEYVSQPFLMDLEGKQGNFKNLREFVFKNIDGYFKIYSKHTPINLVRDLPQGFSALEPLVDLPIGINITRFQTLLALHRSYLTPGDSSSGWTAGAAAYYVGYLQPRTFLLKYNENGTITDAVDCALDPLSETKCTLKSFTVEKGIYQTSNFRVQPTESIVRFPNITNLCPFGEVFNATRFASVYAWNRKRISNCVADYSVLYNSASFSTFKCYGVSPTKLNDLCFTNVYADSFVIRGDEVRQIAPGQTGKIADYNYKLPDDFTGCVIAWNSNNLDSKVGGNYNYLYRLFRKSNLKPFERDISTEIYQAGSTPCNGVEGFNCYFPLQSYGFQPTNGVGYQPYRVVVLSFELLHAPATVCGPKKSTNLVKNKCVNFNFNGLTGTGVLTESNKKFLPFQQFGRDIADTTDAVRDPQTLEILDITPCSFGGVSVITPGTNTSNQVAVLYQDVNCTEVPVAIHADQLTPTWRVYSTGSNVFQTRAGCLIGAEHVNNSYECDIPIGAGICASYQTQTNSPRRARSVASQSIIAYTMSLGAENSVAYSNNSIAIPTNFTISVTTEILPVSMTKTSVDCTMYICGDSTECSNLLLQYGSFCTQLNRALTGIAVEQDKNTQEVFAQVKQIYKTPPIKDFGGFNFSQILPDPSKPSKRSFIEDLLFNKVTLADAGFIKQYGDCLGDIAARDLICAQKFNGLTVLPPLLTDEMIAQYTSALLAGTITSGWTFGAGAALQIPFAMQMAYRFNGCGVTQNVLYENQKLIANQFNSAIGKIQDSLSSTASALGKLQDVVNQNAQALNTLVKQLSSNFGAISSVLNDILSRLDKVEAEVQIDRLITGRLQSLQTYVTQQLIRAAEIRASANLAATKMSECVLGQSKRVDFCGKGCHLMSFPQSAPHGVVFLHVTYVPAQEKNFTTAPAICHDGKAHFPREGVFVSNGTHWFVTQRNFYEPQIITTDNTFVSGNCDVVIGIVNNTVYDPLQPELDSFKEELDKYFKNHTSPDVDLGDISGINASVVNIQKEIDRLNEVAKNLNESLIDLQELGKYEQYIK

SEQ ID NO: 2218 - protein, 1207 aa, Artificial Sequence
  SARS-CoV-2/bat/Yunnan/RaTG13/2013__EPI_ISL_402131 spike protein (1-1207)(I905C_Y1043C)
MFVFLVLLPLVSSQCVNLTTRTQLPPAYTNSSTRGVYYPDKVFRSSVLHLTQDLFLPFFSNVTWFHAIHVSGTNGIKRFDNPVLPFNDGVYFASTEKSNIIRGWIFGTTLDSKTQSLLIVNNATNVVIKVCEFQFCNDPFLGVYYHKNNKSWMESEFRVYSSANNCTFEYVSQPFLMDLEGKQGNFKNLREFVFKNIDGYFKIYSKHTPINLVRDLPPGFSALEPLVDLPIGINITRFQTLLALHRSYLTPGDSSSGWTAGAAAYYVGYLQPRTFLLKYNENGTITDAVDCALDPLSETKCTLKSFTVEKGIYQTSNFRVQPTDSIVRFPNITNLCPFGEVFNATTFASVYAWNRKRISNCVADYSVLYNSTSFSTFKCYGVSPTKLNDLCFTNVYADSFVITGDEVRQIAPGQTGKIADYNYKLPDDFTGCVIAWNSKHIDAKEGGNFNYLYRLFRKANLKPFERDISTEIYQAGSKPCNGQTGLNCYYPLYRYGFYPTDGVGHQPYRVVVLSFELLNAPATVCGPKKSTNLVKNKCVNFNFNGLTGTGVLTESNKKFLPFQQFGRDIADTTDAVRDPQTLEILDITPCSFGGVSVITPGTNASNQVAVLYQDVNCTEVPVAIHADQLTPTWRVYSTGSNVFQTRAGCLIGAEHVNNSYECDIPIGAGICASYQTQTNSRSVASQSIIAYTMSLGAENSVAYSNNSIAIPTNFTISVTTEILPVSMTKTSVDCTMYICGDSTECSNLLLQYGSFCTQLNRALTGIAVEQDKNTQEVFAQVKQIYKTPPIKDFGGFNFSQILPDPSKPSKRSFIEDLLFNKVTLADAGFIKQYGDCLGDIAARDLICAQKFNGLTVLPPLLTDEMIAQYTSALLAGTITSGWTFGAGAALQIPFAMQMAYRFNGCGVTQNVLYENQKLIANQFNSAIGKIQDSLSSTASALGKLQDVVNQNAQALNTLVKQLSSNFGAISSVLNDILSRLDKVEAEVQIDRLITGRLQSLQTYVTQQLIRAAEIRASANLAATKMSECVLGQSKRVDFCGKGCHLMSFPQSAPHGVVFLHVTYVPAQEKNFTTAPAICHDGKAHFPREGVFVSNGTHWFVTQRNFYEPQIITTDNTFVSGSCDVVIGIVNNTVYDPLQPELDSFKEELDKYFKNHTSPDVDLGDISGINASVVNIQKEIDRLNEVAKNLNESLIDLQELGKYEQYIK

SEQ ID NO: 2219 - protein, 1211 aa, Artificial Sequence
  SARS-CoV-2/Wuhan/HBCDC-HB-01/2019__EPI_ISL_402132 spike protein (1-1211)(I909C_Y1047C)
MFVFLVLLPLVSSQCVNLTTRTQLPPAYTNSITRGVYYPDKVFRSSVLHSTQDLFLPFFSNVTWFHAIHVSGTNGTKRFDNPVLPFNDGVYFASTEKSNIIRGWIFGTTLDSKTQSLLIVNNATNVVIKVCEFQFCNDPFLGVYYHKNNKSWMESEFRVYSSANNCTFEYVSQPFLMDLEGKQGNFKNLREFVFKNIDGYFKIYSKHTPINLVRDLPQGFSALEPLVDLPIGINITRFQTLLALHRSYLTPGDSSSGWTAGAAAYYVGYLQPRTFLLKYNENGTITDAVDCALDPLSETKCTLKSFTVEKGIYQTSNFRVQPTESIVRFPNITNLCPFGEVFNATRFASVYAWNRKRISNCVADYSVLYNSASFSTFKCYGVSPTKLNDLCFTNVYADSFVIRGDEVRQIAPGQTGKIADYNYKLPDDFTGCVIAWNSNNLDSKVGGNYNYLYRLFRKSNLKPFERDISTEIYQAGSTPCNGVEGFNCYFPLQSYGFQPTNGVGYQPYRVVVLSFELLHAPATVCGPKKSTNLVKNKCVNFNFNGLTGTGVLTESNKKFLPFQQFGRDIADTTDAVRDPQTLEILDITPCSFGGVSVITPGTNTSNQVAVLYQDVNCTEVPVAIHADQLTPTWRVYSTGSNVFQTRAGCLIGAEHVNNSYECDIPIGAGICASYQTQTNSPRRARSVASQSIIAYTMSLGAENSVAYSNNSIAIPTNFTISVTTEILPVSMTKTSVDCTMYICGDSTECSNLLLQYGSFCTQLNRALTGIAVEQDKNTQEVFAQVKQIYKTPPIKDFGGFNFSQILPDPSKPSKRSFIEDLLFNKVTLADAGFIKQYGDCLGDIAARDLICAQKFNGLTVLPPLLTDEMIAQYTSALLAGTITSGWTFGAGAALQIPFAMQMAYRFNGCGVTQNVLYENQKLIANQFNSAIGKIQDSLSSTASALGKLQDVVNQNAQALNTLVKQLSSNFGAISSVLNDILSRLDKVEAEVQIDRLITGRLQSLQTYVTQQLIRAAEIRASANLAATKMSECVLGQSKRVDFCGKGCHLMSFPQSAPHGVVFLHVTYVPAQEKNFTTAPAICHDGKAHFPREGVFVSNGTHWFVTQRNFYEPQIITTDNTFVSGNCDVVIGIVNNTVYDPLQPELDSFKEELDKYFKNHTSPDVDLGDISGINASVVNIQKEIDRLNEVAKNLNESLIDLQELGKYEQYIK

SEQ ID NO: 2220 - protein, 1211 aa, Artificial Sequence
  SARS-CoV-2/Guangdong/20SF028/2020__EPI_ISL_403936 spike protein (1-1211)(I909C_Y1047C)
MFVFLVLLPLVSSQCVNLTTRTQLPPAYTNSFTRGVYYPDKVFRSSVLYSTQDLFLPFFSNVTWFHAIHVSGTNGTKRFDNPVLPFNDGVYFASTEKSNIIRGWIFGTTLDSKTQSLLIVNNATNVVIKVCEFQFCNDPFLGVYYHKNNKSWMESEFRVYSSANNCTFEYVSQPFLMDLEGKQGNFKNLREFVFKNIDGYFKIYSKHTPINLVRDLPQGFSALEPLVDLPIGINITRFQTLLALHRSYLTPGDSSSGWTAGAAAYYVGYLQPRTFLLKYNENGTITDAVDCALDPLSETKCTLKSFTVEKGIYQTSNFRVQPTESIVRFPNITNLCPFGEVFNATRFASVYAWNRKRISNCVADYSVLYNSASFSTFKCYGVSPTKLNDLCFTNVYADSFVIRGDEVRQIAPGQTGKIADYNYKLPDDFTGCVIAWNSNNLDSKVGGNYNYLYRLFRKSNLKPFERDISTEIYQAGSTPCNGVEGFNCYFPLQSYGFQPTNGVGYQPYRVVVLSFELLHAPATVCGPKKSTNLVKNKCVNFNFNGLTGTGVLTESNKKFLPFQQFGRDIADTTDAVRDPQTLEILDITPCSFGGVSVITPGTNTSNQVAVLYQDVNCTEVPVAIHADQLTPTWRVYSTGSNVFQTRAGCLIGAEHVNNSYECDIPIGAGICASYQTQTNSPRRARSVASQSIIAYTMSLGAENSVAYSNNSIAIPTNFTISVTTEILPVSMTKTSVDCTMYICGDSTECSNLLLQYGSFCTQLNRALTGIAVEQDKNTQEVFAQVKQIYKTPPIKDFGGFNFSQILPDPSKPSKRSFIEDLLFNKVTLADAGFIKQYGDCLGDIAARDLICAQKFNGLTVLPPLLTDEMIAQYTSALLAGTITSGWTFGAGAALQIPFAMQMAYRFNGCGVTQNVLYENQKLIANQFNSAIGKIQDSLSSTASALGKLQDVVNQNAQALNTLVKQLSSNFGAISSVLNDILSRLDKVEAEVQIDRLITGRLQSLQTYVTQQLIRAAEIRASANLAATKMSECVLGQSKRVDFCGKGCHLMSFPQSAPHGVVFLHVTYVPAQEKNFTTAPAICHDGKAHFPREGVFVSNGTHWFVTQRNFYEPQIITTDNTFVSGNCDVVIGIVNNTVYDPLQPELDSFKEELDKYFKNHTSPDVDLGDISGINASVVNIQKEIDRLNEVAKNLNESLIDLQELGKYEQYIK

SEQ ID NO: 2221 - protein, 1211 aa, Artificial Sequence
  SARS-CoV-2/Shenzhen/SZTH-001/2020__EPI_ISL_406592 spike protein (1-1211)(I909C_Y1047C)
MFVFLVLLPLVSSQCVNLTTRTQLPPAYTNSFTRGVYYPDKVFRSSVLHSTQDLFLPFFSNVTWFHAIHVSGTNGTKRFDNPVLPFNDGVYFASTEKSNIIRGWIFGTTLDSKTQSLLIVNNATNVVIKVCEFQFCNDPFLGVYYHKNNKSWMESEFRVYSSANNCTFEYVSQPFLMDLEGKQGNFKNLREFVFKNIDGYFKIYSKHTPINLVRDLPQGFSALEPLVDLPIGINITRFQTLLALHRSYLTPGDSSSGWTAGAAAYYVGYLQPRTFLLKYNENGTITDAVDCALDPLSETKCTLKSFTVEKGIYQTSNFRVQPTESIVRFPNITNLCPFGEVFNATRFASVYAWNRKRISNCVADYSVLYNSASFSTFKCYGVSPTKLNDLCFTNVYADSFVIRGDEVRQIAPGQTGKIADYNYKLPDDFTGCVIAWNSNNLDSKVGGNYNYLYRLFRKSNLKPFERDISTEIYQAGSTPCNGVEGFNCYFPLQSYGFQPTNGVGYQPYRVVVLSFELLHAPATVCGPKKSTNLVKNKCVNFNFNGLTGTGVLTESNKKFLPFQQFGRDIADTTDAVRDPQTLEILDITPCSFGGVSVITPGTNTSNQVAVLYQDVNCTEVPVAIHADQLTPTWRVYSTGSNVFQTRAGCLIGAEHVNNSYECDIPIGAGICASYQTQTNSPRRARSVASQSIIAYTMSLGAENSVAYSNNSIAIPTNFTISVTTEILPVSMTKTSVDCTMYICGDSTECSNLLLQYGSFCTQLNRALTGIAVEQDKNTQEVFAQVKQIYKTPPIKDFGGFNFSQILPDPSKPSKRSFIEDLLFNKVTLADAGFIKQYGDCLGDIAARDLICAQKFNGLTVLPPLLTDEMIAQYTSALLAGTITSGWTFGAGAALQIPFAMQMAYRFNGCGVTQNVLYENQKLIANQFNSAIGKIQDSLSSTASALGKLQDVVNQNAQALNTLVKQLSSNFGAISSVLNDILSRLDKVEAEVQIDRLITGRLQSLQTYVTQQLIRAAEIRASANLAATKMSECVLGQSKRVDFCGKGCHLMSFPQSAPHGVVFLHVTYVPAQEKNFTTAPAICHDGKAHFPREGVFVSNGTHWFVTQRNFYEPQIITTDNTFVSGNCDVLIGIVNNTVYDPLQPELDSFKEELDKYFKNHTSPDVDLGDISGINASVVNIQKEIDRLNEVAKNLNESLIDLQELGKYEQYIK

SEQ ID NO: 2222 - protein, 1211 aa, Artificial Sequence
  SARS-CoV-2/Shenzhen/SZTH-004/2020__EPI_ISL_406595 spike protein (1-1211)(I909C_Y1047C)
MFVFLVLLPLVSSQCVNLTTRTQLPPAYTNSFTRGVYYPDKVFRSSVLHSTQDLFLPFFSNVTWFHAIHVSGTNGTKRFDNPVLPFNDGVYFASTEKSNIIRGWIFGTTLDSKTQSLLIVNNATNVVIKVCEFQFCNDPFLGVYYHKNNKSWMESEFRVYSSANNCTFEYVSQPFLMDLEGKQGNFKNLREFVFKNIDGYFKIYSKHTPINLVRDLPQGFSALEPLVDLPIGINITRFQTLLALHRSYLTPGDSSSGWTAGAAAYYVGYLQPRTFLLKYNENGTITDAVDCALDPLSETKCTLKSFTVEKGIYQTSNFRVQPTESIVRFPNITNLCPFGEVFNATRFASVYAWDRKRISNCVAYYSVLYNSASFSTFKCYGVSPTKLNDLCFTNVYADSFVIRGDEVRQIAPGQTGKIADYNYKLPDDFTGCVIAWNSNNLDSKVGGNYNYLYRLFRKSNLKPFERDISTEIYQAGSTPCNGVEGFNCYFPLQSYGFQPTNGVGYQPYRVVVLSFELLHAPATVCGPKKSTNLVKNKCVNFNFNGLTGTGVLTESNKKFLPFQQFGRDIADTTDAVRDPQTLEILDITPCSFGGVSVITPGTNTSNQVAVLYQDVNCTEVPVAIHADQLTPTWRVYSTGSNVFQTRAGCLIGAEHVNNSYECDIPIGAGICASYQTQTNSPRRARSVASQSIIAYTMSLGAENSVAYSNNSIAIPTNFTISVTTEILPVSMTKTSVDCTMYICGDSTECSNLLLQYGSFCTQLNRALTGIAVEQDKNTQEVFAQVKQIYKTPPIKDFGGFNFSQILPDPSKPSKRSFIEDLLFNKVTLADAGFIKQYGDCLGDIAARDLICAQKFNGLTVLPPLLTDEMIAQYTSALLAGTITSGWTFGAGAALQIPFAMQMAYRFNGCGVTQNVLYENQKLIANQFNSAIGKIQDSLSSTASALGKLQDVVNQNAQALNTLVKQLSSNFGAISSVLNDILSRLDKVEAEVQIDRLITGRLQSLQTYVTQQLIRAAEIRASANLAATKMSECVLGQSKRVDFCGKGCHLMSFPQSAPHGVVFLHVTYVPAQEKNFTTAPAICHDGKAHFPREGVFVSNGTHWFVTQRNFYEPQIITTDNTFVSGNCDVVIGIVNNTVYDPLQPELDSFKEELDKYFKNHTSPDVDLGDISGINASVVNIQKEIDRLNEVAKNLNESLIDLQELGKYEQYIK

SEQ ID NO: 2223 - protein, 1211 aa, Artificial Sequence
  SARS-CoV-2/France/IDF0372/2020__EPI_ISL_406596 spike protein (1-1211)(I909C_Y1047C)
MFVFLVLLPLVSSQCVNLTTRTQLPPAYTNSFTRGVYYPDKVFRSSVLHSTQDLFLPFFSNVTWFHAIHVSGTNGTKRFDNPVLPFNDGVYFASTEKSNIIRGWIFGTTLDSKTQSLLIVNNATNVVIKVCEFQFCNDPFLGVYYHKNNKSWMESEFRVYSSANNCTFEYVSQPFLMDLEGKQGNFKNLREFVFKNIDGYFKIYSKHTPINLVRDLPQGFSALEPLVDLPIGINITRFQTLLALHRSYLTPGDSSSGWTAGAAAYYVGYLQPRTFLLKYNENGTITDAVDCALDPLSETKCTLKSFTVEKGIYQTSNFRVQPTESIVRFPNITNLCPFGEVFNATRFASVYAWNRKRISNCVADYSFLYNSASFSTFKCYGVSPTKLNDLCFTNVYADSFVIRGDEVRQIAPGQTGKIADYNYKLPDDFTGCVIAWNSNNLDSKVGGNYNYLYRLFRKSNLKPFERDISTEIYQAGSTPCNGVEGFNCYFPLQSYGFQPTNGVGYQPYRVVVLSFELLHAPATVCGPKKSTNLVKNKCVNFNFNGLTGTGVLTESNKKFLPFQQFGRDIADTTDAVRDPQTLEILDITPCSFGGVSVITPGTNTSNQVAVLYQDVNCTEVPVAIHADQLTPTWRVYSTGSNVFQTRAGCLIGAEHVNNSYECDIPIGAGICASYQTQTNSPRRARSVASQSIIAYTMSLGAENSVAYSNNSIAIPTNFTISVTTEILPVSMTKTSVDCTMYICGDSTECSNLLLQYGSFCTQLNRALTGIAVEQDKNTQEVFAQVKQIYKTPPIKDFGGFNFSQILPDPSKPSKRSFIEDLLFNKVTLADAGFIKQYGDCLGDIAARDLICAQKFNGLTVLPPLLTDEMIAQYTSALLAGTITSGWTFGAGAALQIPFAMQMAYRFNGCGVTQNVLYENQKLIANQFNSAIGKIQDSLSSTASALGKLQDVVNQNAQALNTLVKQLSSNFGAISSVLNDILSRLDKVEAEVQIDRLITGRLQSLQTYVTQQLIRAAEIRASANLAATKMSECVLGQSKRVDFCGKGCHLMSFPQSAPHGVVFLHVTYVPAQEKNFTTAPAICHDGKAHFPREGVFVSNGTHWFVTQRNFYEPQIITTDNTFVSGNCDVVIGIVNNTVYDPLQPELDSFKEELDKYFKNHTSPDVDLGDISGINASVVNIQKEIDRLNEVAKNLNESLIDLQELGKYEQYIK

SEQ ID NO: 2224 - protein, 1211 aa, Artificial Sequence
  SARS-CoV-2/Australia/VIC01/2020__EPI_ISL_406844 spike protein (1-1211)(I909C_Y1047C)
MFVFLVLLPLVSSQCVNLTTRTQLPPAYTNSFTRGVYYPDKVFRSSVLHSTQDLFLPFFSNVTWFHAIHVSGTNGTKRFDNPVLPFNDGVYFASTEKSNIIRGWIFGTTLDSKTQSLLIVNNATNVVIKVCEFQFCNDPFLGVYYHKNNKSWMESEFRVYSSANNCTFEYVSQPFLMDLEGKQGNFKNLREFVFKNIDGYFKIYSKHTPINLVRDLPQGFSALEPLVDLPIGINITRFQTLLALHRRYLTPGDSSSGWTAGAAAYYVGYLQPRTFLLKYNENGTITDAVDCALDPLSETKCTLKSFTVEKGIYQTSNFRVQPTESIVRFPNITNLCPFGEVFNATRFASVYAWNRKRISNCVADYSVLYNSASFSTFKCYGVSPTKLNDLCFTNVYADSFVIRGDEVRQIAPGQTGKIADYNYKLPDDFTGCVIAWNSNNLDSKVGGNYNYLYRLFRKSNLKPFERDISTEIYQAGSTPCNGVEGFNCYFPLQSYGFQPTNGVGYQPYRVVVLSFELLHAPATVCGPKKSTNLVKNKCVNFNFNGLTGTGVLTESNKKFLPFQQFGRDIADTTDAVRDPQTLEILDITPCSFGGVSVITPGTNTSNQVAVLYQDVNCTEVPVAIHADQLTPTWRVYSTGSNVFQTRAGCLIGAEHVNNSYECDIPIGAGICASYQTQTNSPRRARSVASQSIIAYTMSLGAENSVAYSNNSIAIPTNFTISVTTEILPVSMTKTSVDCTMYICGDSTECSNLLLQYGSFCTQLNRALTGIAVEQDKNTQEVFAQVKQIYKTPPIKDFGGFNFSQILPDPSKPSKRSFIEDLLFNKVTLADAGFIKQYGDCLGDIAARDLICAQKFNGLTVLPPLLTDEMIAQYTSALLAGTITSGWTFGAGAALQIPFAMQMAYRFNGCGVTQNVLYENQKLIANQFNSAIGKIQDSLSSTASALGKLQDVVNQNAQALNTLVKQLSSNFGAISSVLNDILSRLDKVEAEVQIDRLITGRLQSLQTYVTQQLIRAAEIRASANLAATKMSECVLGQSKRVDFCGKGCHLMSFPQSAPHGVVFLHVTYVPAQEKNFTTAPAICHDGKAHFPREGVFVSNGTHWFVTQRNFYEPQIITTDNTFVSGNCDVVIGIVNNTVYDPLQPELDSFKEELDKYFKNHTSPDVDLGDISGINASVVNIQKEIDRLNEVAKNLNESLIDLQELGKYEQYIK

SEQ ID NO: 2225 - protein, 1211 aa, Artificial Sequence
  SARS-CoV-2/Germany/BavPat1/2020__EPI_ISL_406862 spike protein (1-1211)(I909C_Y1047C)
MFVFLVLLPLVSSQCVNLTTRTQLPPAYTNSFTRGVYYPDKVFRSSVLHSTQDLFLPFFSNVTWFHAIHVSGTNGTKRFDNPVLPFNDGVYFASTEKSNIIRGWIFGTTLDSKTQSLLIVNNATNVVIKVCEFQFCNDPFLGVYYHKNNKSWMESEFRVYSSANNCTFEYVSQPFLMDLEGKQGNFKNLREFVFKNIDGYFKIYSKHTPINLVRDLPQGFSALEPLVDLPIGINITRFQTLLALHRSYLTPGDSSSGWTAGAAAYYVGYLQPRTFLLKYNENGTITDAVDCALDPLSETKCTLKSFTVEKGIYQTSNFRVQPTESIVRFPNITNLCPFGEVFNATRFASVYAWNRKRISNCVADYSVLYNSASFSTFKCYGVSPTKLNDLCFTNVYADSFVIRGDEVRQIAPGQTGKIADYNYKLPDDFTGCVIAWNSNNLDSKVGGNYNYLYRLFRKSNLKPFERDISTEIYQAGSTPCNGVEGFNCYFPLQSYGFQPTNGVGYQPYRVVVLSFELLHAPATVCGPKKSTNLVKNKCVNFNFNGLTGTGVLTESNKKFLPFQQFGRDIADTTDAVRDPQTLEILDITPCSFGGVSVITPGTNTSNQVAVLYQGVNCTEVPVAIHADQLTPTWRVYSTGSNVFQTRAGCLIGAEHVNNSYECDIPIGAGICASYQTQTNSPRRARSVASQSIIAYTMSLGAENSVAYSNNSIAIPTNFTISVTTEILPVSMTKTSVDCTMYICGDSTECSNLLLQYGSFCTQLNRALTGIAVEQDKNTQEVFAQVKQIYKTPPIKDFGGFNFSQILPDPSKPSKRSFIEDLLFNKVTLADAGFIKQYGDCLGDIAARDLICAQKFNGLTVLPPLLTDEMIAQYTSALLAGTITSGWTFGAGAALQIPFAMQMAYRFNGCGVTQNVLYENQKLIANQFNSAIGKIQDSLSSTASALGKLQDVVNQNAQALNTLVKQLSSNFGAISSVLNDILSRLDKVEAEVQIDRLITGRLQSLQTYVTQQLIRAAEIRASANLAATKMSECVLGQSKRVDFCGKGCHLMSFPQSAPHGVVFLHVTYVPAQEKNFTTAPAICHDGKAHFPREGVFVSNGTHWFVTQRNFYEPQIITTDNTFVSGNCDVVIGIVNNTVYDPLQPELDSFKEELDKYFKNHTSPDVDLGDISGINASVVNIQKEIDRLNEVAKNLNESLIDLQELGKYEQYIK

SEQ ID NO: 2226 - protein, 1211 aa, Artificial Sequence
  SARS-CoV-2/Wuhan/HBCDC-HB-02/2020__EPI_ISL_412978 spike protein (1-1211)(I909C_Y1047C)
MFVFLVLLPLVSSQCVNLTTRTQLPPAYTNSFTRGVYYPDKVFRSSVLHSTQDLFLPFFSNVTWFHAIHVSGTNGTKRFDNPVLPFNDGVYFASTEKSNIIRGWIFGTTLDSKTQSLLIVNNATNVVIKVCEFQFCNDPFLGVYYHKNNKSWMESEFRVYSSANNCTFEYVSQPFLMDLEGKQGNFKNLREFVFKNIDGYFKIYSKHTPINLVRDLPQGFSALEPLVDLPIGINITRFQTLLALHRSYLTPGDSSSGWTAGAAAYYVGYLQPRTFLLKYNENGTITDAVDCALDPLSETKCTLKSFTVEKGIYQTSNFRVQPTESIVRFPNITNLCPFGEVFNATRFASVYAWNRKRISNCVADYSVLYNSASFSTFKCYGVSPTKLNDLCFTNVYADSFVIRGDEVRQIAPGQTGKIADYNYKLPDDFTGCVIAWNSNNLDSKVGGNYNYLYRLFRKSNLKPFERDISTEIYQAGSTPCNGVEGFNCYFPLQSYGFQPTNGVGYQPYRVVVLSFELLHAPATVCGPKKSTNLVKNKCVNFNFNGLTGTGVLTESNKKFLPFQQFGRDIADTTDAVRDPQTLEILDITPCSFGGVSVITPGTNTSNQVAVLYQDVNCTEVPVAIHADQLTPTWRVYSTGSNVFQTRAGCLIGAEHVNNSYECDIPIGAGICASYQTQTNSPRRARSVASQSIIAYTMSLGAENSVAYSNNSIAIPTNFTISVTTEILPVSMTKTSVDCTMYICGDSTECSNFLLQYGSFCTQLNRALTGIAVEQDKNTQEVFAQVKQIYKTPPIKDFGGFNFSQILPDPSKPSKRSFIEDLLFNKVTLADAGFIKQYGDCLGDIAARDLICAQKFNGLTVLPPLLTDEMIAQYTSALLAGTITSGWTFGAGAALQIPFAMQMAYRFNGCGVTQNVLYENQKLIANQFNSAIGKIQDSLSSTASALGKLQDVVNQNAQALNTLVKQLSSNFGAISSVLNDILSRLDKVEAEVQIDRLITGRLQSLQTYVTQQLIRAAEIRASANLAATKMSECVLGQSKRVDFCGKGCHLMSFPQSAPHGVVFLHVTYVPAQEKNFTTAPAICHDGKAHFPREGVFVSNGTHWFVTQRNFYEPQIITTDNTFVSGNCDVVIGIVNNTVYDPLQPELDSFKEELDKYFKNHTSPDVDLGDISGINASVVNIQKEIDRLNEVAKNLNESLIDLQELGKYEQYIK

SEQ ID NO: 2227 - protein, 1211 aa, Artificial Sequence
  SARS-CoV-2/Australia/QLD02/2020__EPI_ISL_407896 spike protein (1-1211)(I909C_Y1047C)
MFVFLVLLPLVSSQCVNLTTRTQLPPAYTNSFTRGVYYPDKVFRSSVLHSTQDLFLPFFSNVTWFHAIHVSGTNGTKRFDNPVLPFNDGVYFASTEKSNIIRGWIFGTTLDSKTQSLLIVNNATNVVIKVCEFQFCNDPFLGVYYHKNNKSWMESEFRVYSSANNCTFEYVSQPFLMDLEGKQGNFKNLREFVFKNIDGYFKIYSKHTPINLVRDLPQGFSALEPLVDLPIGINITRFQTLLALHRSYLTPGDSSSGWTAGAAAYYVGYLQPRTFLLKYNENGTITDAVDCALDPLSETKCTLKSFTVEKGIYQTSNFRVQPTESIVRFPNITNLCPFGEVFNATRFASVYAWNRKRISNCVADYSVLYNSASFSTFKCYGVSPTKLNDLCFTNVYADSFVIRGDEVRQIAPGQTGKIADYNYKLPDDFTGCVIAWNSNNLDSKVGGNYNYLYRLFRKSNLKPFERDISTEIYQAGSTPCNGVEGFNCYFPLQSYGFQPTNGVGYQPYRVVVLSFELLHAPATVCGPKKSTNLVKNKCVNFNFNGLTGTGVLTESNKKFLPFQQFGRDIADTTDAVRDPQTLEILDITPCSFGGVSVITPGTNTSNQVAVLYQDVNCTEVPVAIHADQLTPTWRVYSTGSNVFQTRAGCLIGAEHVNNSYECDIPIGAGICASYQTQTNSPRRARSVASQSIIAYTMSLGAENSVAYSNNSIAIPTNFTISVTTEILPVSMTKTSVDCTMYICGDSTECSNLLLQYGSFCTQLNRALTGIAVEQDKNTQEVFAQVKQIYKTPPIKDFGGFNFSQILPDPSKPSKRSFIEDLLFNKVTLADAGFIKQYGDCLGDIAARDLICAQKFNGLTVLPPLLTDEMIAQYTSALLAGTITSGWTFGAGAALQIPFAMQMAYRFNGCGVTQNVLYENQKLIANQFNSAIGKIQDSLSSTASALGKLQDVVNQNAQALNTLVKQLSSNFGAISSVLNDILSRLDKVEAEVQIDRLITGRLQSLQTYVTQQLIRAAEIRASANLAATKMSECVLGQSKRVDFCGKGCHLMSFPQSAPHGVVFLHVTYVPAQEKNFTTAPAICHDGKAHFPREGVFVSNGTHWFVTQRNFYEPQIITTDNTFVSGNCDVVIGIVNNTVYDPLQLELDSFKEELDKYFKNHTSPDVDLGDISGINASVVNIQKEIDRLNEVAKNLNESLIDLQELGKYEQYIK

SEQ ID NO: 2228 - protein, 1211 aa, Artificial Sequence
  SARS-CoV-2/India/1-31/2020__EPI_ISL_413523 spike protein (1-1211)(I909C_Y1047C)
MFVFLVLLPLVSSQCVNLTTRTQLPPAYTNSFTRGVYYPDKVFRSSVLHSTQDLFLPFFSNVTWFHAIHVSGTNGTKRFDNPVLPFNDGVYFASTEKSNIIRGWIFGTTLDSKTQSLLIVNNATNVVIKVCEFQFCNDPFLGVYYHKNNKSWMESEFRVYSSANNCTFEYVSQPFLMDLEGKQGNFKNLREFVFKNIDGYFKIYSKHTPINLVRDLPQGFSALEPLVDLPIGINITRFQTLLALHRSYLTPGDSSSGWTAGAAAYYVGYLQPRTFLLKYNENGTITDAVDCALDPLSETKCTLKSFTVEKGIYQTSNFRVQPTESIVRFPNITNLCPFGEVFNATRFASVYAWNRKRISNCVADYSVLYNSASFSTFKCYGVSPTKLNDLCFTNVYADSFVIRGDEVRQIAPGQTGKIADYNYKLPDDFTGCVIAWNSNNLDSKVGGNYNYLYRLFRKSNLKPFERDISTEIYQAGSTPCNGVEGFNCYFPLQSYGFQPTNGVGYQPYRVVVLSFELLHAPATVCGPKKSTNLVKNKCVNFNFNGLTGTGVLTESNKKFLPFQQFGRDIADTTDAVRDPQTLEILDITPCSFGGVSVITPGTNTSNQVAVLYQDVNCTEVPVAIHADQLTPTWRVYSTGSNVFQTRAGCLIGAEHVNNSYECDIPIGAGICASYQTQTNSPRRARSVASQSIIAYTMSLGAENSVAYSNNSIAIPTNFTISVTTEILPVSMTKTSVDCTMYICGDSTECSNLLLQYGSFCTQLNRALTGIAVEQDKNTQEVFAQVKQIYKTPPIKDFGGFNFSQILPDPSKPSKRSFIEDLLFNKVTLADAGFIKQYGDCLGDIAARDLICAQKFNGLTVLPPLLTDEMIAQYTSALLAGTITSGWTFGAGAALQIPFAMQMAYRFNGCGVTQNVLYENQKLIANQFNSVIGKIQDSLSSTASALGKLQDVVNQNAQALNTLVKQLSSNFGAISSVLNDILSRLDKVEAEVQIDRLITGRLQSLQTYVTQQLIRAAEIRASANLAATKMSECVLGQSKRVDFCGKGCHLMSFPQSAPHGVVFLHVTYVPAQEKNFTTAPAICHDGKAHFPREGVFVSNGTHWFVTQRNFYEPQIITTDNTFVSGNCDVVIGIVNNTVYDPLQPELDSFKEELDKYFKNHTSPDVDLGDISGINASVVNIQKEIDRLNEVAKNLNESLIDLQELGKYEQYIK

SEQ ID NO: 2229 - protein, 1211 aa, Artificial Sequence
  SARS-CoV-2/Guangdong/GD2020087-P0008/2020__EPI_ISL_413863 spike protein (1-1211)(I909C_Y1047C)
MFVFLVLLPLVSSQCVNLTTRTQLPPAYTNSFTRGVYYPDKVFRSSVLHSTQDLFLPFFSNVTWFHAIHVSGTNGTKRFDNPVLPFNDGVYFASTEKSNIIRGWIFGTTLDSKTQSLLIVNNATNVVIKVCEFQFCNDPFLGVYYHKNNKSWMESEFRVYSSANNCTFEYVSQPFLMDLEGKQGNFKNLREFVFKNIDGYFKIYSKHTPINLVRDLPQGFSALEPLVDLPIGINITRFQTLLALHRSYLTPGDSSSGWTAGAAAYYVGYLQPRTFLLKYNENGTITDAVDCALDPLSETKCTLKSFTVEKGIYQTSNFRVQPTESIVRFPNITNLCPFGEVFNATRFASVYAWNRKRISNCVADYSVLYNSASFSTFKCYGVSPTKLNDLCFTNVYADSFVIRGDEVREIAPGQTGKIADYNYKLPDDFTGCVIAWNSNNLDSKVGGNYNYLYRLFRKSNLKPFERDISTEIYQAGSTPCNGVEGFNCYFPLQSYGFQPTNGVGYQPYRVVVLSFELLHAPATVCGPKKSTNLVKNKCVNFNFNGLTGTGVLTESNKKFLPFQQFGRDIADTTDAVRDPQTLEILDITPCSFGGVSVITPGTNTSNQVAVLYQDVNCTEVPVAIHADQLTPTWRVYSTGSNVFQTRAGCLIGAEHVNNSYECDIPIGAGICASYQTQTNSPRRARSVASQSIIAYTMSLGAENSVAYSNNSIAIPTNFTISVTTEILPVSMTKTSVDCTMYICGDSTECSNLLLQYGSFCTQLNRALTGIAVEQDKNTQEVFAQVKQIYKTPPIKDFGGFNFSQILPDPSKPSKRSFIEDLLFNKVTLADAGFIKQYGDCLGDIAARDLICAQKFNGLTVLPPLLTDEMIAQYTSALLAGTITSGWTFGAGAALQIPFAMQMAYRFNGCGVTQNVLYENQKLIANQFNSAIGKIQDSLSSTASALGKLQDVVNQNAQALNTLVKQLSSNFGAISSVLNDILSRLDKVEAEVQIDRLITGRLQSLQTYVTQQLIRAAEIRASANLAATKMSECVLGQSKRVDFCGKGCHLMSFPQSAPHGVVFLHVTYVPAQEKNFTTAPAICHDGKAHFPREGVFVSNGTHWFVTQRNFYEPQIITTDNTFVSGNCDVVIGIVNNTVYDPLQPELDSFKEELDKYFKNHTSPDVDLGDISGINASVVNIQKEIDRLNEVAKNLNESLIDLQELGKYEQYIK

SEQ ID NO: 2230 - protein, 1211 aa, Artificial Sequence
  SARS-CoV-2/Sweden/01/2020__EPI_ISL_411951 spike protein (1-1211)(I909C_Y1047C)
MFVFLVLLPLVSSQCVNLTTRTQLPPAYTNSFTRGVYYPDKVFRSSVLHSTQDLFLPFFSNVTWFHAIHVSGTNGTKRFDNPVLPFNDGVYFASTEKSNIIRGWIFGTTLDSKTQSLLIVNNATNVVIKVCEFQFCNDPFLGVYYHKNNKSWMESEFRVYSSANNCTFEYVSQPFLMDLEGKQGNFKNLREFVFKNIDGYFKIYSKHTPINLVRDLPQGFSALEPLVDLPIGINITRFQTLLALHRSYLTPGDSSSGWTAGAAAYYVGYLQPRTFLLKYNENGTITDAVDCALDPLSETKCTLKSFTVEKGIYQTSNFRVQPTESIVRFPNITNLCPFGEVFNATRFASVYAWNRKRISNCVADYSVLYNSASFSTFKCYGVSPTKLNDLCFTNVYADSFVIRGDEVRQIAPGQTGKIADYNYKLPDDFTGCVIAWNSNNLDSKVGGNYNYLYRLFRKSNLKPFERDISTEIYQAGSTPCNGVEGFNCYFPLQSYGFQPTNGVGYQPYRVVVLSFELLHAPATVCGPKKSTNLVKNKCVNFNFNGLTGTGVLTESNKKFLPFQQFGRDIADTTDAVRDPQTLEILDITPCSFGGVSVITPGTNTSNQVAVLYQDVNCTEVPVAIHADQLTPTWRVYSTGSNVFQTRAGCLIGAEHVNNSYECDIPIGAGICASYQTQTNSPRRARSVASQSIIAYTMSLGAENSVAYSNNSIAIPTNFTISVTTEILPVSMTKTSVDCTMYICGDSTECSNLLLQYGSFCTQLNRALTGIAVEQDKNTQEVFAQVKQIYKTPPIKDCGGFNFSQILPDPSKPSKRSFIEDLLFNKVTLADAGFIKQYGDCLGDIAARDLICAQKFNGLTVLPPLLTDEMIAQYTSALLAGTITSGWTFGAGAALQIPFAMQMAYRFNGCGVTQNVLYENQKLIANQFNSAIGKIQDSLSSTASALGKLQDVVNQNAQALNTLVKQLSSNFGAISSVLNDILSRLDKVEAEVQIDRLITGRLQSLQTYVTQQLIRAAEIRASANLAATKMSECVLGQSKRVDFCGKGCHLMSFPQSAPHGVVFLHVTYVPAQEKNFTTAPAICHDGKAHFPREGVFVSNGTHWFVTQRNFYEPQIITTDNTFVSGNCDVVIGIVNNTVYDPLQPELDSFKEELDKYFKNHTSPDVDLGDISGINASVVNIQKEIDRLNEVAKNLNESLIDLQELGKYEQYIK

SEQ ID NO: 2231 - protein, 1211 aa, Artificial Sequence
  SARS-CoV-2/Tianmen/HBCDC-HB-07/2020__EPI_ISL_412983 spike protein (1-1211)(I909C_Y1047C)
MFVFLVLLPLVSSQCVNLTTRTQLPPAYTNSFTRGVYYPDKVFRSSVLHSTQDLFLPFFSNVTWFHAIHVSGTNGTKRFDNPVLPFNDGVYFASTEKSNIIRGWIFGTTLDSKTQSLLIVNNATNVVIKVCEFQFCNDPFLGVYYHKNNKSWMESEFRVYSSANNCTFEYVSQPFLMDLEGKQGNFKNLREFVFKNIDGYFKIYSKHTPINLVRDLPQGFSALEPLVDLPIGINITRFQTLLALHRSYLTPGDSSSGWTAGAAAYYVGYLQPRTFLLKYNENGTITDAVDCALDPLSETKCTLKSFTVEKGIYQTSNFRVQPTESIVRFPNITNLCPFGEVFNATRFASVYAWNRKRISNCVADYSVLYNSASFSTFKCYGVSPTKLNDLCFTNVYADSFVIRGDEVRQIAPGQTGKIADYNYKLPDDFTGCVIAWNSNNLDSKVGGNYNYLYRLFRKSNLKPFERDISTEIYQAGSTPCNGVEGFNCYFPLQSYGFQPTNGVGYQPYRVVVLSFELLHAPATVCGPKKSTNLVKNKCVNFNFNGLTGTGVLTESNKKFLPFQQFGRDIADTTDAVRDPQTLEILDITPCSFGGVSVITPGTNTSNQVAVLYQDLNCTEVPVAIHADQLTPTWRVYSTGSNVFQTRAGCLIGAEHVNNSYECDIPIGAGICASYQTQTNSPRRARSVASQSIIAYTMSLGAENSVAYSNNSIAIPTNFTISVTTEILPVSMTKTSVDCTMYICGDSTECSNLLLQYGSFCTQLNRALTGIAVEQDKNTQEVFAQVKQIYKTPPIKDFGGFNFSQILPDPSKPSKRSFIEDLLFNKVTLADAGFIKQYGDCLGDIAARDLICAQKFNGLTVLPPLLTDEMIAQYTSALLAGTITSGWTFGAGAALQIPFAMQMAYRFNGCGVTQNVLYENQKLIANQFNSAIGKIQDSLSSTASALGKLQDVVNQNAQALNTLVKQLSSNFGAISSVLNDILSRLDKVEAEVQIDRLITGRLQSLQTYVTQQLIRAAEIRASANLAATKMSECVLGQSKRVDFCGKGCHLMSFPQSAPHGVVFLHVTYVPAQEKNFTTAPAICHDGKAHFPREGVFVSNGTHWFVTQRNFYEPQIITTDNTFVSGNCDVVIGIVNNTVYDPLQPELDSFKEELDKYFKNHTSPDVDLGDISGINASVVNIQKEIDRLNEVAKNLNESLIDLQELGKYEQYIK

SEQ ID NO: 2232 - protein, 1211 aa, Artificial Sequence
  SARS-CoV-2/Hong Kong/case42_VM20002493/2020__EPI_ISL_414527 spike protein (1-1211)(I909C_Y1047C)
MFVFLVLLPLVSSQCVNLTTRTQLPPAYTNSFTRGVYYPDKVFRSSVLHSTQDLFLPFFSNVTWFHAIHVSGTNGTKRFDNPVLPFNDGVYFASTEKSNIIRGWIFGTTLDSKTQSLLIVNNATNVVIKVCEFQFCNDPFLGVYYHKNNKSWMESEFRVYSSANNCTFEYVSQPFLMDLEGKQGNFKNLREFVFKNIDGYFKIYSKHTPINLVRDLPQGFSALEPLVDLPIGINITRFQTLLALHRSYLTPGDSSSGWTAGAAAYYVGYLQPRTFLLKYNENGTITDAVDCALDPLSETKCTLKSFTVEKGIYQTSNFRVQPTESIVRFPNITNLCPFGEVFNATRFASVYAWNRKRISNCVADYSVLYNSASFSTFKCYGVSPTKLNDLCFTNVYADSFVIRGDEVRQIAPGQTGKIADYNYKLPDDFTGCVIAWNSNNLDSKVGGNYNYLYRLFRKSNLKPFERDISTEIYQAGSTPCNGVEGFNCYFPLQSYGFQPTNGVGYQPYRVVVLSFELLHAPATVCGPKKSTNLVKNKCVNFNFNGLTGTGVLTESNKKFLPFQQFGRDIADTTDAVRDPQTLEILDITPCSFGGVSVITPGTNTSNQVAVLYQDVNCTEVPVAIHADQLTPTWRVYSTGSNVFQTRAGCLIGAEHVNNSYECDIPIGAGICASYQTQTNSPRRARSVASQSIIAYTMSLGAENSVAYSNNSIAIPTNFAISVTTEILPVSMTKTSVDCTMYICGDSTECSNLLLQYGSFCTQLNRALTGIAVEQDKNTQEVFAQVKQIYKTPPIKDFGGFNFSQILPDPSKPSKRSFIEDLLFNKVTLADAGFIKQYGDCLGDIAARDLICAQKFNGLTVLPPLLTDEMIAQYTSALLAGTITSGWTFGAGAALQIPFAMQMAYRFNGCGVTQNVLYENQKLIANQFNSAIGKIQDSLSSTASALGKLQDVVNQNAQALNTLVKQLSSNFGAISSVLNDILSRLDKVEAEVQIDRLITGRLQSLQTYVTQQLIRAAEIRASANLAATKMSECVLGQSKRVDFCGKGCHLMSFPQSAPHGVVFLHVTYVPAQEKNFTTAPAICHDGKAHFPREGVFVSNGTHWFVTQRNFYEPQIITTDNTFVSGNCDVVIGIVNNTVYDPLQPELDSFKEELDKYFKNHTSPDVDLGDISGINASVVNIQKEIDRLNEVAKNLNESLIDLQELGKYEQYIK

SEQ ID NO: 2233 - protein, 1211 aa, Artificial Sequence
  SARS-CoV-2/USA/CruiseA-23/2020__EPI_ISL_414482 spike protein (1-1211)(I909C_Y1047C)
MFVFLVLLPLVSSQCVNLTTRTQLPPAYTNSFTRGVYYPDKVFRSSVLHSTQDLFLPFFSNVTWFHAIHVSGTNGTKRFDNPVLPFNDGVYFASTEKSNIIRGWIFGTTLDSKTQSLLIVNNATNVVIKVCEFQFCNDPFLGVYYHKNNKSWMESEFRVYSSANNCTFEYVSQPFLMDLEVKQGNFKNLREFVFKNIDGYFKIYSKHTPINLVRDLPQGFSALEPLVDLPIGINITRFQTLLALHRSYLTPGDSSSGWTAGAAAYYVGYLQPRTFLLKYNENGTITDAVDCALDPLSETKCTLKSFTVEKGIYQTSNFRVQPTESIVRFPNITNLCPFGEVFNATRFASVYAWNRKRISNCVADYSVLYNSASFSTFKCYGVSPTKLNDLCFTNVYADSFVIRGDEVRQIAPGQTGKIADYNYKLPDDFTGCVIAWNSNNLDSKVGGNYNYLYRLFRKSNLKPFERDISTEIYQAGSTPCNGVEGFNCYFPLQSYGFQPTNGVGYQPYRVVVLSFELLHAPATVCGPKKSTNLVKNKCVNFNFNGLTGTGVLTESNKKFLPFQQFGRDIADTTDAVRDPQTLEILDITPCSFGGVSVITPGTNTSNQVAVLYQDVNCTEVPVAIHADQLTPTWRVYSTGSNVFQTRAGCLIGAEHVNNSYECDIPIGAGICASYQTQTNSPRRARSVASQSIIAYTMSLGAENSVAYSNNSIAIPTNFTISVTTEILPVSMTKTSVDCTMYICGDSTECSNLLLQYGSFCTQLNRALTGIAVEQDKNTQEVFAQVKQIYKTPPIKDFGGFNFSQILPDPSKPSKRSFIEDLLFNKVTLADAGFIKQYGDCLGDIAARDLICAQKFNGLTVLPPLLTDEMIAQYTSALLAGTITSGWTFGAGAALQIPFAMQMAYRFNGCGVTQNVLYENQKLIANQFNSAIGKIQDSLSSTASALGKLQDVVNQNAQALNTLVKQLSSNFGAISSVLNDILSRLDKVEAEVQIDRLITGRLQSLQTYVTQQLIRAAEIRASANLAATKMSECVLGQSKRVDFCGKGCHLMSFPQSAPHGVVFLHVTYVPAQEKNFTTAPAICHDGKAHFPREGVFVSNGTHWFVTQRNFYEPQIITTDNTFVSGNCDVVIGIVNNTVYDPLQPELDSFKEELDKYFKNHTSPDVDLGDISGINASVVNIQKEIDRLNEVAKNLNESLIDLQELGKYEQYIK

SEQ ID NO: 2234 - protein, 1211 aa, Artificial Sequence
  SARS-CoV-2/Hong Kong/case85_VM20002868/2020__EPI_ISL_414519 spike protein (1-1211)(I909C_Y1047C)
MFVFLVLVPLVSSQCVNLTTRTQLPPAYTNSFTRGVYYPDKVFRSSVLHSTQDLFLPFFSNVTWFHAIHVSGTNGTKRFDNPVLPFNDGVYFASTEKSNIIRGWIFGTTLDSKTQSLLIVNNATNVVIKVCEFQFCNDPFLGVYYHKNNKSWMESEFRVYSSANNCTFEYVSQPFLMDLEGKQGNFKNLREFVFKNIDGYFKIYSKHTPINLVRDLPQGFSALEPLVDLPIGINITRFQTLLALHRSYLTPGDSSSGWTAGAAAYYVGYLQPRTFLLKYNENGTITDAVDCALDPLSETKCTLKSFTVEKGIYQTSNFRVQPTESIVRFPNITNLCPFGEVFNATRFASVYAWNRKRISNCVADYSVLYNSASFSTFKCYGVSPTKLNDLCFTNVYADSFVIRGDEVRQIAPGQTGKIADYNYKLPDDFTGCVIAWNSNNLDSKVGGNYNYLYRLFRKSNLKPFERDISTEIYQAGSTPCNGVEGFNCYFPLQSYGFQPTNGVGYQPYRVVVLSFELLHAPATVCGPKKSTNLVKNKCVNFNFNGLTGTGVLTESNKKFLPFQQFGRDIADTTDAVRDPQTLEILDITPCSFGGVSVITPGTNTSNQVAVLYQDVNCTEVPVAIHADQLTPTWRVYSTGSNVFQTRAGCLIGAEHVNNSYECDIPIGAGICASYQTQTNSPRRARSVASQSIIAYTMSLGAENSVAYSNNSIAIPTNFTISVTTEILPVSMTKTSVDCTMYICGDSTECSNLLLQYGSFCTQLNRALTGIAVEQDKNTQEVFAQVKQIYKTPPIKDFGGFNFSQILPDPSKPSKRSFIEDLLFNKVTLADAGFIKQYGDCLGDIAARDLICAQKFNGLTVLPPLLTDEMIAQYTSALLAGTITSGWTFGAGAALQIPFAMQMAYRFNGCGVTQNVLYENQKLIANQFNSAIGKIQDSLSSTASALGKLQDVVNQNAQALNTLVKQLSSNFGAISSVLNDILSRLDKVEAEVQIDRLITGRLQSLQTYVTQQLIRAAEIRASANLAATKMSECVLGQSKRVDFCGKGCHLMSFPQSAPHGVVFLHVTYVPAQEKNFTTAPAICHDGKAHFPREGVFVSNGTHWFVTQRNFYEPQIITTDNTFVSGNCDVVIGIVNNTVYDPLQPELDSFKEELDKYFKNHTSPDVDLGDISGINASVVNIQKEIDRLNEVAKNLNESLIDLQELGKYEQYIK

SEQ ID NO: 2235 - protein, 1211 aa, Artificial Sequence; identical to SEQ ID NO: 2225
  SARS-CoV-2/England/200990660/2020__EPI_ISL_414523 spike protein (1-1211)(I909C_Y1047C)

SEQ ID NO: 2236 - protein, 1211 aa, Artificial Sequence
  SARS-CoV-2/Australia/NSW09/2020__EPI_ISL_413595 spike protein (1-1211)(I909C_Y1047C)
MFVFLVLLPLVSSQCVNLTTRTQLPPAYTNSFTRGVYYPDKVFRSSVLHSTQDLFLPFFSNVTWFHAIHVSGTNGTKRFDNPVLPFNDGVYFASTEKSNIIRGWIFGTTLDSKTQSLLIVNNATNVVIKVCEFQFCNDPFLGVYYHKNNKSWMESEFRVYSSANNCTFEYVSQPFLMDLEGKQGNFKNLREFVFKNIDGYFKIYSKHTPINLVRDLPQGFSALEPLVDLPIGINITRFQTLLALHRSYLTPGDSSSGWTAGAAAYYVGYLQPRTFLLKYNENGTITDAVDCALDPLSETKCTLKSFTVEKGIYQTSNFRVQPTESIVRFPNITNLCPFGEVFNATRFASVYAWNRKRISNCVADYSVLYNSASFSTFKCYGVSPTKLNDLCFTNVYADSFVIRGDEVRQIAPGQTGKIADYNYKLPDDFTGCVIAWNSNNLDSKVGGNYNYLYRLFRKSNLKPFERDISTEIYQAGSTPCNGVEGFNCYFPLQSYGFQPTNGVGYQPYRVVVLSFELLHAPATVCGPKKSTNLVKNKCVNFNFNGLTGTGVLTESNKKFLPFQQFGRDIADTTDAVRDPQTLEILDITPCSFGGVSVITPGTNTSNQVAVLYQDVNCTEVPVAIHADQLTPTWRVYSTGSNVFQTRAGCLIGAEHVNNSYECDIPIGAGICASYQTQTNSPRRARSVASQSIIAYTMSLGAENSVAYSNNSIAIPTNFTISVTTEILPVSMTKTSVDCTMYICGDSTECSNLLLQYGSFCTQLNRALTGIAVEQDKNTQEVFAQVKQIYKTPPIKDFGGFNFSQILPDPSKPSKRSFIEDLLFNKVTLADAGFIKQYGDCLGDIAARDLICAQKFNGLTVLPPLLTDEMIAQYTSALLAGTITSGWTFGAGAALQIPFAMQMAYRFNGCGVTQNVLYENQKLIANQFNSAIGKIQDSLSFTASALGKLQDVVNQNAQALNTLVKQLSSNFGAISSVLNDILSRLDKVEAEVQIDRLITGRLQSLQTYVTQQLIRAAEIRASANLAATKMSECVLGQSKRVDFCGKGCHLMSFPQSAPHGVVFLHVTYVPAQEKNFTTAPAICHDGKAHFPREGVFVSNGTHWFVTQRNFYEPQIITTDNTFVSGNCDVVIGIVNNTVYDPLQPELDSFKEELDKYFKNHTSPDVDLGDISGINASVVNIQKEIDRLNEVAKNLNESLIDLQELGKYEQYIK

SEQ ID NO: 2237 - protein, 1211 aa, Artificial Sequence; identical to SEQ ID NO: 2217
  SARS-CoV-2/Australia/NSW10/2020__EPI_ISL_413596 spike protein (1-1211)(I909C_Y1047C)

SEQ ID NO: 2238 - protein, 1211 aa, Artificial Sequence
  SARS-CoV-2/Switzerland/1000477797/2020__EPI_ISL_413023 spike protein (1-1211)(I909C_Y1047C)
MFVFLVLLPLVSSQCVNLTTRTQLPPAYTNSFTRGVYYPDKVFRSSVLHSTQDLFLPFFSNVTWFHAIHVSGTNGTKRFDNPVLPFNDGVYFASTEKSNIIRGWIFGTTLDSKTQSLLIVNNATNVVIKVCEFQFCNDPFLGVYYHKNNKSWMESEFRVYSSANNCTFEYVSQPFLMDLEGKQGNFKNLREFVFKNIDGYFNIYSKHTPINLVRDLPQGFSALEPLVDLPIGINITRFQTLLALHRSYLTPGDSSSGWTAGAAAYYVGYLQPRTFLLKYNENGTITDAVDCALDPLSETKCTLKSFTVEKGIYQTSNFRVQPTESIVRFPNITNLCPFGEVFNATRFASVYAWNRKRISNCVADYSVLYNSASFSTFKCYGVSPTKLNDLCFTNVYADSFVIRGDEVRQIAPGQTGKIADYNYKLPDDFTGCVIAWNSNNLDSKVGGNYNYLYRLFRKSNLKPFERDISTEIYQAGSTPCNGVEGFNCYFPLQSYGFQPTNGVGYQPYRVVVLSFELLHAPATVCGPKKSTNLVKNKCVNFNFNGLTGTGVLTESNKKFLPFQQFGRDIADTTDAVRDPQTLEILDITPCSFGGVSVITPGTNTSNQVAVLYQGVNCTEVPVAIHADQLTPTWRVYSTGSNVFQTRAGCLIGAEHVNNSYECDIPIGAGICASYQTQTNSPRRARSVASQSIIAYTMSLGAENSVAYSNNSIAIPTNFTISVTTEILPVSMTKTSVDCTMYICGDSTECSNLLLQYGSFCTQLNRALTGIAVEQDKNTQEVFAQVKQIYKTPPIKDFGGFNFSQILPDPSKPSKRSFIEDLLFNKVTLADAGFIKQYGDCLGDIAARDLICAQKFNGLTVLPPLLTDEMIAQYTSALLAGTITSGWTFGAGAALQIPFAMQMAYRFNGCGVTQNVLYENQKLIANQFNSAIGKIQDSLSSTASALGKLQDVVNQNAQALNTLVKQLSSNFGAISSVLNDILSRLDKVEAEVQIDRLITGRLQSLQTYVTQQLIRAAEIRASANLAATKMSECVLGQSKRVDFCGKGCHLMSFPQSAPHGVVFLHVTYVPAQEKNFTTAPAICHDGKAHFPREGVFVSNGTHWFVTQRNFYEPQIITTDNTFVSGNCDVVIGIVNNTVYDPLQPELDSFKEELDKYFKNHTSPDVDLGDISGINASVVNIQKEIDRLNEVAKNLNESLIDLQELGKYEQYIK

SEQ ID NO: 2239 - protein, 1211 aa, Artificial Sequence
  SARS-CoV-2/Belgium/BA-02291/2020__EPI_ISL_415159 spike protein (1-1211)(I909C_Y1047C)
MFVFLVLLPLVSSQCVNLTTRTQLPPAYTNSFTRGVYYPDKVFRSSVLHSTQDLFLPFFSNVTWFHAIHVSGTNGTKRFDNPVLPFNDGVYFASTEKSNIIRGWIFGTTLDSKTQSLLIVNNATNVVIKVCEFQFCNDPFLGVYYHKNNKSWMESEFRVYSSANNCTFEYVSQPFLMDLEGKQGNFKNLREFVFKNIDGYFKIYSKHTPINLVRDLPQGFSALEPLVDLPIGINITRFQTLLALHRSYLTPGDSSSGWTAGAAAYYVGYLQPRTFLLKYNENGTITDAVDCALDPLSETKCTLKSFTVEKGIYQTSNFRVQPTESIVRFPNITNLCPFGEVFNATRFASVYAWNRKRISNCVADYSVLYNSASFSTFKCYGVSPTKLNDLCFTNVYADSFVIRGDEVRQIAPGQTGKIADYNYKLPDDFTGCVIAWNSNNLDSKVGGNYNYLYRLFRRSNLKPFERDISTEIYQAGSTPCNGVEGFNCYFPLQSYGFQPTNGVGYQPYRVVVLSFELLPAPATVCGPKKSTNLVKNKCVNFNFNGLTGTGVLTESNKKFLPFQQFGRDIADTTDAVRDPQTLEILDITPCSFGGVSVITPGTNTSNQVAVLYQGVNCTEVPVAIHADQLTPTWRVYSTGSNVFQTRAGCLIGAEHVNNSYECDIPIGAGICASYQTQTNSPRRARSVASQSIIAYTMSLGAENSVAYSNNSIAIPTNFTISVTTEILPVSMTKTSVDCTMYICGDSTECSNLLLQYGSFCTQLNRALTGIAVEQDKNTQEVFAQVKQIYKTPPIKDFGGFNFSQILPDPSKPSKRSFIEDLLFNKVTLADAGFIKQYGDCLGDIAARDLICAQKFNGLTVLPPLLTDEMIAQYTSALLAGTITSGWTFGAGAALQIPFAMQMAYRFNGCGVTQNVLYENQKLIANQFNSAIGKIQDSLSSAAPALGKLQDVVNQNAQALNTLVKQLSSNFGAISSVLNDILSRLDKVEAEVQIDRLITGRLQSLQTYVTQQLIRAAEIRASANLAATKMSECVLGQSKRVDFCGKGCHLMSFPQSAPHGVVFLHVTYVPAQEKNFTTAPAICHDGKAHFPREGVFVSNGTHWFVTQRNFYEPQIITTDNTFVSGNCDVVIGIVNNTVYDPLQPELDSFKEELDKYFKNHTSPDVDLGDISGINASVVNIQKEIDRLNEVAKNLNESLIDLQELGKYEQYIK

SEQ ID NO: 2240 - protein, 1211 aa, Artificial Sequence
  SARS-CoV-2/USA/WA8-UW5/2020__EPI_ISL_413486 spike protein (1-1211)(I909C_Y1047C)
MFVFLVLLPLVSSQCVNLTTRTQLPPAYTNSFTRGVYYPDKVFRSSVLHSTQDLFLPFFSNVTWFHAIHVSGTNGTKRFDNPVLPFNDGVYFASTEKSNIIRGWIFGTTLDSKTQSLLIVNNATNVVIKVCEFQFCNDPFLGVYYHKNNKSWMESEFRVYSSANNCTFEYVSQPFLMDLEGKQGNFKNLREFVFKNIDGYFKIYSKHTPINLVRDLPQGFSALEPLVDLPIGINITRFQTLLALHRSYLTPGDSSSGWTAGAAAYYVGYLQPRTFLLKYNENGTITDAVDCALDPLSETKCTLKSFTVEKGIYQTSNFRVQPTESIVRFPNITNLCPFGEVFNATRFASVYAWNRKRISNCVADYSVLYNSASFSTFKCYGVSPTKLNDLCFTNVYADSFVIRGDEVRQIAPGQTGKIADYNYKLPDDFTGCVIAWNSNNLDSKVGGNYNYLYRLFRKSNLKPFERDISTEIYQAGSTPCNGVEGFNCYFPLQSYGFQPTNGVGYQPYRVVVLSFELLHAPATVCGPKKSTNLVKNKCVNFNFNGLTGTGVLTESNKKFLPFQQFGRDIADTTDAVRDPQTLEILDITPCSFGGVSVITPGTNTSNQVAVLYQDVNCTEVPVAIHADQLTPTWRVYSTGSNVFQTRAGCLIGAEYVNNSYECDIPIGAGICASYQTQTNSPRRARSVASQSIIAYTMSLGAENSVAYSNNSIAIPTNFTISVTTEILPVSMTKTSVDCTMYICGDSTECSNLLLQYGSFCTQLNRALTGIAVEQDKNTQEVFAQVKQIYKTPPIKDFGGFNFSQILPDPSKPSKRSFIEDLLFNKVTLADAGFIKQYGDCLGDIAARDLICAQKFNGLTVLPPLLTDEMIAQYTSALLAGTITSGWTFGAGAALQIPFAMQMAYRFNGCGVTQNVLYENQKLIANQFNSAIGKIQDSLSSTASALGKLQDVVNQNAQALNTLVKQLSSNFGAISSVLNDILSRLDKVEAEVQIDRLITGRLQSLQTYVTQQLIRAAEIRASANLAATKMSECVLGQSKRVDFCGKGCHLMSFPQSAPHGVVFLHVTYVPAQEKNFTTAPAICHDGKAHFPREGVFVSNGTHWFVTQRNFYEPQIITTDNTFVSGNCDVVIGIVNNTVYDPLQPELDSFKEELDKYFKNHTSPDVDLGDISGINASVVNIQKEIDRLNEVAKNLNESLIDLQELGKYEQYIK

SEQ ID NO: 2241 - protein, 1211 aa, Artificial Sequence
  SARS-CoV-2/England/20102000506/2020__EPI_ISL_415147 spike protein (1-1211)(I909C_Y1047C)
MFVFLVLLPLVSSQCVNLTTRTQLPPAYTNSFTRGVYYPDKVFRSSVLHSTQDLFLPFFSNVTWFHAIHVSGTNGTKRFDNPVLPFNDGVYFASTEKSNIIRGWIFGTTLDSKTQSLLIVNNATNVVIKVCEFQFCNDPFLGVYYHKNNKSWMESEFRVYSSANNCTFEYVSQPFLMDLEGKQGNFKNLREFVFKNIDGYFKIYSKHTPINLVRDLPQGFSALEPLVDLPIGINITRFQTLLALHRSYLTPGDSSSGWTAGAAAYYVGYLQPRTFLLKYNENGTITDAVDCALDPLSETKCTLKSFTVEKGIYQTSNFRVQPTESIVRFPNITNLCPFGEVFNATRFASVYAWNRKRISNCVADYSVLYNSASFSTFKCYGVSPTKLNDLCFTNVYADSFVIRGDEVRQIAPGQTGKIADYNYKLPDDFTGCVIAWNSNNLDSKVGGNYNYLYRLFRKSNLKPFERDISTEIYQAGSTPCNGVEGFNCYFPLQSYGFQPTNGVGYQPYRVVVLSFELLHAPATVCGPKKSTNLVKNKCVNFNFNGLTGTGVLTESNKKFLPFQQFGRDIADTTDAVRDPQTLEILDITPCSFGGVSVITPGTNTSNQVAVLYQGVNCTEVPVAIHADQLTPTWRVYSTGSNVFQTRAGCLIGAEHVNNSYECDIPIGAGICASYQTQTNSPRRARSVASQSIIAYTMSLGAENSVAYSNNSIAIPTNFTISVTTEILPVSMTKTSVDCTMYICGDSTECSNLLLQYGSFCTQLNRALTGIAVEQDKNTQEVFAQVKQIYKTPPIKDFGGFNFSQILPDPSKPSKRSFIEDLLFNKVTLADAGFIKQYGYCLGDIAARDLICAQKFNGLTVLPPLLTDEMIAQYTSALLAGTITSGWTFGAGAALQIPFAMQMAYRFNGCGVTQNVLYENQKLIANQFNSAIGKIQDSLSSTASALGKLQDVVNQNAQALNTLVKQLSSNFGAISSVLNDILSRLDKVEAEVQIDRLITGRLQSLQTYVTQQLIRAAEIRASANLAATKMSECVLGQSKRVDFCGKGCHLMSFPQSAPHGVVFLHVTYVPAQEKNFTTAPAICHDGKAHFPREGVFVSNGTHWFVTQRNFYEPQIITTDNTFVSGNCDVVIGIVNNTVYDPLQPELDSFKEELDKYFKNHTSPDVDLGDISGINASVVNIQKEIDRLNEVAKNLNESLIDLQELGKYEQYIK

SEQ ID NO: 2242 - protein, 1211 aa, Artificial Sequence
  SARS-CoV-2/Belgium/VAG-03013/2020__EPI_ISL_415155 spike protein (1-1211)(I909C_Y1047C)
MFVFLVLLPLVSSQCVNLTTRTQLPPAYTNSFTRGVYYPDKVFRSSVLHSTQDLFLPFFSNVTWFHAIHVSGTNGTKRFDNPVLPFNDGVYFASTEKSNIIRGWIFGTTLDSKTQSLLIVNNATNVVIKVCEFQFCNDPFLGVYYHKNNKSWMESEFRVYSSANNCTFEYVSQPFLMDLEGKQGNFKNLREFVFKNIDGYFKIYSKHTPINLVRDLPQGFSALEPLVDLPIGINITRFQTLLALHRSYLTPGDSSSGWTAGAAAYYVGYLQPRTFLLKYNENGTITDAVDCALDPLSETKCTLKSFTVEKGIYQTSNFRVQPTESIVRFPNITNLCPFGEVFNATRFASVYAWNRKRISNCVADYSVLYNSASFSTFKCYGVSPTKLNDLCFTNVYADSFVIRGDEVRQIAPGQTGKIADYNYKLPDDFTGCVIAWNSNNLDSKVGGNYNYLYRLFRKSNLKPFERDISTEIYQAGSTPCNGVEGFNCYFPLQSYGFQPTNGVGYQPYRVVVLSFELLHAPATVCGPKKSTNLVKNKCVNFNFNGLTGTGVLTESNKKFLPFQQFGRDIADTTDAVRDPQTLEILDITPCSFGGVSVITPGTNTSNQVAVLYQGVNCTEVPVAIHADQLTPTWRVYSTGSNVFQTRAGCLIGAEHVNNSYECDIPIGAGICASYQTQTNSPRRARSVASQSIIAYTMSLGAENSVAYSNNSIAIPTNFTISVTTEILPVSMTKTSVDCTMYICGDSTECSNLLLQYGSFCTQLNRALTGIAVEQDKNTQEVFAQVKQIYKTPPIKDFGGFNFSQILPDPSKPSKRSFIEDLLFNKVTLADAGFIKQYGDCLGDIAARDLICAQKFNGLTVLPPLLTDEMIAQYTSALLAGTITSGWTFGAGAALQIPFAMQMAYRFNGCGVTQNVLYENQKLIANQFNSAIGKIQDSLSSTATALGKLQDVVNQNAQALNTLVKQLSSNFGAISSVLNDILSRLDKVEAEVQIDRLITGRLQSLQTYVTQQLIRAAEIRASANLAATKMSECVLGQSKRVDFCGKGCHLMSFPQSAPHGVVFLHVTYVPAQEKNFTTAPAICHDGKAHFPREGVFVSNGTHWFVTQRNFYEPQIITTDNTFVSGNCDVVIGIVNNTVYDPLQPELDSFKEELDKYFKNHTSPDVDLGDISGINASVVNIQKEIDRLNEVAKNLNESLIDLQELGKYEQYIK

SEQ ID NO: 2243 - protein, 1211 aa, Artificial Sequence
  SARS-CoV-2/Belgium/BC-03016/2020__EPI_ISL_415157 spike protein (1-1211)(I909C_Y1047C)
MFVFLVLLPLVSSQCVNLTTRTQLPPAYTNSFTRGVYYPDKVFRSSVLHSTQDLFLPFFSNVTWFHAIHVSGTNGTKRFDNPVLPFNDGVYFASTEKSNIIRGWIFGTTLDSKTQSLLIVNNATNVVIKVCEFQFCNDPFLGVYYHKNNKSWMESEFRVYSSANNCTFEYVSQPFLMDLEGKQGNFKNLREFVFKNIDGYFKIYSKHTPINLVRDLPQGFSALEPLVDLPIGINITRFQTLLALHRSYLTPGDSSSGWTAGAAAYYVGYLQPRTFLLKYNENGTITDAVDCALDPLSETKCTLKSFTVEKGIYQTSNFRVQPTESIVRFPNITNLCPFGEVFNATRFASVYAWNRKRISNCVADYSVLYNSASFSTFKCYGVSPTKLNDLCFTNVYADSFVIRGDEVRQIAPGQTGKIADYNYKLPDDFTGCVIAWNSNNLDSKVGGNYNYLYRLFRKSNLKPFERDISTEIYQAGSTPCNGVEGFNCYFPLQSYGFQPTNGVGYQPYRVVVLSFELLHAPATVCGPKKSTNLVKNKCVNFNFNGLTGTGVLTESNKKFLPFQQFGRDIADTTDAVRDPQTLEILDITPCSFGGVSVITPGTNTSNQVAVLYQGVNCTEVPVAIHADQLTPTWRVYSTGSNVFQTRAGCLIGAEHVNNSYECDIPIGAGICASYQTQTNSPRRARSVASQSIIAYTMSLGAENSVAYSNNSIAIPTNFTISVTTEILPVSMTKTSVDCTMYICGDSTECSNLLLQYGSFCTQLNRALTGIAVEQDKNTQEVFAQVKQIYKTPPIKDFGGFNFSQILPDPSKPSKRSFIEDLLFNKVTLADAGFIKQYGDCLGDIAARDLICAQKFNGLTVLPPLLTDEMIAQYTSALLAGTITSGWTFGAGAALQIPFAMQMAYRFNGCGVTQNVLYENQKLIANQFNSAIGKIQDSLSSTAPALGKLQDVVNQNAQALNTLVKQLSSNFGAISSVLNDILSRLDKVEAEVQIDRLITGRLQSLQTYVTQQLIRAAEIRASANLAATKMSECVLGQSKRVDFCGKGCHLMSFPQSAPHGVVFLHVTYVPAQEKNFTTAPAICHDGKAHFPREGVFVSNGTHWFVTQRNFYEPQIITTDNTFVSGNCDVVIGIVNNTVYDPLQPELDSFKEELDKYFKNHTSPDVDLGDISGINASVVNIQKEIDRLNEVAKNLNESLIDLQELGKYEQYIK

SEQ ID NO: 2244 - protein, 1211 aa, Artificial Sequence
  SARS-CoV-2/Germany/BavPat3/2020__EPI_ISL_414521 spike protein (1-1211)(I909C_Y1047C)
MFVFLVLLPLVSSQCVNLTTRTQLPPAYTNSFTRGVYYPDKVFRSSVLHSTQDLFLPFFSNVTWFHAIHVSGTNGTKRFDNPVLPFNDGVYFASTEKSNIIRGWIFGTTLDSKTQSLLIVNNATNVVIKVCEFQFCNDPFLGVYYHKNNKSWMESEFRVYSSANNCTFEYVSQPFLMDLEGKQGNFKNLREFVFKNIDGYFKIYSKHTPINLVRDLPQGFSALEPLVDLPIGINITRFQTLLALHRSYLTPGDSSSGWTAGAAAYYVGYLQPRTFLLKYNENGTITDAVDCALDPLSETKCTLKSFTVEKGIYQTSNFRVQPTESIVRFPNITNLCPFGEVFNATRFASVYAWNRKRISNCVADYSVLYNSASFSTFKCYGVSPTKLNDLCFTNVYADSFVIRGDEVRQIAPGQTGKIADYNYKLPDDFTGCVIAWNSNNLDSKVGGNYNYLYRLFRKSNLKPFERDISTEIYQAGSTPCNGVEGFNCYFPLQSYGFQPTNGVGYQPYRVVVLSFELLHAPATVCGPKKSTNLVKNKCVNFNFNGLTGTGVLTESNKKFLPFQQFGRDIADTTDAVRDPQTLEILDITPCSFGGVSVITPGTNTSNQVAVLYQDVNCTEVPVAIHADQLTPTWRVYSTGSNVFQTRAGCLIGAEHVNNSYECDIPIGAGICASYQTQTNSPRRARSVASQSIIAYTMSLGAENSVAYSNNSIAIPTNFTISVTTEILPVSMTKTSVDCTMYICGDSTECSNLLLQYGSFCTQLNRALTGIAVEQDKNTQQVFAQVKQIYKTPPIKDFGGFNFSQILPDPSKPSKRSFIEDLLFNKVTLADAGFIKQYGDCLGDIAARDLICAQKFNGLTVLPPLLTDEMIAQYTSALLAGTITSGWTFGAGAALQIPFAMQMAYRFNGCGVTQNVLYENQKLIANQFNSAIGKIQDSLSSTASALGKLQDVVNQNAQALNTLVKQLSSNFGAISSVLNDILSRLDKVEAEVQIDRLITGRLQSLQTYVTQQLIRAAEIRASANLAATKMSECVLGQSKRVDFCGKGCHLMSFPQSAPHGVVFLHVTYVPAQEKNFTTAPAICHDGKAHFPREGVFVSNGTHWFVTQRNFYEPQIITTDNTFVSGNCDVVIGIVNNTVYDPLQPELDSFKEELDKYFKNHTSPDVDLGDISGINASVVNIQKEIDRLNEVAKNLNESLIDLQELGKYEQYIK

SEQ ID NO: 2245 - protein, 1211 aa, Artificial Sequence
  SARS-CoV-2/France/HF1805/2020__EPI_ISL_414628 spike protein (1-1211)(I909C_Y1047C)
MFVFLVLLPLVSSQCVNLTTRTQLPPAYTNSFTRGVYYPDKVFRSSVLHSTQDLFLPFFSNVTWFHAIHVSGTNGTKRFDNPVLPFNDGVYFASTEKSNIIRGWIFGTTLDSKTQSLLIVNNATNVVIKVCEFQFCNDPFLGVYYHKNNKSWMESEFRVYSSANNCTFEYVSQPFLMDLEGKQGNFKNLREFVFKNIDGYFKIYSKHTPINLVRDLPQGFSALEPLVDLPIGINITRFQTLLALHRSYLTPGDSSSGWTAGAAAYYVGYLQPRTFLLKYNENGTITDAVDCALDPLSETKCTLKSFTVEKGIYQTSNFRVQPTESIVRFPNITNLCPFGEVFNATRFASVYAWNRKRISNCVADYSVLYNSASFSTFKCYGVSPTKLNDLCFTNVYADSFVIRGDEVRQIAPGQTGKIADYNYKLPDDFTGCVIAWNSNNLDSKVGGNYNYLYRLFRKSNLKPFERDISTEIYQAGSTPCNGVEGFNCYFPLQSYGFQPTNGVGYQPYRVVVLSFELLHAPATVCGPKKSTNLVKNKCVNFNFNGLTGTGVLTESNKKFLPFQQFGRDIADTTDAVRDPQTLEILDITPCSFGGVSVITPGTNTSNQVAVLYQGVNCTEVPVAIHADQLTPTWRVYSTGSNVFQTRAGCLIGAEHVNNSYECDIPIGAGICASYQTQTNSPRRARSVASQSIIAYTMSLGAENSVAYSNNSIAIPTNFTISVTTEILPVSMTKTSVDCTMYICGDSTECSNLLLQYGSFCTQLNRALTGIAVEQDKNTQEVFAQVKQIYKTPPIKDFGGFNFSQILPDPSKPSKRSFIEDLLFNKVTLADAGFIKQYGDCLGDIAARDLICAQKFNGLTVLPPLLTDEMIAQYTSALLAGTITSGWTFGAGAALQIPFAMQMAYRFNGCGVTQNVLYENQKLIANQFNSAIGKIQDSLSSTASALGKLQDVVNQNAQALNTLVKQLSSNFGAISSVLNDILSRLDKVEAEVQIDRLITGRLQSLQTYVTQQLIRAAEIRASANLAATKMSECVLGQSKRVDFCGKGCHLMSFPQSAPHGVVFLHVTYVPAQEKNFTTAPAICHDGKAHFPREGVFVSNGTHWFVTQRNFYEPQIITTDNTFVSGNCDVVIGVVNNTVYDPLQPELDSFKEELDKYFKNHTSPDVDLGDISGINASVVNIQKEIDRLNEVAKNLNESLIDLQELGKYEQYIK

SEQ ID NO: 2246 - protein, 1211 aa, Artificial Sequence
  SARS-CoV-2/Netherlands/ZuidHolland_9/2020__EPI_ISL_414445 spike protein (1-1211)(I909C_Y1047C)
MFVFLVLLPLVSSQCVNLTTRTQLPPAYTNSFTRGVYYPDKVFRSSVLHSTQDLFLPFFSNVTWFHAIHVSGTNGTKRFDNPVLPFNDGVYFASTEKSNIIRGWIFGTTLDSKTQSLLIVNNATNVVIKVCEFQFCNDPFLGVYYHKNNKSWMESEFRVYSSANNCTFEYVSQPFLMDLEGKQGNFKNLREFVFKNIDGYFKIYSKHTPINLVRDLPQGFSALEPLVDLPIGINITRFQTLLALHRSYLTPGDSSSGWTAGAAAYYVGYLQPRTFLLKYNENGTITDAVDCALDPLSETKCTLKSFTVEKGIYQTSNFRVQPTESIVRFPNITNLCPFGEVFNATRFASVYAWNRKRISNCVADYSVLYNSASFSTFKCYGVSPTKLNDLCFTNVYADSFVIRGDEVRQIAPGQTGKIADYNYKLPDDFTGCVIAWNSNNLDSKVGGNYNYLYRLFRKSNLKPFERDISTEIYQAGSTPCNGVEGFNCYFPLQSYGFQPTNGVGYQPYRVVVLSFELLHAPATVCGPKKSTNLVKNKCVNFNFNGLTGTGVLTESNKKFLPFQQFGRDIADTTDAVRDPQTLEILDITPCSFGGVSVITPGTNTSNQVAVLYQGVNCTEVPVAIHADQLTPTWRVYSTGSNVFQTRAGCLIGAEHVNNSYECDIPIGAGICASYQTQTNSPRRARSVASQSIIAYTMSLGAENSVAYSNNSIAIPTNFTISVTTEILPVSMTKTSVDCTMYICGDSTECSNLLLQYGSFCTQLNRALTGIAVEQDKNTQEVFAQVKQIYKTPPIKDFGGFNFSQILPDPSKPSKRSFIEDLLFNKVTLADAGFIKQYGDCLGDIAARDLICVQKFNGLTVLPPLLTDEMIAQYTSALLAGTITSGWTFGAGAALQIPFAMQMAYRFNGCGVTQNVLYENQKLIANQFNSAIGKIQDSLSSTASALGKLQDVVNQNAQALNTLVKQLSSNFGAISSVLNDILSRLDKVEAEVQIDRLITGRLQSLQTYVTQQLIRAAEIRASANLAATKMSECVLGQSKRVDFCGKGCHLMSFPQSAPHGVVFLHVTYVPAQEKNFTTAPAICHDGKAHFPREGVFVSNGTHWFVTQRNFYEPQIITTDNTFVSGNCDVVIGIVNNTVYDPLQPELDSFKEELDKYFKNHTSPDVDLGDISGINASVVNIQKEIDRLNEVAKNLNESLIDLQELGKYEQYIK

SEQ ID NO: 2247 - protein, 1211 aa, Artificial Sequence
  SARS-CoV-2/Finland/FIN03032020A/2020__EPI_ISL_413602 spike protein (1-1211)(I909C_Y1047C)
MFVFLVLLPLVSSQCVNLTTRTQLPPAYTNSFTRGVYYPDKVFRSSVLHSTQDLFLPFFSNVTWFHAIHVSGTNGTKRFDNPVLPFNDGVYFASTEKSNIIRGWIFGTTLDSKTQSLLIVNNATNVVIKVCEFQFCNDPFLGVYYHKNNKSWMESEFRVYSSANNCTFEYVSQPFLMDLEGKQGNFKNLREFVFKNIDGYFKIYSKHTPINLVRDLPQGFSALEPLVDLPIGINITRFQTLLALHRSYLTPGDSSSGWTAGAAAYYVGYLQPRTFLLKYNENGTITDAVDCALDPLSETKCTLKSFTVEKGIYQTSNFRVQPTESIVRFPNITNLCPFGEVFNATRFASVYAWNRKRISNCVADYSVLYNSASFSTFKCYGVSPTKLNDLCFTNVYADSFVIRGDEVRQIAPGQTGKIADYNYKLPDDFTGCVISWNSNNLDSKVGGNYNYLYRLFRKSNLKPFERDISTEIYQAGSTPCNGVEGFNCYFPLQSYGFQPTNGVGYQPYRVVVLSFELLHAPATVCGPKKSTNLVKNKCVNFNFNGLTGTGVLTESNKKFLPFQQFGRDIADTTDAVRDPQTLEILDITPCSFGGVSVITPGTNTSNQVAVLYQGVNCTEVPVAIHADQLTPTWRVYSTGSNVFQTRAGCLIGAEHVNNSYECDIPIGAGICASYQTQTNSPRRARSVASQSIIAYTMSLGAENSVAYSNNSIAIPTNFTISVTTEILPVSMTKTSVDCTMYICGDSTECSNLLLQYGSFCTQLNRALTGIAVEQDKNTQEVFAQVKQIYKTPPIKDFGGFNFSQILPDPSKPSKRSFIEDLLFNKVTLADAGFIKQYGDCLGDIAARDLICAQKFNGLTVLPPLLTDEMIAQYTSALLAGTITSGWTFGAGAALQIPFAMQMAYRFNGCGVTQNVLYENQKLIANQFNSAIGKIQDSLSSTASALGKLQDVVNQNAQALNTLVKQLSSNFGAISSVLNDILSRLDKVEAEVQIDRLITGRLQSLQTYVTQQLIRAAEIRASANLAATKMSECVLGQSKRVDFCGKGCHLMSFPQSAPHGVVFLHVTYVPAQEKNFTTAPAICHDGKAHFPREGVFVSNGTHWFVTQRNFYEPQIITTDNTFVSGNCDVVIGIVNNTVYDPLQPELDSFKEELDKYFKNHTSPDVDLGDISGINASVVNIQKEIDRLNEVAKNLNESLIDLQELGKYEQYIK

SEQ ID NO: 2248 - protein, 1211 aa, Artificial Sequence
  SARS-CoV-2/France/GE1977/2020__EPI_ISL_414632 spike protein (1-1211)(I909C_Y1047C)
MFVFLVLLPLVSSQCVNLTTRTQLPPAYTNSFTRGVYYPDKVFRSSVLHSTQDLFLPFFSNVTWFHAIHVSGTNGTKRFDNPVLPFNDGVYFASTEKSNIIRGWIFGTTLDSKTQSLLIVNNATNVVIKVCEFQFCNDPFLGVYYHKNNKSWMESEFRVYSSANNCTFEYVSQPFLMDLEGKQGNFKNLREFVFKNIDGYFKIYSKHTPINLVRDLPQGFSALEPLVDLPIGINITRFQTLLALHRSYLTPGDSSSGWTAGAAAYYVGYLQPRTFLLKYNENGTITDAVDCALDPLSETKCTLKSFTVEKGIYQTSNFRVQPTESIVRFPNITNLCPFGEVFNATRFASVYAWNRKRISNCVADYSVLYNSASFSTFKCYGVSPTKLNDLCFTNVYADSFVIRGDEVRQIAPGQTGKIADYNYKLPDDFTGCVIAWNSNNLDSKVGGNYNYLYRLFRKSNLKPFERDISTEIYQAGSTPCNGVEGFNCYFPLQSYGFQPTNGVGYQPYRVVVLSFELLHAPATVCGPKKSTNLVKNKCVNFNFNGLTGTGVLTESNKKFLPFQQFGRDIADTTDAVRDPQTLEILDITPCSFGGVSVITPGTNTSNQVAVLYQGVNCTEVPVAIHADQLTPTWRVYSTGSNVFQTRAGCLIGAEHVNNSYECDIPIGAGICASYQTQTNSPRRARSVASQSIIAYTMSLGAENSVAYSNNSIAIPTNFTISVTTEILPVSMTKTSVDCTMYICGDSTECSNLLLQYGSFCTQLNRALTGIAVEQDKNTQEVFAQVKQIYKTPPIKDFGGFNFSQILPDPSKPSKRSFIEDLLFNKVTLADAGFIKQYGDCLGDIAARDLICAQKFNGLTVLPPLLTDEMIAQYTSALLAGTITSGWTFGAGAALQIPFAMQMAYRFNGCGVTQNVLYENQKLIANQFNSAIGKIQDSLFSTASALGKLQDVVNQNAQALNTLVKQLSSNFGAISSVLNDILSRLDKVEAEVQIDRLITGRLQSLQTYVTQQLIRAAEIRASANLAATKMSECVLGQSKRVDFCGKGCHLMSFPQSAPHGVVFLHVTYVPAQEKNFTTAPAICHDGKAHFPREGVFVSNGTHWFVTQRNFYEPQIITTDNTFVSGNCDVVIGIVNNTVYDPLQPELDSFKEELDKYFKNHTSPDVDLGDISGINASVVNIQKEIDRLNEVAKNLNESLIDLQELGKYEQYIK

SEQ ID NO: 2249 - protein, 1211 aa, Artificial Sequence
  SARS-CoV-2/Finland/FIN-313/2020__EPI_ISL_414641 spike protein (1-1211)(I909C_Y1047C)
MFVFLVLLPLVSSQCVNLTTRTQLPPAYTNSFTRGVYYPDKVFRSSVLHSTQDLFLPFFSNVTWFHAIHVSGTNGTKRFDNPVLPFNDGVYFASTEKSNIIRGWIFGTTLDSKTQSLLIVNNATNVVIKVCEFQFCNDPFLGVYYHKNNKSWMESEFRVYSSANNCTFEYVSQPFLMDLEGKQGNFKNLREFVFKNIDGYFKIYSKHTPINLVRDLPQGFSALEPLVDLPIGINITRFKTLLALHRSYLTPGDSSSGWTAGAAAYYVGYLQPRTFLLKYNENGTITDAVDCALDPLSETKCTLKSFTVEKGIYQTSNFRVQPTESIVRFPNITNLCPFGEVFNATRFASVYAWNRKRISNCVADYSVLYNSASFSTFKCYGVSPTKLNDLCFTNVYADSFVIRGDEVRQIAPGQTGKIADYNYKLPDDFTGCVIAWNSNNLDSKVGGNYNYLYRLFRKSNLKPFERDISTEIYQAGSTPCNGVEGFNCYFPLQSYGFQPTNGVGYQPYRVVVLSFELLHAPATVCGPKKSTNLVKNKCVNFNFNGLTGTGVLTESNKKFLPFQQFGRDIADTTDAVRDPQTLEILDITPCSFGGVSVITPGTNTSNQVAVLYQGVNCTEVPVAIHADQLTPTWRVYSTGSNVFQTRAGCLIGAEHVNNSYECDIPIGAGICASYQTQTNSPRRARSVASQSIIAYTMSLGAENSVAYSNNSIAIPTNFTISVTTEILPVSMTKTSVDCTMYICGDSTECSNLLLQYGSFCTQLNRALTGIAVEQDKNTQEVFAQVKQIYKTPPIKDFGGFNFSQILPDPSKPSKRSFIEDLLFNKVTLADAGFIKQYGDCLGDIAARDLICAQKFNGLTVLPPLLTDEMIAQYTSALLAGTITSGWTFGAGAALQIPFAMQMAYRFNGCGVTQNVLYENQKLIANQFNSAIGKIQDSLSSTASALGKLQDVVNQNAQALNTLVKQLSSNFGAISSVLNDILSRLDKVEAEVQIDRLITGRLQSLQTYVTQQLIRAAEIRASANLAATKMSECVLGQSKRVDFCGKGCHLMSFPQSAPHGVVFLHVTYVPAQEKNFTTAPAICHDGKAHFPREGVFVSNGTHWFVTQRNFYEPQIITTDNTFVSGNCDVVIGIVNNTVYDPLQPELDSFKEELDKYFKNHTSPDVDLGDISGINASVVNIQKEIDRLNEVAKNLNESLIDLQELGKYEQYIK

SEQ ID NO: 2250 - protein, 1211 aa, Artificial Sequence
  SARS-CoV-2/Netherlands/ZuidHolland_2/2020__EPI_ISL_414556 spike protein (1-1211)(I909C_Y1047C)
MFVFLVLLPLVSSQCVNLTTRTQLPPAYTNSFTRGVYYPDKVFRSSVLHSTQDLFLPFFSNVTWFHAIHVSGTNGTKRFDNPVLPFNDGVYFASTEKSNIIRGWIFGTTLDSKTQSLLIVNNATNVVIKVCEFQFCNDPFLGVYYHKNNKSWMESEFRVYSSANNCTFEYVSQPFLMDLEGKQGNFKNLREFVFKNIDGYFKIYSKHTPINLVRDLPQGFSALEPLVDLPIGINITRFQTLLALHRSYLTPGDSSSGWTAGAAAYYVGYLQPRTFLLKYNENGTITDAVDCALDPLSETKCTLKSFTVEKGIYQTSNFRVQPTESIVRFPNITNLCPFGEVFNATRFASVYAWNRKRISNCVADYSVLYNSASFSTFKCYGVSPTKLNDLCFTNVYADSFVIRGDEVRQIAPGQTGKIADYNYKLPDDFTGCVIAWNSNNLDSKVGGNYNYLYRLFRKSNLKPFERDISTEIYQAGSTPCNGVEGFNCYFPLQSYGFQPTNGVGYQPYRVVVLSFELLHAPATVCGPKKSTNLVKNKCVNFNFNGLTGTGVLTESNKKFLPFQQFGRDIADTTDAVRDPQTLEILDITPCSFGGVSVITPGTNTSNQVAVLYQGVNCTEVPVAIHADQLTPTWRVYSTGSNVFQTRAGCLIGAEHVNNSYECDIPIGAGICASYQTQTNSPRRARSVASQSIIAYTMSLGAENSVAYSNNSIAIPTNFTISVTTEILPVSMTKTSVDCTMYICGDSTECSNLLLQYGSFCTQLNRALTGIALEQDKNTQEVFAQVKQIYKTPPIKDFGGFNFSQILPDPSKPSKRSFIEDLLFNKVTLADAGFIKQYGDCLGDIAARDLICAQKFNGLTVLPPLLTDEMIAQYTSALLAGTITSGWTFGAGAALQIPFAMQMAYRFNGCGVTQNVLYENQKLIANQFNSAIGKIQDSLSSTASALGKLQDVVNQNAQALNTLVKQLSSNFGAISSVLNDILSRLDKVEAEVQIDRLITGRLQSLQTYVTQQLIRAAEIRASANLAATKMSECVLGQSKRVDFCGKGCHLMSFPQSAPHGVVFLHVTYVPAQEKNFTTAPAICHDGKAHFPREGVFVSNGTHWFVTQRNFYEPQIITTDNTFVSGNCDVVIGIVNNTVYDPLQPELDSFKEELDKYFKNHTSPDVDLGDISGINASVVNIQKEIDRLNEVAKNLNESLIDLQELGKYEQYIK

SEQ ID NO: 2251 - protein, 1211 aa, Artificial Sequence
  SARS-CoV-2/USA/WA-UW31/2020__EPI_ISL_414618 spike protein (1-1211)(I909C_Y1047C)
MFVFLVLLPLVSSQCVNLTTRTQLPPAYTNSFTRGVYYPDKVFRSSVLHSTQDLFLPFFSNVTWFHAIHVSGTNGTKRFDNPVLPFNDGVYFASTEKSNIIRGWIFGTTLDSKTQSLLIVNNATNVVIKVCEFQFCNDPFLGVYYHKNNKSWMESEFRVYSSANNCTFEYVSQPFLMDLEGKQGNFKNLREFVFKNIDGYFKIYSKHTPINLVRDLPQGFSALEPLVDLPIGINITRFQTLLALHRSYLTPGDSSSGWTAGAAAYYVGYLQPRTFLLKYNENGTITDAVDCALDPLSETKCTLKSFTVEKGIYQTSNFRVQPTESIVRFPNITNLCPFGEVFNATRFASVYAWNRKRISNCVADYSVLYNSASFSTFKCYGVSPTKLNDLCFTNVYADSFVIRGDEVRQIAPGQTGKIADYNYKLPDDFTGCVIAWNSNNLDSKVGGNYNYLYRLFRKSNLKPFERDISTEIYQAGSTPCNGAEGFNCYFPLQSYGFQPTNGVGYQPYRVVVLSFELLHAPATVCGPKKSTNLVKNKCVNFNFNGLTGTGVLTESNKKFLPFQQFGRDIADTTDAVRDPQTLEILDITPCSFGGVSVITPGTNTSNQVAVLYQDVNCTEVPVAIHADQLTPTWRVYSTGSNVFQTRAGCLIGAEHVNNSYECDIPIGAGICASYQTQTNSPRRARSVASQSIIAYTMSLGAENSVAYSNNSIAIPTNFTISVTTEILPVSMTKTSVDCTMYICGDSTECSNLLLQYGSFCTQLNRALTGIAVEQDKNTQEVFAQVKQIYKTPPIKDFGGFNFSQILPDPSKPSKRSFIEDLLFNKVTLADAGFIKQYGDCLGDIAARDLICAQKFNGLTVLPPLLTDEMIAQYTSALLAGTITSGWTFGAGAALQIPFAMQMAYRFNGCGVTQNVLYENQKLIANQFNSAIGKIQDSLSSTASALGKLQDVVNQNAQALNTLVKQLSSNFGAISSVLNDILSRLDKVEAEVQIDRLITGRLQSLQTYVTQQLIRAAEIRASANLAATKMSECVLGQSKRVDFCGKGCHLMSFPQSAPHGVVFLHVTYVPAQEKNFTTAPAICHDGKAHFPREGVFVSNGTHWFVTQRNFYEPQIITTDNTFVSGNCDVVIGIVNNTVYDPLQPELDSFKEELDKYFKNHTSPDVDLGDISGINASVVNIQKEIDRLNEVAKNLNESLIDLQELGKYEQYIK

SEQ ID NO: 2252 - protein, 1211 aa, Artificial Sequence
  SARS-CoV-2/South Korea/SNU01/2020__EPI_ISL_411929 spike protein (1-1211)(I909C_Y1047C)
MFVFLVLLPLVSSQCVNLTTRTQLPPAYTNSFTRGVYYPDKVFRSSVLHSTQDLFLPFFSNVTWFHAIHVSGTNGTKRFDNPVLPFNDGVYFASTEKSNIIRGWIFGTTLDSKTQSLLIVNNATNVVIKVCEFQFCNDPFLGVYYHKNNKSWMESEFRVYSSANNCTFEYVSQPFLMDLEGKQGNFKNLREFVFKNIDGYFKIYSKHTPINLVRDLPQGFWALEPLVDLPIGINITRFQTLLALHRSYLTPGDSSSGWTAGAAAYYVGYLQPRTFLLKYNENGTITDAVDCALDPLSETKCTLKSFTVEKGIYQTSNFRVQPTESIVRFPNITNLCPFGEVFNATRFASVYAWNRKRISNCVADYSVLYNSASFSTFKCYGVSPTKLNDLCFTNVYADSFVIRGDEVRQIAPGQTGKIADYNYKLPDDFTGCVIAWNSNNLDSKVGGNYNYLYRLFRKSNLKPFERDISTEIYQAGSTPCNGVEGFNCYFPLQSYGFQPTNGVGYQPYRVVVLSFELLHAPATVCGPKKSTNLVKNKCVNFNFNGLTGTGVLTESNKKFLPFQQFGRDIADTTDAVRDPQTLEILDITPCSFGGVSVITPGTNTSNQVAVLYQDVNCTEVPVAIHADQLTPTWRVYSTGSNVFQTRAGCLIGAEHVNNSYECDIPIGAGICASYQTQTNSPRRARSVASQSIIAYTMSLGAENSVAYSNNSIAIPTNFTISVTTEILPVSMTKTSVDCTMYICGDSTECSNLLLQYGSFCTQLNRALTGIAVEQDKNTQEVFAQVKQIYKTPPIKDFGGFNFSQILPDPSKPSKRSFIEDLLFNKVTLADAGFIKQYGDCLGDIAARDLICAQKFNGLTVLPPLLTDEMIAQYTSALLAGTITSGWTFGAGAALQIPFAMQMAYRFNGCGVTQNVLYENQKLIANQFNSAIGKIQDSLSSTASALGKLQDVVNQNAQALNTLVKQLSSNFGAISSVLNDILSRLDKVEAEVQIDRLITGRLQSLQTYVTQQLIRAAEIRASANLAATKMSECVLGQSKRVDFCGKGCHLMSFPQSAPHGVVFLHVTYVPAQEKNFTTAPAICHDGKAHFPREGVFVSNGTHWFVTQRNFYEPQIITTDNTFVSGNCDVVIGIVNNTVYDPLQPELDSFKEELDKYFKNHTSPDVDLGDISGINASVVNIQKEIDRLNEVAKNLNESLIDLQELGKYEQYIK

SEQ ID NO: 2253 - protein, 1211 aa, Artificial Sequence
  SARS-CoV-2/China/WF0004/2020__EPI_ISL_413694 spike protein (1-1211)(I909C_Y1047C)
MFVFLVLLPLVSSQCVNLTTRTQLPPAYTNSFTRGVYYPDKVFRSSVLHSTQDLFLPFFSNVTWFHAIHVSGTNGTKRFDNPVLPFNDGVYFASTEKSNIIRGWIFGTTLDSKTQSLLIVNNATNVVIKVCEFQFCNDPFLGVYYHKNNKSWTESEFRVYSSANNCTFEYVSQPFLMDLEGKQGNFKNLREFVFKNIDGYFKIYSKHTPINLVRDLPQGFSALEPLVDLPIGINITRFQTLLALHRSYLTPGDSSSGWTAGAAAYYVGYLQPRTFLLKYNENGTITDAVDCALDPLSETKCTLKSFTVEKGIYQTSNFRVQPTESIVRFPNITNLCPFGEVFNATRFASVYAWNRKRISNCVADYSVLYNSASFSTFKCYGVSPTKLNDLCFTNVYADSFVIRGDEVRQIAPGQTGKIADYNYKLPDDFTGCVIAWNSNNLDSKVGGNYNYLYRLFRKSNLKPFERDISTEIYQAGSTPCNGVEGFNCYFPLQSYGFQPTNGVGYQPYRVVVLSFELLHAPATVCGPKKSTNLVKNKCVNFNFNGLTGTGVLTESNKKFLPFQQFGRDIADTTDAVRDPQTLEILDITPCSFGGVSVITPGTNTSNQVAVLYQDVNCTEVPVAIHADQLTPTWRVYSTGSNVFQTRAGCLIGAEHVNNSYECDIPIGAGICASYQTQTNSPRRARSVASQSIIAYTMSLGAENSVAYSNNSIAIPTNFTISVTTEILPVSMTKTSVDCTMYICGDSTECSNLLLQYGSFCTQLNRALTGIAVEQDKNTQEVFAQVKQIYKTPPIKDFGGFNFSQILPDPSKPSKRSFIEDLLFNKVTLADAGFIKQYGDCLGDIAARDLICAQKFNGLTVLPPLLTDEMIAQYTSALLAGTITSGWTFGAGAALQIPFAMQMAYRFNGCGVTQNVLYENQKLIANQFNSAIGKIQDSLSSTASALGKLQDVVNQNAQALNTLVKQLSSNFGAISSVLNDILSRLDKVEAEVQIDRLITGRLQSLQTYVTQQLIRAAEIRASANLAATKMSECVLGQSKRFDFCGKGCHLMSFPQSAPHGVVFLHVTYVPAQEKNFTTAPAICHDGKAHFPREGVFVSNGTHWFVTQRNFYEPQIITTDNTFVSGNCDVVIGIVNNTVYDPLQPELDSFKEELDKYFKNHTSPDVDLGDISGINASVVNIQKEIDRLNEVAKNLNESLIDLQELGKYEQYIK

SEQ ID NO: 2254 - protein, 1211 aa, Artificial Sequence
  SARS-CoV-2/China/WF0028/2020__EPI_ISL_413791 spike protein (1-1211)(I909C_Y1047C)
MFVFLVLLPLVSSQCVNLTTRTQLPPAYTNSFTRGVYYPDKVFRSSVLHSTQDLFLPFFSNVTWFHAIHVSGTNGTKRFDNPVLPFNDGVYFASTEKSNIIRGWIFGTTLDSKTQSLLIVNNATNVVIKVCEFQFCNDPFLGVYYHKNNKSWMESEFRVYSSANNCTFEYVSQPFLMDLEGKQGNFKNLREFVFKNIDGYFKIYSKHTPINLVRDLPQGFSALEPLVDLPIGINITRFQTLLALHRSYLTPGDSSSGWTAGAAAYYVGYLQPRTFLLKYNENGTITDAVDCALDPLSETKCTLKSFTVEKGIYQTSNFRVQPTESIVRFPNITNLCPFGEVFNATRFASVYAWNRKRISNCVADYSVLYNSASFSTFKCYGVSPTKLNDLCFTNVYADSFVIRGDEVRQIAPGQTGKIADYNYKLPDDFTGCVIAWNSNNLDSKVGGNYNYLYRLFRKSNLKPFERDISTEIYQAGSTPCNGVEGFNCYFPLQSYGFQPTNGVGYQPYRVVVLSFELLHAPATVCGPKKSTNLVKNKCVNFNFNGLTGTGVLTESNKKFLPFQQFGRDIADTTDAVRDPQTLEILDITPCSFGGVSVITPGTNTSNQVAVLYQDVNCTEVPVAIHADQLTPTWRVYSTGSNVFQTRAGCLIGAEHVNNSYECDIPIGAGICASYQTQTNSPRRARSVASQSIIAYTMSLGAENSVAYSNNSIAIPTNFTISVTTEILPVSMTKTSVDCTMYICGDSTECSNLLLQYGSFCTQLNRALTGIAVEQDKNTQEVFAQVKQIYKTPPIKDFGGFNFSQILPDPSKPSKRSFIEDLLFNKVTLADAGFIKQYGDCLGDIAARDLICAQKFNGLTVLPPLLTDEMIAQYTSALLAGTITSGWTFGAGAALQIPFAMQMAYRFNGCGVTQNVLYENQKLIANQFNSAIGKIQDSLSSTASALGKLQDVVNQNAQALNTLVKQLSSNFGAISSVLNDILSRLDKVEAEVQIDRLITGRLQSLQTYVTQQLIRAAEIRASANLAATKMSECVLGQSKRVDFCGKGCHLMSFPQSAPHGVVFLHVTYVPAQEKNFTTAPAICHDGKAHFPREGVFVSNGTHWFVTQRNFYEPQIITTDNTFVSGNCDVVIGIVNNTVYDPLQPELESFKEELDKYFKNHTSPDVDLGDISGINASVVNIQKEIDRLNEVAKNLNESLIDLQELGKYEQYIK

SEQ ID NO: 2255 - protein, 1211 aa, Artificial Sequence
  SARS-CoV-2/2019-nCoV/USA-CruiseA-18/2020__MT159716.1 spike protein (1-1211)(I909C_Y1047C)
MFVFLVLLPLVSSQCVNLTTRTQLPPAYTNSFTRGVYYPDKVFRSSVLHSTQDLFLPFFSNVTWFHAIHVSGTNGTKRFDNPVLPFNDGVYFASTEKSNIIRGWIFGTTLDSKTQSLLIVNNATNVVIKVCEFQFCNDPFLGVYYHKNNKSWMESELRVYSSANNCTFEYVSQPFLMDLEGKQGNFKNLREFVFKNIDGYFKIYSKHTPINLVRDLPQGFSALEPLVDLPIGINITRFQTLLALHRSYLTPGDSSSGWTAGAAAYYVGYLQPRTFLLKYNENGTITDAVDCALDPLSETKCTLKSFTVEKGIYQTSNFRVQPTESIVRFPNITNLCPFGEVFNATRFASVYAWNRKRISNCVADYSVLYNSASFSTFKCYGVSPTKLNDLCFTNVYADSFVIRGDEVRQIAPGQTGKIADYNYKLPDDFTGCVIAWNSNNLDSKVGGNYNYLYRLFRKSNLKPFERDISTEIYQAGSTPCNGVEGFNCYFPLQSYGFQPTNGVGYQPYRVVVLSFELLHAPATVCGPKKSTNLVKNKCVNFNFNGLTGTGVLTESNKKFLPFQQFGRDIADTTDAVRDPQTLEILDITPCSFGGVSVITPGTNTSNQVAVLYQDVNCTEVPVAIHADQLTPTWRVYSTGSNVFQTRAGCLIGAEHVNNSYECDIPIGAGICASYQTQTNSPRRARSVASQSIIAYTMSLGAENSVAYSNNSIAIPTNFTISVTTEILPVSMTKTSVDCTMYICGDSTECSNLLLQYGSFCTQLNRALTGIAVEQDKNTQEVFAQVKQIYKTPPIKDFGGFNFSQILPDPSKPSKRSFIEDLLFNKVTLADAGFIKQYGDCLGDIAARDLICAQKFNGLTVLPPLLTDEMIAQYTSALLAGTITSGWTFGAGAALQIPFAMQMAYRFNGCGVTQNVLYENQKLIANQFNSAIGKIQDSLSSTASALGKLQDVVNQNAQALNTLVKQLSSNFGAISSVLNDILSRLDKVEAEVQIDRLITGRLQSLQTYVTQQLIRAAEIRASANLAATKMSECVLGQSKRVDFCGKGCHLMSFPQSAPHGVVFLHVTYVPAQEKNFTTAPAICHDGKAHFPREGVFVSNGTHWFVTQRNFYEPQIITTDNTFVSGNCDVVIGIVNNTVYDPLQPELDSFKEELDKYFKNHTSPDVDLGDISGINASVVNIQKEIDRLNEVAKNLNESLIDLQELGKYEQYIK

SEQ ID NO: 2256 - protein, 1211 aa, Artificial Sequence
  SARS-CoV-2/SARS-CoV-2/Yunnan-01/human/2020/CHN__MT049951.1 spike protein (1-1211)(I909C_Y1047C)
MFVFLVLLPLVSSQCVNLTTRTQLPPANTNSFTRGVYYPDKVFRSSVLHSTQDLFLPFFSNVTWFHAIHVSGTNGTKRFDNPVLPFNDGVYFASTEKSNIIRGWIFGTTLDSKTQSLLIVNNATNVVIKVCEFQFCNDPFLGVYYHKNNKSWMESEFRVYSSANNCTFEYVSQPFLMDLEGKQGNFKNLREFVFKNIDGYFKIYSKHTPINLVRDLPQGFSALEPLVDLPIGINITRFQTLLALHRSYLTPGDSSSGWTAGAAAYYVGYLQPRTFLLKYNENGTITDAVDCALDPLSETKCTLKSFTVEKGIYQTSNFRVQPTESIVRFPNITNLCPFGEVFNATRFASVYAWNRKRISNCVADYSVLYNSASFSTFKCYGVSPTKLNDLCFTNVYADSFVIRGDEVRQIAPGQTGKIADYNYKLPDDFTGCVIAWNSNNLDSKVGGNYNYLYRLFRKSNLKPFERDISTEIYQAGSTPCNGVEGFNCYFPLQSYGFQPTNGVGYQPYRVVVLSFELLHAPATVCGPKKSTNLVKNKCVNFNFNGLTGTGVLTESNKKFLPFQQFGRDIADTTDAVRDPQTLEILDITPCSFGGVSVITPGTNTSNQVAVLYQDVNCTEVPVAIHADQLTPTWRVYSTGSNVFQTRAGCLIGAEHVNNSYECDIPIGAGICASYQTQTNSPRRARSVASQSIIAYTMSLGAENSVAYSNNSIAIPTNFTISVTTEILPVSMTKTSVDCTMYICGDSTECSNLLLQYGSFCTQLNRALTGIAVEQDKNTQEVFAQVKQIYKTPPIKDFGGFNFSQILPDPSKPSKRSFIEDLLFNKVTLADAGFIKQYGDCLGDIAARDLICAQKFNGLTVLPPLLTDEMIAQYTSALLAGTITSGWTFGAGAALQIPFAMQMAYRFNGCGVTQNVLYENQKLIANQFNSAIGKIQDSLSSTASALGKLQDVVNQNAQALNTLVKQLSSNFGAISSVLNDILSRLDKVEAEVQIDRLITGRLQSLQTYVTQQLIRAAEIRASANLAATKMSECVLGQSKRVDFCGKGCHLMSFPQSAPHGVVFLHVTYVPAQEKNFTTAPAICHDGKAHFPREGVFVSNGTHWFVTQRNFYEPQIITTDNTFVSGNCDVVIGIVNNTVYDPLQPELDSFKEELDKYFKNHTSPDVDLGDISGINASVVNIQKEIDRLNEVAKNLNESLIDLQELGKYEQYIK

SEQ ID NO: 2257 - protein, 1211 aa, Artificial Sequence
  SARS-CoV-2/USA/WA-UW292/2020__EPI_ISL_418077 spike protein (1-1211)(I909C_Y1047C)
MFVFLVLLPLVSSQCVNLTTRTQLPPAYTNSFTRGVYYPDKVFRSSVLHSTQDLFLPFFSNVTWFHAIHVSGTNGTKRFDNPVLPFNDGVYFASTEKSNIIRGWIFGTTLDSKTQSLLIVNNATNVVIKVCEFQFCNDPFLGVYYHKNNKSWMESEFRVYSSANNCTFEYVSQPFLMDLEGKQGNFKNLREFVFKNIDGYFKIYSKHTPINLVRDLPQGFSALEPLVDLPIGINITRFQTLLALHRSYLTPGDSSSGWTAGAAAYYVGYLQPRTFLLKYNENGTITDAVDCALDPLSETKCTLKSFTVEKGIYQTSNFRVQPTESIVRFPNITNLCPFGEVFNATRFASVYAWNRKRISNCVADYSVLYNSASFSTFKCYGVSPTKLNDLCFTNVYADSFVIRGDEVRQIAPGQTGKIADYNYKLPDDFTGCVIAWNSNNLDSKVGGNYNYLYRLFRKSNLKPFERDISTEIYQASSTPCNGVEGFNCYFPLQSYGFQPTNGVGYQPYRVVVLSFELLHAPATVCGPKKSTNLVKNKCVNFNFNGLTGTGVLTESNKKFLPFQQFGRDIADTTDAVRDPQTLEILDITPCSFGGVSVITPGTNTSNQVAVLYQDVNCTEVPVAIHADQLTPTWRVYSTGSNVFQTRAGCLIGAEHVNNSYECDIPIGAGICASYQTQTNSPRRARSVASQSIIAYTMSLGAENSVAYSNNSIAIPTNFTISVTTEILPVSMTKTSVDCTMYICGDSTECSNLLLQYGSFCTQLNRALTGIAVEQDKNTQEVFAQVKQIYKTPPIKDFGGFNFSQILPDPSKPSKRSFIEDLLFNKVTLADAGFIKQYGDCLGDIAARDLICAQKFNGLTVLPPLLTDEMIAQYTSALLAGTITSGWTFGAGAALQIPFAMQMAYRFNGCGVTQNVLYENQKLIANQFNSAIGKIQDSLSSTASALGKLQDVVNQNAQALNTLVKQLSSNFGAISSVLNDILSRLDKVEAEVQIDRLITGRLQSLQTYVTQQLIRAAEIRASANLAATKMSECVLGQSKRVDFCGKGCHLMSFPQSAPHGVVFLHVTYVPAQEKNFTTAPAICHDGKAHFPREGVFVSNGTHWFVTQRNFYEPQIITTDNTFVSGNCDVVIGIVNNTVYDPLQPELDSFKEELDKYFKNHTSPDVDLGDISGINASVVNIQKEIDRLNEVAKNLNESLIDLQELGKYEQYIK

SEQ ID NO: 2258 - protein, 1211 aa, Artificial Sequence
  SARS-CoV-2/Iceland/192/2020__EPI_ISL_417819 spike protein (1-1211)(I909C_Y1047C)
MFVFFVLLPLVSSQCVNLTTRTQLPPAYTNSFTRGVYYPDKVFRSSVLHSTQDLFLPFFSNVTWFHAIHVSGTNGTKRFDNPVLPFNDGVYFASTEKSNIIRGWIFGTTLDSKTQSLLIVNNATNVVIKVCEFQFCNDPFLGVYYHKNNKSWMESEFRVYSSANNCTFEYVSQPFLMDLEGKQGNFKNLREFVFKNIDGYFKIYSKHTPINLVRDLPQGFSALEPLVDLPIGINITRFQTLLALHRSYLTPGDSSSGWTAGAAAYYVGYLQPRTFLLKYNENGTITDAVDCALDPLSETKCTLKSFTVEKGIYQTSNFRVQPTESIVRFPNITNLCPFGEVFNATRFASVYAWNRKRISNCVADYSVLYNSASFSTFKCYGVSPTKLNDLCFTNVYADSFVIRGDEVRQIAPGQTGKIADYNYKLPDDFTGCVIAWNSNNLDSKVGGNYNYLYRLFRKSNLKPFERDISTEIYQAGSTPCNGVEGFNCYFPLQSYGFQPTNGVGYQPYRVVVLSFELLHAPATVCGPKKSTNLVKNKCVNFNFNGLTGTGVLTESNKKFLPFQQFGRDIADTTDAVRDPQTLEILDITPCSFGGVSVITPGTNTSNQVAVLYQGVNCTEVPVAIHADQLTPTWRVYSTGSNVFQTRAGCLIGAEHVNNSYECDIPIGAGICASYQTQTNSPRRARSVASQSIIAYTMSLGAENSVAYSNNSIAIPTNFTISVTTEILPVSMTKTSVDCTMYICGDSTECSNLLLQYGSFCTQLNRALTGIAVEQDKNTQEVFAQVKQIYKTPPIKDFGGFNFSQILPDPSKPSKRSFIEDLLFNKVTLADAGFIKQYGDCLGDIAARDLICAQKFNGLTVLPPLLTDEMIAQYTSALLAGTITSGWTFGAGAALQIPFAMQMAYRFNGCGVTQNVLYENQKLIANQFNSAIGKIQDSLSSTASALGKLQDVVNQNAQALNTLVKQLSSNFGAISSVLNDILSRLDKVEAEVQIDRLITGRLQSLQTYVTQQLIRAAEIRASANLAATKMSECVLGQSKRVDFCGKGCHLMSFPQSAPHGVVFLHVTYVPAQEKNFTTAPAICHDGKAHFPREGVFVSNGTHWFVTQRNFYEPQIITTDNTFVSGNCDVVIGIVNNTVYDPLQPELDSFKEELDKYFKNHTSPDVDLGDISGINASVVNIQKEIDRLNEVAKNLNESLIDLQELGKYEQYIK

SEQ ID NO: 2259 - protein, 1211 aa, Artificial Sequence
  SARS-CoV-2/Belgium/ULG-6939/2020__EPI_ISL_417020 spike protein (1-1211)(I909C_Y1047C)
MFVFLVLLPLVSSQCVNLTTRTQLPPAYTNSFTRGVYYPDKVFRSSVLHSTQDLFLPFFSNVTWFHAIHVSGTNGTKRFDNPVLPFNDGVYFASTEKSNIIRGWIFGTTLDSKTQSLLIVNNATNVVIKVCEFQFCNDPFLGVYYHKNNKSWMESEFRVYSSANNCTFEYVSQPFLMDLEGKQGNFKNLREFVFKNIDGYFKIYSKHTPINLVRDLPQGFSALEPLVDLPIGINITRFQTLLALHRSYLTPGDSSSGWTAGAAAYYVGYLQPRTFLLKYNENGTITDAVDCALDPLSETKCTLKSFTVEKGIYQTSNFRVQPTESIVRFPNITNLCPFGEVFNATRFASVYAWNRKRISNCVADYSVLYNSASFSTFKCYGVSPTKLNDLCFTNVYADSFVIRGDEVRQIAPGQTGKIADYNYKLPDDFTGCVIAWNSNNLDSKVGGNYNYLYRLFRKSNLKPFERDISTEIYQAGSTPCNGVEGFNCYFPLQSYGFQPTNGVGYQPYRVVVLSFELLHAPATVCGPKKSTNLVKNKCVNFNFNGLTGTGVLTESNKKFLPFQQFGRDIADTTDAVRDPQTLEILDITPCSFGGVSVITPGTNTSNQVAVLYQGVNCTEVPVAIHADQLTPTWRVYSTGSNVFQTRAGCLIGAEHVNNSYECDIPIGAGICASYQTQTNSPRRARSVASQSIIAYTMSLGAENSVVYSNNSIAIPTNFTISVTTEILPVSMTKTSVDCTMYICGDSTECSNLLLQYGSFCTQLNRALTGIAVEQDKNTQEVFAQVKQIYKTPPIKDFGGFNFSQILPDPSKPSKRSFIEDLLFNKVTLADAGFIKQYGDCLGDIAARDLICAQKFNGLTVLPPLLTDEMIAQYTSALLAGTITSGWTFGAGAALQIPFAMQMAYRFNGCGVTQNVLYENQKLIANQFNSAIGKIQDSLSSTASALGKLQDVVNQNAQALNTLVKQLSSNFGAISSVLNDILSRLDKVEAEVQIDRLITGRLQSLQTYVTQQLIRAAEIRASANLAATKMSECVLGQSKRVDFCGKGCHLMSFPQSAPHGVVFLHVTYVPAQEKNFTTAPAICHDGKAHFPREGVFVSNGTHWFVTQRNFYEPQIITTDNTFVSGNCDVVIGIVNNTVYDPLQPELDSFKEELDKYFKNHTSPDVDLGDISGINASVVNIQKEIDRLNEVAKNLNESLIDLQELGKYEQYIK

SEQ ID NO: 2260 - protein, 1211 aa, Artificial Sequence
  SARS-CoV-2/France/HF2496/2020__EPI_ISL_418231 spike protein (1-1211)(I909C_Y1047C)
MFVFLVLLPLVSSQCVNLTTRTQLPPAYTNSFTRGVYYPDKVFRSSVLHSTQDLFLPFFSNVTWFHAIHVSGTNGTKRFDNPVLPFNDGVYFASTEKSNIIRGWIFGTTLDSKTQSLLIVNNATNVVIKVCEFQFCNDPFLGVYYHKNNKSWMESEFRVYSSANNCTFEYVSQPFLMDLEGKQGNFKNLREFVFKNIDGYFKIYSKHTPINLVRDLPQGFSALEPLVDLPIGINITRFQTLLALHRSYLTPGDSSSGWTAGAAAYYVGYLQPRTFLLKYNENGTITDAVDCALDPLSETKCTLKSFTVEKGIYQTSNFRVQPTESIVRFPNITNLCPFGEVFNATRFASVYAWNRKRISNCVADYSVLYNSASFSTFKCYGVSPTKLNDLCFTNVYADSFVIRGDEVRQIAPGQTGKIADYNYKLPDDFTGCVIAWNSNNLDSKVGGNYNYLYRLFRKSNLKPFERDISTEIYQAGSTPCNGVEGFNCYFPLQSYGFQPTNGVGYQPYRVVVLSFELLHAPATVCGPKKSTNLVKNKCVNFNFNGLTGTGVLTESNKKFLPFQQFGRDIADTTDAVRDPQTLEILDITPCSFGGVSVITPGTNTSNQVAVLYQGVNCTEVPVAIHADQLTPTWRVYSTGSNVFQTRAGCLIGAEHVNNSYECDIPIGAGICASYQTQTNSPRRARSVASQSIIAYTMSLGAENSVAYSNNSIAIPTNFTISVTTEILPVSMTKTSVDCTMYICGDSTECSNLLLQYGSFCTQLNRALTGIAVEQDKNTQEVFAQVKQIYKTPPIKDFGGFNFSQILPDPSKPSKRSFIEDLLFNKVTLADAGFIKQYGDCLGDIVARDLICAQKFNGLTVLPPLLTDEMIAQYTSALLAGTITSGWTFGAGAALQIPFAMQMAYRFNGCGVTQNVLYENQKLIANQFNSAIGKIQDSLSSTASALGKLQDVVNQNAQALNTLVKQLSSNFGAISSVLNDILSRLDKVEAEVQIDRLITGRLQSLQTYVTQQLIRAAEIRASANLAATKMSECVLGQSKRVDFCGKGCHLMSFPQSAPHGVVFLHVTYVPAQEKNFTTAPAICHDGKAHFPREGVFVSNGTHWFVTQRNFYEPQIITTDNTFVSGNCDVVIGIVNNTVYDPLQPELDSFKEELDKYFKNHTSPDVDLGDISGINASVVNIQKEIDRLNEVAKNLNESLIDLQELGKYEQYIK

SEQ ID NO: 2261 - protein, 1211 aa, Artificial Sequence
  SARS-CoV-2/USA/WA-UW291/2020__EPI_ISL_418076 spike protein (1-1211)(I909C_Y1047C)
MFVFLVLLPLVSSQCVNLTTRTQLPPAYTNSFTRGVYYPDKVFRSSVLHSTQDLFLPFFSNVTWFHAIHVSGTNGTKRFDNPVLPFNDGVYFASTEKSNIIRGWIFGTTLDSKTQSLLIVNNATNVVIKVCEFQFCNDPFLGVYYHKNNKSWMESEFRVYSSANNCTFEYVSQPFLMDLEGKQGNFKNLREFVFKNIDGYFKIYSKHTPINLVRDLPQGFSALEPLVDLPIGINITRFQTLLALHRSYLTPGDSSSGWTAGAAAYYVGYLQPRTFLLKYNENGTITDAVDCALDPLSETKCTLKSFTVEKGIYQTSNFRVQPTESIVRFPNITNLCPFGEVFNATRFASVYAWNRKRISNCVADYSVLYNSASFSTFKCYGVSPTKLNDLCFTNVYADSFVIRGDEVRQIAPGQTGKIADYNYKLPDDFTGCVIAWNSNNLDSKVGGNYNYLYRLFRKSNLKPFERDISTEIYQAGSTPCNGVEGFNCYFPLQSYGFQPTNGVGYQPYRVVVLSFELLHAPATVCGPKKSTNLVKNKCVNFNFNGLTGTGVLTESNKKFLPFQQFGRDIADTTDAVRDPQTLEILDITPCSFGGVSVITPGTNTSNQVAVLYQGVNCTEVPVAIHADQLTPTWRVYSTGSNVFQTRAGCLIGAEHVNNSYECDIPIGAGICASYQTQTNSPRRARSVASQSIIAYTMSLGAENSVAYSNNSIAIPTNFTISVTTEILPVSMTKTSVDCTMYICGDSTECSNLLLQYGSFCTQLNRALTGIAVEQDKNTQEVFAQVKQIYKTPPIKDFGGFNFSQILPDPSKPSKRSFIEDLLFNKVTLADAGFIKQYGDCLGDIAARDLICAQKFNGLTVLPPLLTDEMIAQYTSALLAGTITSGWTFGAGAALQIPFAMQMAYRFNGCGVTQNVLYENQKLIANQFNSAIGKIQYSLSSTASALGKLQDVVNQNAQALNTLVKQLSSNFGAISSVLNDILSRLDKVEAEVQIDRLITGRLQSLQTYVTQQLIRAAEIRASANLAATKMSECVLGQSKRVDFCGKGCHLMSFPQSAPHGVVFLHVTYVPAQEKNFTTAPAICHDGKAHFPREGVFVSNGTHWFVTQRNFYEPQIITTDNTFVSGNCDVVIGIVNNTVYDPLQPELDSFKEELDKYFKNHTSPDVDLGDISGINASVVNIQKEIDRLNEVAKNLNESLIDLQELGKYEQYIK

SEQ ID NO: 2262 - protein, 1211 aa, Artificial Sequence; identical to SEQ ID NO: 2225
  SARS-CoV-2/Portugal/PT0034/2020__EPI_ISL_418019 spike protein (1-1211)(I909C_Y1047C)

SEQ ID NO: 2263 - protein, 1211 aa, Artificial Sequence
  SARS-CoV-2/Iceland/202/2020__EPI_ISL_417750 spike protein (1-1211)(I909C_Y1047C)
MFVFLVLLPLVSSQCVNLTTRTQLPPAYTNSFTRGVYYPDKVFRSSVLHSTQDLFLPFFSNVTWFHAIHVSGTNGTKRFDNPVLPFNDGVYFASTEKSNIIRGWIFGTTLDSKTQSLLIVNNATNVVIKVCEFQFCNDPFLGVYYHKNNKSWMESEFRVYSSANNCTFEYVSQPFLMDLEGKQGNFKNLREFVFKNIDGYFKIYSKHTPINLVRDLPQGFSALEPLVDLPIGINITRFQTLLALHRSYLTPGDSSSGWTAGAAAYYVGYLQPRTFLLKYNENGTITDAVDCALDPLSETKCTLKSFTVEKGIYQTSNFRVQPTESIVRFPNITNLCPFGEVFNATRFASVYAWNRKRISNCVADYSVLYNSASFSTFKCYGVSPTKLNDLCFTNVYADSFVIRGDEVRQIAPGQTGKIADYNYKLPDDFTGCVIAWNSNNLDSKVGGNYNYLYRLFRKSNLKPFERDISTEIYQAGSTPCNGVEGFNCYFPLQSYGFQPTNGVGYQPYRVVVLSFELLHAPATVCGPKKSTNLVKNKCVNFNFNGLTGTGVLTESNKKFLPFQQFGRDIADTTDAVRDPQTLEILDITPCSFGGVSVITPGTNTSNQVAVLYQDVNCTEVPVAIHADQLTPTWRVYSTGSNVFQTRAGCLIGAEHVNNSYECDIPIGAGICASYQTQTNSPRRARSVASQSIIAYTMSLGAENSVAYSNNSIAIPTNFTISVTTEILPVSMTKTSVDCTMYICGDSTECSNLLLQYGSFCTQLNRALTGIAVEQDKNTQEVFAQVKQIYKTPPIKDFGGFNFSQILPDPSKPSKRSFIEDLLFNKVTLADAGFIKQYGDCLGDIAARDLICAQKFNGLTVLPPLLTDEMIAQYTSALLAGTITSGWTFGAGAALQIPFAMQMAYRFNGCGVTQNVLYENQKLIANQFNSAIGKIQDSLSSTASALGKLQDVVNQNAQALNTLVKQLSSNFGAISSVLNDILSRLDKVEAEVQIDRLITGRLQSLQTYVTQQLIRAAEIRASANLAATKMSECVLGQSKRVDFCGKGCHLMSFPQSAPHGVVFLHVTYVPAQEKNFTTAPAICHDGKAHFPREGVFVSNGTHWFVTQRNFYEPQIITTDNTFVSGNCDVVIGIVNNTVYDPLQPELDSFKEELDKYFKNHTSPDVDLGDIPGINASVVNIQKEIDRLNEVAKNLNESLIDLQELGKYEQYIK

SEQ ID NO: 2264 - protein, 1211 aa, Artificial Sequence
  SARS-CoV-2/USA/WA-UW261/2020__EPI_ISL_418046 spike protein (1-1211)(I909C_Y1047C)
MFVFLVLLPLVSSQCVNLTTRTQLPPAYTNSFTRGVYYPDKVFRSSVLHSTQDLFLPFFSNVTWFHAIHVSGTNGTKRFDNPVLPFNDGVYFASTEKSNIIRGWIFGTTLDSKTQSLLIVNNATNVVIKVCEFQFCNDPFLGVYYHKNNKSWMESEFRVYSSANNCTFEYVSQPFLMDLEGKQGNFKNLREFVFKNIDGYFKIYSKHTPINLVRDLPQGFSALEPLVDLPIGINITRFQTLLALHRSYLTPGDSSSGWTAGAAAYYVGYLQPRTFLLKYNENGTITDAVDCALDPLSETKCTLKSFTVEKGIYQTSNFRVQPTESIVRFPNITNLCPFGEVFNATRFTSVYAWNRKRISNCVADYSVLYNSASFSTFKCYGVSPTKLNDLCFTNVYADSFVIRGDEVRQIAPGQTGKIADYNYKLPDDFTGCVIAWNSNNLDSKVGGNYNYLYRLFRKSNLKPFERDISTEIYQAGSTPCNGVEGFNCYFPLQSYGFQPTNGVGYQPYRVVVLSFELLHAPATVCGPKKSTNLVKNKCVNFNFNGLTGTGVLTESNKKFLPFQQFGRDIADTTDAVRDPQTLEILDITPCSFGGVSVITPGTNTSNQVAVLYQDVNCTEVPVAIHADQLTPTWRVYSTGSNVFQTRAGCLIGAEHVNNSYECDIPIGAGICASYQTQTNSPRRARSVASQSIIAYTMSLGAENSVAYSNNSIAIPTNFTISVTTEILPVSMTKTSVDCTMYICGDSTECSNLLLQYGSFCTQLNRALTGIAVEQDKNTQEVFAQVKQIYKTPPIKDFGGFNFSQILPDPSKPSKRSFIEDLLFNKVTLADAGFIKQYGDCLGDIAARDLICAQKFNGLTVLPPLLTDEMIAQYTSALLAGTITSGWTFGAGAALQIPFAMQMAYRFNGCGVTQNVLYENQKLIANQFNSAIGKIQDSLSSTASALGKLQDVVNQNAQALNTLVKQLSSNFGAISSVLNDILSRLDKVEAEVQIDRLITGRLQSLQTYVTQQLIRAAEIRASANLAATKMSECVLGQSKRVDFCGKGCHLMSFPQSAPHGVVFLHVTYVPAQEKNFTTAPAICHDGKAHFPREGVFVSNGTHWFVTQRNFYEPQIITTDNTFVSGNCDVVIGIVNNTVYDPLQPELDSFKEELDKYFKNHTSPDVDLGDISGINASVVNIQKEIDRLNEVAKNLNESLIDLQELGKYEQYIK

SEQ ID NO: 2265 - protein, 1211 aa, Artificial Sequence
  SARS-CoV-2/Portugal/PT0035/2020__EPI_ISL_418020 spike protein (1-1211)(I909C_Y1047C)
MFVFLVLLPLVSSQCVNLTTRTQLPPAYTNSFTRGVYYPDKVFRSSVLHSTQDLFLPFFSNVTWFHAIHVSGTNGTKRFDNPVLPFNDGVYFASTEKSNIIRGWIFGTTLDSKTQSLLIVNNATNVVIKVCEFQFCNDPFLGVYYHKNNKSWMESEFRVYSSANNCTFEYVSQPFLMDLEGKQGNFKNLREFVFKNIDGYFKIYSKHTPINLVRDLPQGFSALEPLVDLPIGINITRFQTLLALHRSYLTPGDSSSGWTAGAAAYYVGYLQPRTFLLKYNENGTITDAVDCALDPLSETKCTLKSFTVEKGIYQTSNFRVQPTESIVRFPNITNLCPFGEVFNATRFASVYAWNRKRISNCVADYSVLYNSASFSTFKCYGVSPTKLNDLCFTNVYADSFVIRGDEVRQIAPGQTGKIADYNYKLPDDFTGCVIAWNSNNLDSKVGGNYNYLYRLFRKSNLKPFERDISTEIYQAGSTPCNGVEGFNCYFPLQSYGFQPTNGVGYQPYRVVVLSFELLHAPATVCGPKKSTNLVKNKCVNFNFNGLTGTGVLTESNKKFLPFQQFGRDIADTTDAVRDPQTLEILDITPCSFGGVSVITPGTNTSNQVAVLYQDVNCTEVPVAIHADQLTPTWRVYSTGSNVFQTRAGCLIGAEHVNNSYECDIPIGAGICASYQTQTNSPRRARSVASQSIIAYTMSLGAENSVAYSNNSIAIPTNFTISVTTEILPVSMTKTSVDCTMYICGDSTECSNLLLQYGSFCTQLNRALTGIAVEQDKNTQEVFAQVKQIYKTPPIKDFGGFNFSQILPDPSKPSKRSFIEDLLFNKVTLADAGFIKQYGDCLGDISARDLICAQKFNGLTVLPPLLTDEMIAQYTSALLAGTITSGWTFGAGAALQIPFAMQMAYRFNGCGVTQNVLYENQKLIANQFNSAIGKIQDSLSSTASALGKLQDVVNQNAQALNTLVKQLSSNFGAISSVLNDILSRLDKVEAEVQIDRLITGRLQSLQTYVTQQLIRAAEIRASANLAATKMSECVLGQSKRVDFCGKGCHLMSFPQSAPHGVVFLHVTYVPAQEKNFTTAPAICHDGKAHFPREGVFVSNGTHWFVTQRNFYEPQIITTDNTFVSGNCDVVIGIVNNTVYDPLQPELDSFKEELDKYFKNHTSPDVDLGDISGINASVVNIQKEIDRLNEVAKNLNESLIDLQELGKYEQYIK

SEQ ID NO: 2266 - protein, 1211 aa, Artificial Sequence
  SARS-CoV-2/USA/NY-NYUMC7/2020__EPI_ISL_418192 spike protein (1-1211)(I909C_Y1047C)
MFVFLVLLPLVSSQCVNLTTRTQLPPAYTNSFTRGVYYPDKVFRSSVLHSTQDLFLPFFSNVTWFHAIHVSGTNGTKRFDNPVLPFNDGVYFASTEKSNIIRGWIFGTTLDSKTQSLLIVNNATNVVIKVCEFQFCNDPFLGVYHHKNNKSWMESEFRVYSSANNCTFEYVSQPFLMDLEGKQGNFKNLREFVFKNIDGYFKIYSKHTPINLVRDLPQGFSALEPLVDLPIGINITRFQTLLALHRSYLTPGDSSSGWTAGAAAYYVGYLQPRTFLLKYNENGTITDAVDCALDPLSETKCTLKSFTVEKGIYQTSNFRVQPTESIVRFPNITNLCPFGEVFNATRFASVYAWNRKRISNCVADYSVLYNSASFSTFKCYGVSPTKLNDLCFTNVYADSFVIRGDEVRQIAPGQTGKIADYNYKLPDDFTGCVIAWNSNNLDSKVGGNYNYLYRLFRKSNLKPFERDISTEIYQAGSTPCNGVEGFNCYFPLQSYGFQPTNGVGYQPYRVVVLSFELLHAPATVCGPKKSTNLVKNKCVNFNFNGLTGTGVLTESNKKFLPFQQFGRDIADTTDAVRDPQTLEILDITPCSFGGVSVITPGTNTSNQVAVLYQGVNCTEVPVAIHADQLTPTWRVYSTGSNVFQTRAGCLIGAEHVNNSYECDIPIGAGICASYQTQTNSPRRARSVASQSIIAYTMSLGAENSVAYSNNSIAIPTNFTISVTTEILPVSMTKTSVDCTMYICGDSTECSNLLLQYGSFCTQLNRALTGIAVEQDKNTQEVFAQVKQIYKTPPIKDFGGFNFSQILPDPSKPSKRSFIEDLLFNKVTLADAGFIKQYGDCLGDIAARDLICAQKFNGLTVLPPLLTDEMIAQYTSALLAGTITSGWTFGAGAALQIPFAMQMAYRFNGCGVTQNVLYENQKLIANQFNSAIGKIQDSLSSTASALGKLQDVVNQNAQALNTLVKQLSSNFGAISSVLNDILSRLDKVEAEVQIDRLITGRLQSLQTYVTQQLIRAAEIRASANLAATKMSECVLGQSKRVDFCGKGCHLMSFPQSAPHGVVFLHVTYVPAQEKNFTTAPAICHDGKAHFPREGVFVSNGTHWFVTQRNFYEPQIITTDNTFVSGNCDVVIGIVNNTVYDPLQPELDSFKEELDKYFKNHTSPDVDLGDISGINASVVNIQKEIDRLNEVAKNLNESLIDLQELGKYEQYIK

SEQ ID NO: 2267 - protein, 1211 aa, Artificial Sequence
  SARS-CoV-2/Iceland/189/2020__EPI_ISL_417709 spike protein (1-1211)(I909C_Y1047C)
MFVFLVLLPLVSSQCVNLTTRTQLPPAYTNSFTRGVYYPDKVFRSSVLHSTQDLFLPFFSNVTWFHAIHVSGTNGTKRFDNPVLPFNDGVYFASTEKSNIIRGWIFGTTLDSKTQSLLIVNNATNVVIKVCEFQFCNDPFLGVYYHKNNKSWMESEFRVYSSANNCTFEYVSQPFLMDLEGKQGNFKNLREFVFKNIDGYFKIYSKHTPINLVRDLPQGFSALEPLVDLPIGINITRFQTLLALHRSYLTPGDSSSGWTAGAAAYYVGYLQPRTFLLKYNENGTITDAVDCALDPLSETKCTLKSFTVEKGIYQTSNFRVQPTESIVRFPNITNLCPFGEVFNATRFASVYAWNRKRISNCVADYSVLYNSASFSTFKCYGVSPTKLNDLCFTNVYADSFVIRGDEVRQIAPGQTGKIADYNYKLPDDFTGCVIAWNSNNLDSKVGGNYNYLYRLFRKSNLKPFERDISTEIYQAGSTPCNGVEGFNCYFPLQSYGFQPTNGVGYQPYRVVVLSFELLHAPATVCGPKKSTNLVKNKCVNFNFNGLTGTGVLTESNKKFLPFQQFGRDIADTTDAVRDPQTLEILDITPCSFGGVSVITPGTNTSNQVAVLYQGVNCTEVPVAIHADQLTPTWRVYSTGSNVFQTRAGCLIGAEHVNNSYECDIPIGAGICASYQTQTNSPRRARSVASQSIIAYTMSLGAENSVAYSNNSIAIPTNFTISVTTEILPVSMTKTSVDCTMYICGDSTECSNLLLQYGSFCTQLNRALTGIAVEQDKNTQEVFAQVKQIYKTPPIKDFGGFNFSQILPDPSKPSKRSFIEDLLFNKVTLADAGFTKQYGDCLGDIAARDLICAQKFNGLTVLPPLLTDEMIAQYTSALLAGTITSGWTFGAGAALQIPFAMQMAYRFNGCGVTQNVLYENQKLIANQFNSAIGKIQDSLSSTASALGKLQDVVNQNAQALNTLVKQLSSNFGAISSVLNDILSRLDKVEAEVQIDRLITGRLQSLQTYVTQQLIRAAEIRASANLAATKMSECVLGQSKRVDFCGKGCHLMSFPQSAPHGVVFLHVTYVPAQEKNFTTAPAICHDGKAHFPREGVFVSNGTHWFVTQRNFYEPQIITTDNTFVSGNCDVVIGIVNNTVYDPLQPELDSFKEELDKYFKNHTSPDVDLGDISGINASVVNIQKEIDRLNEVAKNLNESLIDLQELGKYEQYIK

SEQ ID NO: 2268 - protein, 1211 aa, Artificial Sequence
  SARS-CoV-2/Australia/NSW56/2020__EPI_ISL_417408 spike protein (1-1211)(I909C_Y1047C)
MFVFLVLLPLVSSQCVNLTTRTQLPPAYTNSFTRGVYYPDKVFRSSVLHSTQDLFLPFFSNVTWFHAIHVSGTNGTKRFDNPVLPFNDGVYFASTEKSNIIRGWIFGTTLDSKTQSLLIVNNATNVVIKVCEFQFCNDPFLGVYYHKNNKSWMESEFRVYSSANNCTFEYVSQPFLMDLEGKQGNFKNLREFVFKNIDGYFKIYSKHTPINLVRDLPQGFSALEPLVDLPIGINITRFQTLLALHRSYLTPGDSSSGWTAGAAAYYVGYLQPRTFLLKYNENGTITDAVDCALDPLSETKCTLKSFTVEKGIYQTSNFRVQPTESIVRFPNITNLCPFGEVFNATRFASVYAWNRKRISNCVADYSVLYNSASFSTFKCYGVSPTKLNDLCFTNVYADSFVIRGDEVRQIAPGQTGKIADYNYKLPDDFTGCVIAWNSNNLDSKVGGNYNYLYRLFRKSNLKPFERDISTEIYQAGSTPCNGVEGFNCYFPLQSYGFQPTNGVGYQPYRVVVLSFELLHAPATVCGPKKSTNLVKNKCVNFNFNGLTGTGVLTESNKKFLPFQQFGRDIADTTDAVRDPQTLEILDITPCSFGGVSVITPGTNTSNQVAVLYQDVNCTEVPVAIHADQLTPTWRVYSTGSNVFQTRAGCLIGAEHVNNSYECDIPIGAGICASYQTQTNSPRRARSVASQSIIAYTMSLGAENSVAYSNNSIAIPTNFTISVTTEILPVSMTKTSVDCTMYICGDSTECSNLLLQYGSFCTQLNRALTGIAVEQDKNTQEVFAQVKQIYKTPPIKDFGGFNFSQILPDSSKPSKRSFIEDLLFNKVTLADAGFIKQYGDCLGDIAARDLICAQKFNGLTVLPPLLTDEMIAQYTSALLAGTITSGWTFGAGAALQIPFAMQMAYRFNGCGVTQNVLYENQKLIANQFNSAIGKIQDSLSSTASALGKLQDVVNQNAQALNTLVKQLSSNFGAISSVLNDILSRLDKVEAEVQIDRLITGRLQSLQTYVTQQLIRAAEIRASANLAATKMSECVLGQSKRVDFCGKGCHLMSFPQSAPHGVVFLHVTYVPAQEKNFTTAPAICHDGKAHFPREGVFVSNGTHWFVTQRNFYEPQIITTDNTFVSGNCDVVIGIVNNTVYDPLQPELDSFKEELDKYFKNHTSPDVDLGDISGINASVVNIQKEIDRLNEVAKNLNESLIDLQELGKYEQYIK

SEQ ID NO: 2269 - protein, 1211 aa, Artificial Sequence
  SARS-CoV-2/Iceland/280/2020__EPI_ISL_417608 spike protein (1-1211)(I909C_Y1047C)
MFVFLVLLPLVSSQCVNLTTRTQLPPAYTNSFTRGVYYPDKVFRSSVLHSTQDLFLPFFSNVTWFHAIHVSGTNGTKRFDNPVLPFNDGVYFASTEKSNIIRGWIFGTTLDSKTQSLLIVNNATNVVIKVCEFQFCNDPFLGVYYHKNNKSWMESEFRVYSSANNCTFEYVSQPFLMDLEGKQGNFKNLREFVFKNIDGYFKIYSKHTPINLVRDLPQGFSALEPLVDLPIGINITRFQTLLALHRSYLTPGDSSSGWTAGAAAYYVGYLQPRTFLLKYNENGTITDAVDCALDPLSETKCTLKSFTVEKGIYQTSNFRVQPTESIVRFPNITNLCPFGEVFNATRFASVYAWNRKRISNCVADYSVLYNSASFSTFKCYGVSPTKLNDLCFTNVYADSFVIRGDEVRQIAPGQTGKIADYNYKLPDDFTGCVIAWNSNNLDSKVGGNYNYLYRLFRKSNLKPFERDISTEIYQAGSTPCNGVEGFNCYFPLQSYGFQPTNGVGYQPYRVVVLSFELLHAPATVCGPKKSTNLVKNKCVNFNFNGLTGTGVLTESNKKFLPFQQFGRDIADTTDAVRDPQTLEILDITPCSFGGVSVITPGTNTSNQVAVLYQGVNCTEVPVAIHADQLTPTWRVYSTGSNVFQTRAGCLIGAEHVNNSYECDIPIGAGICASYHTQTNSPRRARSVASQSIIAYTMSLGAENSVAYSNNSIAIPTNFTISVTTEILPVSMTKTSVDCTMYICGDSTECSNLLLQYGSFCTQLNRALTGIAVEQDKNTQEVFAQVKQIYKTPPIKDFGGFNFSQILPDPSKPSKRSFIEDLLFNKVTLADAGFIKQYGDCLGDIAARDLICAQKFNGLTVLPPLLTDEMIAQYTSALLAGTITSGWTFGAGAALQIPFAMQMAYRFNGCGVTQNVLYENQKLIANQFNSAIGKIQDSLSSTASALGKLQDVVNQNAQALNTLVKQLSSNFGAISSVLNDILSRLDKVEAEVQIDRLITGRLQSLQTYVTQQLIRAAEIRASANLAATKMSECVLGQSKRVDFCGKGCHLMSFPQSAPHGVVFLHVTYVPAQEKNFTTAPAICHDGKAHFPREGVFVSNGTHWFVTQRNFYEPQIITTDNTFVSGNCDVVIGIVNNTVYDPLQPELDSFKEELDKYFKNHTSPDVDLGDISGINASVVNIQKEIDRLNEVAKNLNESLIDLQELGKYEQYIK

SEQ ID NO: 2270 - protein, 1211 aa, Artificial Sequence; identical to SEQ ID NO: 2225
  SARS-CoV-2/Iceland/247/2020__EPI_ISL_417575 spike protein (1-1211)(I909C_Y1047C)

SEQ ID NO: 2271 - protein, 1211 aa, Artificial Sequence
  SARS-CoV-2/Iceland/238/2020__EPI_ISL_417566 spike protein (1-1211)(I909C_Y1047C)
MFVFLVLLPLVSSQCVNLTTRTQLPPAYTNSFTRGVYYPDKVFRSSVLHSTQDLFLPFFSNVTWFHAIHVSGTNGTKRFDNPVLPFNDGVYFASTEKSNIIRGWIFGTTLDSKTQSLLIVNNATNVVIKVCEFQFCNDPFLGVYYHKNNKSWMESEFRVYSSANNCTFEYVSQPFLMDLEGKQGNFKNLREFVFKNIDGYFKIYSKHTPINLVRDLPQGFSALEPLVDLPIGINITRFQTLLALHRSYLTPGDSSSGWTAGAAAYYVGYLQPRTFLLKYNENGTITDAVDCALDPLSETKCTLKSFTVEKGIYQTSNFRVQPTESIVRFPNITNLCPFGEVFNATRFASVYAWNRKRISNCVADYSVLYNSASFSTFKCYGVSPTKLNDLCFTNVYADSFVIRGDEVRQIAPGQTGKIADYNYKLPDDFTGCVIAWNSNNLDSKVGGNYNYLYRLFRKSNLKPFERDISTEIYQAGSTPCNGVEGFNCYFPLQSYGFQPTNGVGYQPYRVVVLSFELLHAPATVCGPKKSTNLVKNKCVNFNFNGLTGTGVLTESNKKFLPFQQFGRDIADTTDAVRDPQTLEILDITPCSFGGVSVITPGTNTSNQVAVLYQGVNCTEVPVAIHADQLTPTWRVYSTGSNVFQTRAGCLIGAEHVNNSYECDIPIGAGICASYQTQTNSPRRARSVASQSIIAYTMSLGAENSVAYSNNSIAIPTNFTISVTTEILPVSMTKTSVDCTMYICGDSTECSNLLLQYGSFCTQLNRALTGIAVEQDKNTQEVFAQVKQIYKTPPIKDFGGFNFSQILPDPSKPSKRSFIEDLLFNKVTLADVGFIKQYGDCLGDIAARDLICAQKFNGLTVLPPLLTDEMIAQYTSALLAGTITSGWTFGAGAALQIPFAMQMAYRFNGCGVTQNVLYENQKLIANQFNSAIGKIQDSLSSTASALGKLQDVVNQNAQALNTLVKQLSSNFGAISSVLNDILSRLDKVEAEVQIDRLITGRLQSLQTYVTQQLIRAAEIRASANLAATKMSECVLGQSKRVDFCGKGCHLMSFPQSAPHGVVFLHVTYVPAQEKNFTTAPAICHDGKAHFPREGVFVSNGTHWFVTQRNFYEPQIITTDNTFVSGNCDVVIGIVNNTVYDPLQPELDSFKEELDKYFKNHTSPDVDLGDISGINASVVNIQKEIDRLNEVAKNLNESLIDLQELGKYEQYIK

SEQ ID NO: 2272 - protein, 1211 aa, Artificial Sequence
  SARS-CoV-2/Greece/16/2020__EPI_ISL_418265 spike protein (1-1211)(I909C_Y1047C)
MFVFLVLLPLVSSQCVNLTTRTQLPPAYTNSFTRGVYYPDKVFRSSVLHSTQDLFLPFFSNVTWFHAIHVSGTNGTKRFDNPVLPFNDGVYFASTEKSNIIRGWIFGTTLDSKTQSLLIVNNATNVVIKVCEFQFCNDPFLGVYYHKNNKSWMESEFRVYSSANNCTFEYVSQPFLMDLEGKQGNFKNLREFVFKNVDGYFKIYSKHTPINLVRDLPQGFSALEPLVDLPIGINITRFQTLLALHRSYLTPGDSSSGWTAGAAAYYVGYLQPRTFLLKYNENGTITDAVDCALDPLSETKCTLKSFTVEKGIYQTSNFRVQPTESIVRFPNITNLCPFGEVFNATRFASVYAWNRKRISNCVADYSVLYNSASFSTFKCYGVSPTKLNDLCFTNVYADSFVIRGDEVRQIAPGQTGKIADYNYKLPDDFTGCVIAWNSNNLDSKVGGNYNYLYRLFRKSNLKPFERDISTEIYQAGSTPCNGVEGFNCYFPLQSYGFQPTNGVGYQPYRVVVLSFELLHAPATVCGPKKSTNLVKNKCVNFNFNGLTGTGVLTESNKKFLPFQQFGRDIADTTDAVRDPQTLEILDITPCSFGGVSVITPGTNTSNQVAVLYQDVNCTEVPVAIHADQLTPTWRVYSTGSNVFQTRAGCLIGAEHVNNSYECDIPIGAGICASYQTQTNSPRRARSVASQSIIAYTMSLGAENSVAYSNNSIAIPTNFTISVTTEILPVSMTKTSVDCTMYICGDSTECSNLLLQYGSFCTQLNRALTGIAVEQDKNTQEVFAQVKQIYKTPPIKDFGGFNFSQILPDPSKPSKRSFIEDLLFNKVTLADAGFIKQYGDCLGDIAARDLICAQKFNGLTVLPPLLTDEMIAQYTSALLAGTITSGWTFGAGAALQIPFAMQMAYRFNGCGVTQNVLYENQKLIANQFNSAIGKIQDSLSSTASALGKLQDVVNQNAQALNTLVKQLSSNFGAISSVLNDILSRLDKVEAEVQIDRLITGRLQSLQTYVTQQLIRAAEIRASANLAATKMSECVLGQSKRVDFCGKGCHLMSFPQSAPHGVVFLHVTYVPAQEKNFTTAPAICHDGKAHFPREGVFVSNGTHWFVTQRNFYEPQIITTDNTFVSGNCDVVIGIVNNTVYDPLQPELDSFKEELDKYFKNHTSPDVDLGDISGINASVVNIQKEIDRLNEVAKNLNESLIDLQELGKYEQYIK

SEQ ID NO: 2273 - protein, 1211 aa, Artificial Sequence
  SARS-CoV-2/Iceland/319/2020__EPI_ISL_417648 spike protein (1-1211)(I909C_Y1047C)
MFVFLVLLPLVSSQCVNLTTRTQLPPAYTNSFTRGVYYPDKVFRSSVLHSTQDLFLPFFSNVTWFHAIHVSGTNGTKRFDNPVLPFNDGVYFASTEKSNIIRGWIFGTTLDSKTQSLLIVNNATNVVIKVCEFQFCNDPFLGVYYHKNNKSWMESEFRVYSSANNCTFEYVSQPFLIDLEGKQGNFKNLREFVFKNIDGYFKIYSKHTPINLVRDLPQGFSALEPLVDLPIGINITRFQTLLALHRSYLTPGDSSSGWTAGAAAYYVGYLQPRTFLLKYNENGTITDAVDCALDPLSETKCTLKSFTVEKGIYQTSNFRVQPTESIVRFPNITNLCPFGEVFNATRFASVYAWNRKRISNCVADYSVLYNSASFSTFKCYGVSPTKLNDLCFTNVYADSFVIRGDEVRQIAPGQTGKIADYNYKLPDDFTGCVIAWNSNNLDSKVGGNYNYLYRLFRKSNLKPFERDISTEIYQAGSTPCNGVEGFNCYFPLQSYGFQPTNGVGYQPYRVVVLSFELLHAPATVCGPKKSTNLVKNKCVNFNFNGLTGTGVLTESNKKFLPFQQFGRDIADTTDAVRDPQTLEILDITPCSFGGVSVITPGTNTSNQVAVLYQGVNCTEVPVAIHADQLTPTWRVYSTGSNVFQTRAGCLIGAEHVNNSYECDIPIGAGICASYQTQTNSPRRARSVASQSIIAYTMSLGAENSVAYSNNSIAIPTNFTISVTTEILPVSMTKTSVDCTMYICGDSTECSNLLLQYGSFCTQLNRALTGIAVEQDKNTQEVFAQVKQIYKTPPIKDFGGFNFSQILPDPSKPSKRSFIEDLLFNKVTLADAGFIKQYGDCLGDIAARDLICAQKFNGLTVLPPLLTDEMIAQYTSALLAGTITSGWTFGAGAALQIPFAMQMAYRFNGCGVTQNVLYENQKLIANQFNSAIGKIQDSLSSTASALGKLQDVVNQNAQALNTLVKQLSSNFGAISSVLNDILSRLDKVEAEVQIDRLITGRLQSLQTYVTQQLIRAAEIRASANLAATKMSECVLGQSKRVDFCGKGCHLMSFPQSAPHGVVFLHVTYVPAQEKNFTTAPAICHDGKAHFPREGVFVSNGTHWFVTQRNFYEPQIITTDNTFVSGNCDVVIGIVNNTVYDPLQPELDSFKEELDKYFKNHTSPDVDLGDISGINASVVNIQKEIDRLNEVAKNLNESLIDLQELGKYEQYIK

SEQ ID NO: 2274 - protein, 1211 aa, Artificial Sequence
  SARS-CoV-2/Congo/94/2020__EPI_ISL_417947 spike protein (1-1211)(I909C_Y1047C)
MFVFLVLLPLVSSQCVNLTTRTQLPPAYTNSFTRGVYYPDKVFRSSVLHSTQDLFLPFFSNVTWFHAIHVSGTNGTKRFDNPVLPFNDGVYFASTEKSNIIRGWIFGTTLDSKTQSLLIVNNATNVVIKVCEFQFCNDPFLGVYYHKNNKSWMESEFRVYSSANNCTFEYVSQPFLMDLEGKQGNFKNLREFVFKNIDGYFKIYSKHTPINLVRDLPQGFSALEPLVDLPIGINITRFQTLLALHRSYLTPGDSSSGWTAGAAAYYVGYLQPRTFLLKYNENGTITDAVDCALDPLSETKCTLKSFTVEKGIYQTSNFRVQPTESIVRFPNITNLCPFGEVFNATRFASVYAWNRKRISNCVADYSVLYNSASFSTFKCYGVSPTKLNDLCFTNVYADSFVIRGDEVRQIAPGQTGKIADYNYKLPDDFTGCVIAWNSNNLDSKVGGNYNYLYRLFRKSNLKPFERDISTEIYQAGSTPCNGVEGFNCYFPLQSYGFQPTNGVGYQPYRVVVLSFELLHAPATVCGPKKSTNLVKNKCVNFNFNGLTGTGVLTESNKKFLPFQQFGRDIADTTDAVRDPQTLEILDITPCSFGGVSVITPGTNTSNQVAVLYQGVNCTEVPVAIHADQLTPTWRVYSTGSNVFQTRAGCLIGAEHVNNSYECDIPIGAGICASYQTQTNSPRRARSVASQSIIAYTMSLGAENSVAYSNNSIAIPTNFTISVTTEILPVSMTKTSVDCTMYICGDSTECSNLLLQYGSFCTQLNRALTGIAVEQDKNTQEVFAQVKQIYKTPPIKDFGGFNFSQILPDPSKPSKRSFIEDILFNKVTLADAGFIKQYGDCLGDIAARDLICAQKFNGLTVLPPLLTDEMIAQYTSALLAGTITSGWTFGAGAALQIPFAMQMAYRFNGCGVTQNVLYENQKLIANQFNSAIGKIQDSLSSTASALGKLQDVVNQNAQALNTLVKQLSSNFGAISSVLNDILSRLDKVEAEVQIDRLITGRLQSLQTYVTQQLIRAAEIRASANLAATKMSECVLGQSKRVDFCGKGCHLMSFPQSAPHGVVFLHVTYVPAQEKNFTTAPAICHDGKAHFPREGVFVSNGTHWFVTQRNFYEPQIITTDNTFVSGNCDVVIGIVNNTVYDPLQPELDSFKEELDKYFKNHTSPDVDLGDISGINASVVNIQKEIDRLNEVAKNLNESLIDLQELGKYEQYIK

SEQ ID NO: 2275 - protein, 1211 aa, Artificial Sequence
  SARS-CoV-2/Congo/158/2020__EPI_ISL_417950 spike protein (1-1211)(I909C_Y1047C)
MFVFLVLLPLVSSQCVNLTTRTQLPPAYTNSFTRGVYYPDKVFRSSVLHSTQDLFLPFFSNVTWFHAIHVSGTNGTKRFDNPVLPFNDGVYFASTEKSNIIRGWIFGTTLDSKTQSLLIVNNATNVVIKVCEFQFCNDPFLGVYYHKNNKSWMESEFRVYSSANNCTFEYVSQPFLMDLEGKQGNFKNLREFVFKNIDGYFKIYSKHTPINLVRDLPQGFSALEPLVDLPIGINITRFQTLLALHRSYLTPGDSSSGWTAGAAAYYVGYLQPRTFLLKYNENGTITDAVDCALDPLSETKCTLKSFTVEKGIYQTSNFRVQPTESIVRFPNITNLCPFGEVFNATRFASVYAWNRKRISNCVADYSVLYNSASFSTFKCYGVSPTKLNDLCFTNVYADSFVIRGDEVRQIAPGQTGKIADYNYKLPDDFTGCVIAWNSNNLDSKVGGNYNYLYRLFRKSNLKPFERDISTEIYQAGSTPCNGVEGFNCYFPLQSYGFQPTNGVGYQPYRVVVLSFELLHAPATVCGPKKSTNLVKNKCVNFNFNGLTGTGVLTESNKKFLPFQQFGRDIADTTDAVRDPQTLEILDITPCSFGGVSVITPGTNTSNQVAVLYQDVNCTEVPVAIHADQLTPTWRVYSTGSNVFQTRAGCLIGAEHVNNSYECDIPIGAGICASYQTQTNSPRRARSVASQSIIAYTMSLGAENSVAYSNNSIAIPTNFTISVTTEILPVSMTKTSVDCTMYICGDSTECSNLLLQYGSFCTQLNRALTGIAVEQDKNTQEVFAQVKQIYKTPPIKDFGGFNFSQILPDPSKPSKRSFIEDLLFNKVTLADAGFIKQYGDCLGDIAARDLICAQKFNGLTVLPPLLTDEMIAQYTSALLAGTITSGWTFGAGAALQIPFAMQMAYRFNGCGVTQNVLYENQKLIANQFNSAIGKIQDSLSSTASALGKLQDVVNQNAQALNTLVKQLSSNFGAISSVLNDILSRLDKVEAEVQIDRLITGRLQSLQTYVTQQLIRAAEIRASANLAATKMSECVLGQSKRVDFCGKGCHLMSFPQSAPHGVVFLHVTYVPAQEKNFTTAPAICHDGKAHFPREGVFVSNGTHWFVTQRNFYEPQIITTDNTFLSGNCDVVIGIVNNTVYDPLQPELDSFKEELDKYFKNHTSPDVDLGDISGINASVVNIQKEIDRLNEVAKNLNESLIDLQELGKYEQYIK

SEQ ID NO: 2276 - protein, 1211 aa, Artificial Sequence
  SARS-CoV-2/USA/UT-00034/2020__EPI_ISL_417977 spike protein (1-1211)(I909C_Y1047C)
MFVFLVLLPLVSSQCVNLTTRTQLPPAYTNSFTRGVYYPDKVFRSSVLHSTQDLFLPFFSNVTWFHAIHVSGTNGTKRFDNPVLPFNDGVYFASTEKSNIIRGWIFGTTLDSKTQSLLIVNNATNVVIKVCEFQFCNDPFLGVYYYKNNKSWMESEFRVYSSANNCTFEYVSQPFLMDLEGKQGNFKNLREFVFKNIDGYFKIYSKHTPINLVRDLPQGFSALEPLVDLPIGINITRFQTLLALHRSYLTPGDSSSGWTAGAAAYYVGYLQPRTFLLKYNENGTITDAVDCALDPLSETKCTLKSFTVEKGIYQTSNFRVQPTESIVRFPNITNLCPFGEVFNATRFASVYAWNRKRISNCVADYSVLYNSASFSTFKCYGVSPTKLNDLCFTNVYADSFVIRGDEVRQIAPGQTGKIADYNYKLPDDFTGCVIAWNSNNLDSKVGGNYNYLYRLFRKSNLKPFERDISTEIYQAGSTPCNGVEGFNCYFPLQSYGFQPTNGVGYQPYRVVVLSFELLHAPATVCGPKKSTNLVKNKCVNFNFNGLTGTGVLTESNKKFLPFQQFGRDIADTTDAVRDPQTLEILDITPCSFGGVSVITPGTNTSNQVAVLYQGVNCTEVPVAIHADQLTPTWRVYSTGSNVFQTRAGCLIGAEHVNNSYECDIPIGAGICASYQTQTNSPRRARSVASQSIIAYTMSLGAENSVAYSNNSIAIPTNFTISVTTEILPVSMTKTSVDCTMYICGDSTECSNLLLQYGSFCTQLNRALTGIAVEQDKNTQEVFAQVKQIYKTPPIKDFGGFNFSQILPDPSKPSKRSFIEDLLFNKVTLADAGFIKQYGDCLGDIAARDLICAQKFNGLTVLPPLLTDEMIAQYTSALLAGTITSGWTFGAGAALQIPFAMQMAYRFNGCGVTQNVLYENQKLIANQFNSAIGKIQDSLSSTASALGKLQDVVNQNAQALNTLVKQLSSNFGAISSVLNDILSRLDKVEAEVQIDRLITGRLQSLQTYVTQQLIRAAEIRASANLAATKMSECVLGQSKRVDFCGKGCHLMSFPQSAPHGVVFLHVTYVPAQEKNFTTAPAICHDGKAHFPREGVFVSNGTHWFVTQRNFYEPQIITTDNTFVSGNCDVVIGIVNNTVYDPLQPELDSFKEELDKYFKNHTSPDVDLGDISGINASVVNIQKEIDRLNEVAKNLNESLIDLQELGKYEQYIK

SEQ ID NO: 2277 - protein, 1211 aa, Artificial Sequence
  SARS-CoV-2/USA/UT-00033/2020__EPI_ISL_417976 spike protein (1-1211)(I909C_Y1047C)
MFVFLVLLPLVSSQCVNLTTRTQLPPAYTNSFTRGVYYPDKVFRSSVLHSTQDLFLPFFSNVTWFHAIHVSGTNGTKRFDNPVLPFNDGVYFASTEKSNIIRGWIFGTTLDSKTQSLLIVNNATNVVIKVCEFQFCNDPFLGVYYHKNNKSWMESEFRVYSSANNCTFEYVSQPFLMDLEGKQGNFKNLREFVFKNIDGYFKIYSKHTPINLVRDLPQGFSALEPLVDLPIGINITRFQTLLALHRSYLTPGDSSSGLTAGAAAYYVGYLQPRTFLLKYNENGTITDAVDCALDPLSETKCTLKSFTVEKGIYQTSNFRVQPTESIVRFPNITNLCPFGEVFNATRFASVYAWNRKRISNCVADYSVLYNSASFSTFKCYGVSPTKLNDLCFTNVYADSFVIRGDEVRQIAPGQTGKIADYNYKLPDDFTGCVIAWNSNNLDSKVGGNYNYLYRLFRKSNLKPFERDISTEIYQAGSTPCNGVEGFNCYFPLQSYGFQPTNGVGYQPYRVVVLSFELLHAPATVCGPKKSTNLVKNKCVNFNFNGLTGTGVLTESNKKFLPFQQFGRDIADTTDAVRDPQTLEILDITPCSFGGVSVITPGTNTSNQVAVLYQGVNCTEVPVAIHADQLTPTWRVYSTGSNVFQTRAGCLIGAEHVNNSYECDIPIGAGICASYQTQTNSPRRARSVASQSIIAYTMSLGAENSVAYSNNSIAIPTNFTISVTTEILPVSMTKTSVDCTMYICGDSTECSNLLLQYGSFCTQLNRALTGIAVEQDKNTQEVFAQVKQIYKTPPIKDFGGFNFSQILPDPSKPSKRSFIEDLLFNKVTLADAGFIKQYGDCLGDIAARDLICAQKFNGLTVLPPLLTDEMIAQYTSALLAGTITSGWTFGAGAALQIPFAMQMAYRFNGCGVTQNVLYENQKLIANQFNSAIGKIQDSLSSTASALGKLQDVVNQNAQALNTLVKQLSSNFGAISSVLNDILSRLDKVEAEVQIDRLITGRLQSLQTYVTQQLIRAAEIRASANLAATKMSECVLGQSKRVDFCGKGCHLMSFPQSAPHGVVFLHVTYVPAQEKNFTTAPAICHDGKAHFPREGVFVSNGTHWFVTQRNFYEPQIITTDNTFVSGNCDVVIGIVNNTVYDPLQPELDSFKEELDKYFKNHTSPDVDLGDISGINASVVNIQKEIDRLNEVAKNLNESLIDLQELGKYEQYIK

SEQ ID NO: 2278 - protein, 1211 aa, Artificial Sequence
  SARS-CoV-2/USA/WI-13/2020__EPI_ISL_417516 spike protein (1-1211)(I909C_Y1047C)
MFVFLVLLPLVSSQCVNLTTRTQLPPAYTNSFTRGVYYPDKVFRSSVLHSTQDLFLPFFSNVTWFHAIHVSGTNGTKRFDNPVLPFNDGVYFASTEKSNIIRGWIFGTTLDSKTQSLLIVNNATNVVIKVCEFQFCNDPFLGVYYHKNNKSWMESEFRVYSSANNCTFEYVSQPFLMDLEGKQGNFKNLREFVFKNIDGYFKIYSKHTPINLVRDLPQGFSALEPLVDLPIGINITRFQTLLALHRSYLTPGDSSSGWTAGAAAYYVGYLQPRTFLLKYNENGTITDAVDCALDPLSETKCTLKSFTVEKGIYQTSNFRVLPTESIVRFPNITNLCPFGEVFNATRFASVYAWNRKRISNCVADYSVLYNSASFSTFKCYGVSPTKLNDLCFTNVYADSFVIRGDEVRQIAPGQTGKIADYNYKLPDDFTGCVIAWNSNNLDSKVGGNYNYLYRLFRKSNLKPFERDISTEIYQAGSTPCNGVEGFNCYFPLQSYGFQPTNGVGYQPYRVVVLSFELLHAPATVCGPKKSTNLVKNKCVNFNFNGLTGTGVLTESNKKFLPFQQFGRDIADTTDAVRDPQTLEILDITPCSFGGVSVITPGTNTSNQVAVLYQGVNCTEVPVAIHADQLTPTWRVYSTGSNVFQTRAGCLIGAEHVNNSYECDIPIGAGICASYQTQTNSPRRARSVASQSIIAYTMSLGAENSVAYSNNSIAIPTNFTISVTTEILPVSMTKTSVDCTMYICGDSTECSNLLLQYGSFCTQLNRALTGIAVEQDKNTQEVFAQVKQIYKTPPIKDFGGFNFSQILPDPSKPSKRSFIEDLLFNKVTLADAGFIKQYGDCLGDIAARDLICAQKFNGLTVLPPLLTDEMIAQYTSALLAGTITSGWTFGAGAALQIPFAMQMAYRFNGCGVTQNVLYENQKLIANQFNSAIGKIQDSLSSTASALGKLQDVVNQNAQALNTLVKQLSSNFGAISSVLNDILSRLDKVEAEVQIDRLITGRLQSLQTYVTQQLIRAAEIRASANLAATKMSECVLGQSKRVDFCGKGCHLMSFPQSAPHGVVFLHVTYVPAQEKNFTTAPAICHDGKAHFPREGVFVSNGTHWFVTQRNFYEPQIITTDNTFVSGNCDVVIGIVNNTVYDPLQPELDSFKEELDKYFKNHTSPDVDLGDISGINASVVNIQKEIDRLNEVAKNLNESLIDLQELGKYEQYIK

SEQ ID NO: 2279 - protein, 1210 aa, Artificial Sequence
  SARS-CoV-2/India/1-27/2020__EPI_ISL_413522 spike protein (1-1210)(I908C_Y1046C)
MFVFLVLLPLVSSQCVNLTTRTQLPPAYTNSFTRGVYYPDKVFRSSVLHSTQDLFLPFFSNVTWFHAIHVSGTNGTKRFDNPVLPFNDGVYFASTEKSNIIRGWIFGTTLDSKTQSLLIVNNATNVVIKVCEFQFCNDPFLGVYHKNNKSWMESEFRVYSSANNCTFEYVSQPFLMDLEGKQGNFKNLREFVFKNIDGYFKIYSKHTPINLVRDLPQGFSALEPLVDLPIGINITRFQTLLALHRSYLTPGDSSSGWTAGAAAYYVGYLQPRTFLLKYNENGTITDAVDCALDPLSETKCTLKSFTVEKGIYQTSNFRVQPTESIVRFPNITNLCPFGEVFNATRFASVYAWNRKRISNCVADYSVLYNSASFSTFKCYGVSPTKLNDLCFTNVYADSFVIRGDEVIQIAPGQTGKIADYNYKLPDDFTGCVIAWNSNNLDSKVGGNYNYLYRLFRKSNLKPFERDISTEIYQAGSTPCNGVEGFNCYFPLQSYGFQPTNGVGYQPYRVVVLSFELLHAPATVCGPKKSTNLVKNKCVNFNFNGLTGTGVLTESNKKFLPFQQFGRDIADTTDAVRDPQTLEILDITPCSFGGVSVITPGTNTSNQVAVLYQDVNCTEVPVAIHADQLTPTWRVYSTGSNVFQTRAGCLIGAEHVNNSYECDIPIGAGICASYQTQTNSPRRARSVASQSIIAYTMSLGAENSVAYSNNSIAIPTNFTISVTTEILPVSMTKTSVDCTMYICGDSTECSNLLLQYGSFCTQLNRALTGIAVEQDKNTQEVFAQVKQIYKTPPIKDFGGFNFSQILPDPSKPSKRSFIEDLLFNKVTLADAGFIKQYGDCLGDIAARDLICAQKFNGLTVLPPLLTDEMIAQYTSALLAGTITSGWTFGAGAALQIPFAMQMAYRFNGCGVTQNVLYENQKLIANQFNSAIGKIQDSLSSTASALGKLQDVVNQNAQALNTLVKQLSSNFGAISSVLNDILSRLDKVEAEVQIDRLITGRLQSLQTYVTQQLIRAAEIRASANLAATKMSECVLGQSKRVDFCGKGCHLMSFPQSAPHGVVFLHVTYVPAQEKNFTTAPAICHDGKAHFPREGVFVSNGTHWFVTQRNFYEPQIITTDNTFVSGNCDVVIGIVNNTVYDPLQPELDSFKEELDKYFKNHTSPDVDLGDISGINASVVNIQKEIDRLNEVAKNLNESLIDLQELGKYEQYIK

SEQ ID NO: 2280 - protein, 1205 aa, Artificial Sequence
  SARS-CoV-2/pangolin/Guangxi/P4L/2017__EPI_ISL_410538 spike protein (1-1205)(I903C_Y1041C)
MFVFLFVLPLVSSQCVNLTTRTGIPPGYTNSSTRGVYYPDKVFRSSILHLTQDLFLPFFSNVTWFNTINYQGGFKKFDNPVLPFNDGVYFASTEKSNIIRGWIFGTTLDARTQSLLIVNNATNVVIKVCEFQFCTDPFLGVYYHNNNKTWVENEFRVYSSANNCTFEYISQPFLMDLEGKQGNFKNLREFVFKNVDGYFKIYSKHTPIDLVRDLPRGFAALEPLVDLPIGINITRFQTLLALHRSYLTPGNLESGWTTGAAAYYVGYLQQRTFLLSYNQNGTITDAVDCSLDPLSETKCTLKSLTVEKGIYQTSNFRVQPTISIVRFPNITNLCPFGEVFNASKFASVYAWNRKRISNCVADYSVLYNSTSFSTFKCYGVSPTKLNDLCFTNVYADSFVVKGDEVRQIAPGQTGVIADYNYKLPDDFTGCVIAWNSVKQDALTGGNYGYLYRLFRKSKLKPFERDISTEIYQAGSTPCNGQVGLNCYYPLERYGFHPTTGVNYQPFRVVVLSFELLNGPATVCGPKLSTTLVKDKCVNFNFNGLTGTGVLTTSKKQFLPFQQFGRDISDTTDAVRDPQTLEILDITPCSFGGVSVITPGTNTSNQVAVLYQDVNCTEVPMAIHAEQLTPAWRVYSAGANVFQTRAGCLVGAEHVNNSYECDIPVGAGICASYHSMSSLRSVNQRSIIAYTMSLGAENSVAYSNNSIAIPTNFTISVTTEILPVSMTKTSVDCTMYICGDSIECSNLLLQYGSFCTQLNRALTGIAVEQDKNTQEVFAQVKQIYKTPPIKDFGGFNFSQILPDPSKPSKRSFIEDLLFNKVTLADAGFIKQYGDCLGDIAARDLICAQKFNGLTVLPPLLTDEMIAQYTSALLAGTITSGWTFGAGAALQIPFAMQMAYRFNGCGVTQNVLYENQKLIANQFNSAIGKIQDSLSSTASALGKLQDVVNQNAQALNTLVKQLSSNFGAISSVLNDILSRLDKVEAEVQIDRLITGRLQSLQTYVTQQLIRAAEIRASANLAATKMSECVLGQSKRVDFCGKGCHLMSFPQSAPHGVVFLHVTYVPAQEKNFTTAPAICHEGKAHFPREGVFVSNGTHWFITQRNFYEPQIITTDNTFVSGSCDVVIGIVNNTVYDPLQPELDSFKEELDKYFKNHTSPDVDLGDISGINASVVNIQKEIDRLNEVAKNLNESPIDLQELGKYEQYIK

SEQ ID NO: 2281 - protein, 1205 aa, Artificial Sequence
  SARS-CoV-2/pangolin/Guangxi/P5L/2017__EPI_ISL_410540 spike protein (1-1205)(I903C_Y1041C)
MFVFLFVLPLVSSQCVNLTTRTGIPPGYTNSSTRGVYYPDKVFRSSILHLTQDLFLPFFSNVTWFNTINYQGGFKKFDNPVLPFNDGVYFASTEKSNIIRGWIFGTTLDARTQSLLIVNNATNVVIKVCEFQFCTDPFLGVYYHNNNKTWVENEFRVYSSANNCTFEYISQPFLMDLEGKQGNFKNLREFVFKNVDGYFKIYSKHTPIDLVRDLPRGFAALEPLVDLPIGINITRFQTLLALHRSYLTPGKLESGWTTGAAAYYVGYLQQRTFLLSYNQNGTITDAVDCSLDPLSETKCTLKSLTVEKGIYQTSNFRVQPTISIVRFPNITNLCPFGEVFNASKFASVYAWNRKRISNCVADYSVLYNSTSFSTFKCYGVSPTKLNDLCFTNVYADSFVVKGDEVRQIAPGQTGVIADYNYKLPDDFTGCVIAWNSVKQDALTGGNYGYLYRLFRKSKLKPFERDISTEIYQAGSTPCNGQVGLNCYYPLERYGFHPTTGVNYQPFRVVVLSFELLNGPATVCGPKLSTTLVKDKCVNFNFNGLTGTGVLTTSKKQFLPFQQFGRDISDTTDAVRDPQTLEILDITPCSFGGVSVITPGTNTSNQVAVLYQDVNCTEVPMAIHAEQLTPAWRVYSAGANVFQTRAGCLVGAEHVNNSYECDIPVGAGICASYHSMSSFRSVNQRSIIAYTMSLGAENSVAYSNNSIAIPTNFTISVTTEILPVSMTKTSVDCTMYICGDSIECSNLLLQYGSFCTQLNRALTGIAVEQDKNTQEVFAQVKQIYKTPPIKDFGGFNFSQILPDPSKPSKRSFIEDLLFNKVTLADAGFIKQYGDCLGDIAARDLICAQKFNGLTVLPPLLTDEMIAQYTSALLAGTITSGWTFGAGAALQIPFAMQMAYRFNGCGVTQNVLYENQKLIANQFNSAIGKIQDSLSSTASALGKLQDVVNQNAQALNTLVKQLSSNFGAISSVLNDILSRLDKVEAEVQIDRLITGRLQSLQTYVTQQLIRAAEIRASANLAATKMSECVLGQSKRVDFCGKGCHLMSFPQSAPHGVVFLHVTYVPAQEKNFTTAPAICHEGKAHFPREGVFVSNGTHWFITQRNFYEPQIITTDNTFVSGSCDVVIGIVNNTVYDPLQPELDSFKEELDKYFKNHTSPDVDLGDISGINASVVNIQKEIDRLNEVAKNLNESLIDLQELGKYEQYIK

SEQ ID NO: 2282 - protein, 1205 aa, Artificial Sequence
  SARS-CoV-2/pangolin/Guangxi/P5E/2017__EPI_ISL_410541 spike protein (1-1205)(I903C_Y1041C)
MFVFLFVLPLVSSQCVNLTTRTGIPPGYTNSSTRGVYYPDKVFRSSILHLTQDLFLPFFSNVTWFNTITYQGGSKKFDNPVLPFNDGVYFASTEKSNIIRGWIFGTTLDARTQSLLIVNNATNVVIKVCEFQFCTDPFLGVYYHNNNKTWVENEFRVYSSANNCTFEYISQPFLMDLEGKQGNFKNLREFVFKNVDGYFKIYSKHTPIDLVRDLPRGFAALEPLVDLPIGINITRFQTLLALHRSYLTPGKLESGWTTGAAAYYVGYLQQRTFLLSYNQNGTITDAVDCSLDPLSETKCTLKSLTVEKGIYQTSNFRVQPTISIVRFPNITNLCPFGEVFNASKFASVYAWNRKRISNCVADYSVLYNSTSFSTFKCYGVSPTKLNDLCFTNVYADSFVVKGDEVRQIAPGQTGVIADYNYKLPDDFTGCVIAWNSVKQDALTGDNYGYLYRLFRKSKLKPFERDISTEIYQAGSTPCNGQVGLNCYYPLERYGFHPTTGVNYQPFRVVVLSFELLNGPATVCGPKLSTTLVKDKCVNFNFNGLTGTGVLTTSKKQFLPFQQFGRDISDTTDAVRDPQTLEILDITPCSFGGVSVITPGTNTSNQVAVLYQDVNCTEVPMAIHAEQLTPAWRVYSAGANVFQTRAGCLVGAEHVNNSYECDIPVGAGICASYHSMSSFRSVNQRSIIAYTMSLGAENSVAYSNNSIAIPTNFTISVTTEILPVSMTKTSVDCTMYICGDSIECSNLLLQYGSFCTQLNRALTGIAVEQDKNTQEVFAQVKQIYKTPPIKDFGGFNFSQILPDPSKPSKRSFIEDLLFNKVTLADAGFIKQYGDCLGDIAARDLICAQKFNGLTVLPPLLTDEMIAQYTSALLAGTITSGWTFGAGAALQIPFAMQMAYRFNGCGVTQNVLYENQKLIANQFNSAIGKIQDSLSSTASALGKLQDVVNQNAQALNTLVKQLSSNFGAISSVLNDILSRLDKVEAEVQIDRLITGRLQSLQTYVTQQLIRAAEIRASANLAATKMSECVLGQSKRVDFCGKGCHLMSFPQSAPHGVVFLHVTYVPAQEKNFTTAPAICHEGKAHFPREGVFVSNGTHWFITQRNFYEPQIITTDNTFVSGSCDVVIGIVNNTVYDPLQPELDSFKEELDKYFKNHTSPDVDLGDISGINASVVNIQKEIDRLNEVAKNLNESLIDLQELGKYEQYIK

SEQ ID NO: 2283 - protein, 1203 aa, Artificial Sequence
  SARS-CoV-2/pangolin/Guangxi/P1E/2017__EPI_ISL_410539 spike protein (1-1203)(I901C_Y1039C)
MFVFLFVLPLVSSQCVNLTTRTGIQPGYTNSSTRGVYYPDKVFRSSILHLTQDLFLPFFSNVTWFNTINYQGGFKKFDNPVLPFNDGVYFASTEKSNIIRGWIFGTTLDARTQSLLIVNNATNVVIKVCEFQFCTDPFLGVYYHNNNKTWVENEFRVYSSANNCTFEYISQPFLMDLEGKQGNFKNLREFVFKNVDGYFKIYSKHTPIDLVRDLPRGFAALEPLVDLPIGINITRFQTLLALHRSYLTPGKLESGWTTGAAAYYVGYLQQRTFLLSYNQNGTITDAVDCSLDPLSETKCTLKSLTVEKGIYQTSNFRVQPTISIVRFPNITNLCPFGEVFNASKFASVYAWNRKRISNCVADYSVLYNSTSFSTFKCYGVSPTKLNDLCFTNVYADSFVVKGDEVRQIAPGQTGVIADYNYKLPDDFTGCVIAWNSVKQDALTGGNYLYRLFRKSKLKPFERDISTEIYQAGSTPCNGQVGLNCYYPLERYGFHPTTGVNYQPFRVVVLSFELLNGPATVCGPKLSTTLVKDKCVNFNFNGLTGTGVLTTSKKQFLPFQQFGRDISDTTDAVRDPQTLEILDITPCSFGGVSVITPGTNTSNQVAVLYQDVNCTEVPMAIHAEQLTPAWRVYSAGANVFQTRAGCLVGAEHVNNSYECDIPVGAGICASYHSMSSLRSVNQRSIIAYTMSLGAENSVAYSNNSIAIPTNFTISVTTEILPVSMTKTSVDCTMYICGDSIECSNLLLQYGSFCTQLNRALTGIAVEQDKNTQEVFAQVKQIYKTPPIKDFGGFNFSQILPDPSKPSKRSFIEDLLFNKVTLADAGFIKQYGDCLGDIAARDLICAQKFNGLTVLPPLLTDEMIAQYTSALLAGTITSGWTFGAGAALQIPFAMQMAYRFNGCGVTQNVLYENQKLIANQFNSAIGKIQDSLSSTASALGKLQDVVNQNAQALNTLVKQLSSNFGAISSVLNDILSRLDKVEAEVQIDRLITGRLQSLQTYVTQQLIRAAEIRASANLAATKMSECVLGQSKRVDFCGKGCHLMSFPQSAPHGVVFLHVTYVPAQEKNFTTAPAICHEGKAHFPREGVFVSNGTHWFITQRNFYEPQIITTDNTFVSGSCDVVIGIVNNTVYDPLQPELDSFKEELDKYFKNHTSPDVDLGDISGINASVVNIQKEIDRLNEVAKNLNESLIDLQELGKYEQYIK

SEQ ID NO: 2284 - protein, 1211 aa, Artificial Sequence
  SARS-CoV-2/Wuhan/WIV05/2019__EPI_ISL_402128 spike protein (1-1211)(Q965C_S1003C)
MFVFLVLLPLVSSQCVNLTTRTQLPPAYTNSFTRGVYYPDKVFRSSVLHSTQDLFLPFFSNVTWFHAIHVSGTNGTKRFDNPVLPFNDGVYFASTEKSNIIRGWIFGTTLDSKTQSLLIVNNATNVVIKVCEFQFCNDPFLGVYYHKNNKSWMESEFRVYSSANNCTFEYVSQPFLMDLEGKQGNFKNLREFVFKNIDGYFKIYSKHTPINLVRDLPQGFSALEPLVDLPIGINITRFQTLLALHRSYLTPGDSSSGWTAGAAAYYVGYLQPRTFLLKYNENGTITDAVDCALDPLSETKCTLKSFTVEKGIYQTSNFRVQPTESIVRFPNITNLCPFGEVFNATRFASVYAWNRKRISNCVADYSVLYNSASFSTFKCYGVSPTKLNDLCFTNVYADSFVIRGDEVRQIAPGQTGKIADYNYKLPDDFTGCVIAWNSNNLDSKVGGNYNYLYRLFRKSNLKPFERDISTEIYQAGSTPCNGVEGFNCYFPLQSYGFQPTNGVGYQPYRVVVLSFELLHAPATVCGPKKSTNLVKNKCVNFNFNGLTGTGVLTESNKKFLPFQQFGRDIADTTDAVRDPQTLEILDITPCSFGGVSVITPGTNTSNQVAVLYQDVNCTEVPVAIHADQLTPTWRVYSTGSNVFQTRAGCLIGAEHVNNSYECDIPIGAGICASYQTQTNSPRRARSVASQSIIAYTMSLGAENSVAYSNNSIAIPTNFTISVTTEILPVSMTKTSVDCTMYICGDSTECSNLLLQYGSFCTQLNRALTGIAVEQDKNTQEVFAQVKQIYKTPPIKDFGGFNFSQILPDPSKPSKRSFIEDLLFNKVTLADAGFIKQYGDCLGDIAARDLICAQKFNGLTVLPPLLTDEMIAQYTSALLAGTITSGWTFGAGAALQIPFAMQMAYRFNGIGVTQNVLYENQKLIANQFNSAIGKIQDSLSSTASALGKLQDVVNQNAQALNTLVKCLSSNFGAISSVLNDILSRLDKVEAEVQIDRLITGRLQCLQTYVTQQLIRAAEIRASANLAATKMSECVLGQSKRVDFCGKGYHLMSFPQSAPHGVVFLHVTYVPAQEKNFTTAPAICHDGKAHFPREGVFVSNGTHWFVTQRNFYEPQIITTDNTFVSGNCDVVIGIVNNTVYDPLQPELDSFKEELDKYFKNHTSPDVDLGDISGINASVVNIQKEIDRLNEVAKNLNESLIDLQELGKYEQYIK

SEQ ID NO: 2285 - protein, 1207 aa, Artificial Sequence
  SARS-CoV-2/bat/Yunnan/RaTG13/2013__EPI_ISL_402131 spike protein (1-1207)(Q961C_S999C)
MFVFLVLLPLVSSQCVNLTTRTQLPPAYTNSSTRGVYYPDKVFRSSVLHLTQDLFLPFFSNVTWFHAIHVSGTNGIKRFDNPVLPFNDGVYFASTEKSNIIRGWIFGTTLDSKTQSLLIVNNATNVVIKVCEFQFCNDPFLGVYYHKNNKSWMESEFRVYSSANNCTFEYVSQPFLMDLEGKQGNFKNLREFVFKNIDGYFKIYSKHTPINLVRDLPPGFSALEPLVDLPIGINITRFQTLLALHRSYLTPGDSSSGWTAGAAAYYVGYLQPRTFLLKYNENGTITDAVDCALDPLSETKCTLKSFTVEKGIYQTSNFRVQPTDSIVRFPNITNLCPFGEVFNATTFASVYAWNRKRISNCVADYSVLYNSTSFSTFKCYGVSPTKLNDLCFTNVYADSFVITGDEVRQIAPGQTGKIADYNYKLPDDFTGCVIAWNSKHIDAKEGGNFNYLYRLFRKANLKPFERDISTEIYQAGSKPCNGQTGLNCYYPLYRYGFYPTDGVGHQPYRVVVLSFELLNAPATVCGPKKSTNLVKNKCVNFNFNGLTGTGVLTESNKKFLPFQQFGRDIADTTDAVRDPQTLEILDITPCSFGGVSVITPGTNASNQVAVLYQDVNCTEVPVAIHADQLTPTWRVYSTGSNVFQTRAGCLIGAEHVNNSYECDIPIGAGICASYQTQTNSRSVASQSIIAYTMSLGAENSVAYSNNSIAIPTNFTISVTTEILPVSMTKTSVDCTMYICGDSTECSNLLLQYGSFCTQLNRALTGIAVEQDKNTQEVFAQVKQIYKTPPIKDFGGFNFSQILPDPSKPSKRSFIEDLLFNKVTLADAGFIKQYGDCLGDIAARDLICAQKFNGLTVLPPLLTDEMIAQYTSALLAGTITSGWTFGAGAALQIPFAMQMAYRFNGIGVTQNVLYENQKLIANQFNSAIGKIQDSLSSTASALGKLQDVVNQNAQALNTLVKCLSSNFGAISSVLNDILSRLDKVEAEVQIDRLITGRLQCLQTYVTQQLIRAAEIRASANLAATKMSECVLGQSKRVDFCGKGYHLMSFPQSAPHGVVFLHVTYVPAQEKNFTTAPAICHDGKAHFPREGVFVSNGTHWFVTQRNFYEPQIITTDNTFVSGSCDVVIGIVNNTVYDPLQPELDSFKEELDKYFKNHTSPDVDLGDISGINASVVNIQKEIDRLNEVAKNLNESLIDLQELGKYEQYIK

SEQ ID NO: 2286 - protein, 1211 aa, Artificial Sequence
  SARS-CoV-2/Wuhan/HBCDC-HB-01/2019__EPI_ISL_402132 spike protein (1-1211)(Q965C_S1003C)
MFVFLVLLPLVSSQCVNLTTRTQLPPAYTNSITRGVYYPDKVFRSSVLHSTQDLFLPFFSNVTWFHAIHVSGTNGTKRFDNPVLPFNDGVYFASTEKSNIIRGWIFGTTLDSKTQSLLIVNNATNVVIKVCEFQFCNDPFLGVYYHKNNKSWMESEFRVYSSANNCTFEYVSQPFLMDLEGKQGNFKNLREFVFKNIDGYFKIYSKHTPINLVRDLPQGFSALEPLVDLPIGINITRFQTLLALHRSYLTPGDSSSGWTAGAAAYYVGYLQPRTFLLKYNENGTITDAVDCALDPLSETKCTLKSFTVEKGIYQTSNFRVQPTESIVRFPNITNLCPFGEVFNATRFASVYAWNRKRISNCVADYSVLYNSASFSTFKCYGVSPTKLNDLCFTNVYADSFVIRGDEVRQIAPGQTGKIADYNYKLPDDFTGCVIAWNSNNLDSKVGGNYNYLYRLFRKSNLKPFERDISTEIYQAGSTPCNGVEGFNCYFPLQSYGFQPTNGVGYQPYRVVVLSFELLHAPATVCGPKKSTNLVKNKCVNFNFNGLTGTGVLTESNKKFLPFQQFGRDIADTTDAVRDPQTLEILDITPCSFGGVSVITPGTNTSNQVAVLYQDVNCTEVPVAIHADQLTPTWRVYSTGSNVFQTRAGCLIGAEHVNNSYECDIPIGAGICASYQTQTNSPRRARSVASQSIIAYTMSLGAENSVAYSNNSIAIPTNFTISVTTEILPVSMTKTSVDCTMYICGDSTECSNLLLQYGSFCTQLNRALTGIAVEQDKNTQEVFAQVKQIYKTPPIKDFGGFNFSQILPDPSKPSKRSFIEDLLFNKVTLADAGFIKQYGDCLGDIAARDLICAQKFNGLTVLPPLLTDEMIAQYTSALLAGTITSGWTFGAGAALQIPFAMQMAYRFNGIGVTQNVLYENQKLIANQFNSAIGKIQDSLSSTASALGKLQDVVNQNAQALNTLVKCLSSNFGAISSVLNDILSRLDKVEAEVQIDRLITGRLQCLQTYVTQQLIRAAEIRASANLAATKMSECVLGQSKRVDFCGKGYHLMSFPQSAPHGVVFLHVTYVPAQEKNFTTAPAICHDGKAHFPREGVFVSNGTHWFVTQRNFYEPQIITTDNTFVSGNCDVVIGIVNNTVYDPLQPELDSFKEELDKYFKNHTSPDVDLGDISGINASVVNIQKEIDRLNEVAKNLNESLIDLQELGKYEQYIK

SEQ ID NO: 2287 - protein, 1211 aa, Artificial Sequence
  SARS-CoV-2/Guangdong/20SF028/2020__EPI_ISL_403936 spike protein (1-1211)(Q965C_S1003C)
MFVFLVLLPLVSSQCVNLTTRTQLPPAYTNSFTRGVYYPDKVFRSSVLYSTQDLFLPFFSNVTWFHAIHVSGTNGTKRFDNPVLPFNDGVYFASTEKSNIIRGWIFGTTLDSKTQSLLIVNNATNVVIKVCEFQFCNDPFLGVYYHKNNKSWMESEFRVYSSANNCTFEYVSQPFLMDLEGKQGNFKNLREFVFKNIDGYFKIYSKHTPINLVRDLPQGFSALEPLVDLPIGINITRFQTLLALHRSYLTPGDSSSGWTAGAAAYYVGYLQPRTFLLKYNENGTITDAVDCALDPLSETKCTLKSFTVEKGIYQTSNFRVQPTESIVRFPNITNLCPFGEVFNATRFASVYAWNRKRISNCVADYSVLYNSASFSTFKCYGVSPTKLNDLCFTNVYADSFVIRGDEVRQIAPGQTGKIADYNYKLPDDFTGCVIAWNSNNLDSKVGGNYNYLYRLFRKSNLKPFERDISTEIYQAGSTPCNGVEGFNCYFPLQSYGFQPTNGVGYQPYRVVVLSFELLHAPATVCGPKKSTNLVKNKCVNFNFNGLTGTGVLTESNKKFLPFQQFGRDIADTTDAVRDPQTLEILDITPCSFGGVSVITPGTNTSNQVAVLYQDVNCTEVPVAIHADQLTPTWRVYSTGSNVFQTRAGCLIGAEHVNNSYECDIPIGAGICASYQTQTNSPRRARSVASQSIIAYTMSLGAENSVAYSNNSIAIPTNFTISVTTEILPVSMTKTSVDCTMYICGDSTECSNLLLQYGSFCTQLNRALTGIAVEQDKNTQEVFAQVKQIYKTPPIKDFGGFNFSQILPDPSKPSKRSFIEDLLFNKVTLADAGFIKQYGDCLGDIAARDLICAQKFNGLTVLPPLLTDEMIAQYTSALLAGTITSGWTFGAGAALQIPFAMQMAYRFNGIGVTQNVLYENQKLIANQFNSAIGKIQDSLSSTASALGKLQDVVNQNAQALNTLVKCLSSNFGAISSVLNDILSRLDKVEAEVQIDRLITGRLQCLQTYVTQQLIRAAEIRASANLAATKMSECVLGQSKRVDFCGKGYHLMSFPQSAPHGVVFLHVTYVPAQEKNFTTAPAICHDGKAHFPREGVFVSNGTHWFVTQRNFYEPQIITTDNTFVSGNCDVVIGIVNNTVYDPLQPELDSFKEELDKYFKNHTSPDVDLGDISGINASVVNIQKEIDRLNEVAKNLNESLIDLQELGKYEQYIK

SEQ ID NO: 2288 - protein, 1211 aa, Artificial Sequence
  SARS-CoV-2/Shenzhen/SZTH-001/2020__EPI_ISL_406592 spike protein (1-1211)(Q965C_S1003C)
MFVFLVLLPLVSSQCVNLTTRTQLPPAYTNSFTRGVYYPDKVFRSSVLHSTQDLFLPFFSNVTWFHAIHVSGTNGTKRFDNPVLPFNDGVYFASTEKSNIIRGWIFGTTLDSKTQSLLIVNNATNVVIKVCEFQFCNDPFLGVYYHKNNKSWMESEFRVYSSANNCTFEYVSQPFLMDLEGKQGNFKNLREFVFKNIDGYFKIYSKHTPINLVRDLPQGFSALEPLVDLPIGINITRFQTLLALHRSYLTPGDSSSGWTAGAAAYYVGYLQPRTFLLKYNENGTITDAVDCALDPLSETKCTLKSFTVEKGIYQTSNFRVQPTESIVRFPNITNLCPFGEVFNATRFASVYAWNRKRISNCVADYSVLYNSASFSTFKCYGVSPTKLNDLCFTNVYADSFVIRGDEVRQIAPGQTGKIADYNYKLPDDFTGCVIAWNSNNLDSKVGGNYNYLYRLFRKSNLKPFERDISTEIYQAGSTPCNGVEGFNCYFPLQSYGFQPTNGVGYQPYRVVVLSFELLHAPATVCGPKKSTNLVKNKCVNFNFNGLTGTGVLTESNKKFLPFQQFGRDIADTTDAVRDPQTLEILDITPCSFGGVSVITPGTNTSNQVAVLYQDVNCTEVPVAIHADQLTPTWRVYSTGSNVFQTRAGCLIGAEHVNNSYECDIPIGAGICASYQTQTNSPRRARSVASQSIIAYTMSLGAENSVAYSNNSIAIPTNFTISVTTEILPVSMTKTSVDCTMYICGDSTECSNLLLQYGSFCTQLNRALTGIAVEQDKNTQEVFAQVKQIYKTPPIKDFGGFNFSQILPDPSKPSKRSFIEDLLFNKVTLADAGFIKQYGDCLGDIAARDLICAQKFNGLTVLPPLLTDEMIAQYTSALLAGTITSGWTFGAGAALQIPFAMQMAYRFNGIGVTQNVLYENQKLIANQFNSAIGKIQDSLSSTASALGKLQDVVNQNAQALNTLVKCLSSNFGAISSVLNDILSRLDKVEAEVQIDRLITGRLQCLQTYVTQQLIRAAEIRASANLAATKMSECVLGQSKRVDFCGKGYHLMSFPQSAPHGVVFLHVTYVPAQEKNFTTAPAICHDGKAHFPREGVFVSNGTHWFVTQRNFYEPQIITTDNTFVSGNCDVLIGIVNNTVYDPLQPELDSFKEELDKYFKNHTSPDVDLGDISGINASVVNIQKEIDRLNEVAKNLNESLIDLQELGKYEQYIK

SEQ ID NO: 2289 - protein, 1211 aa, Artificial Sequence
  SARS-CoV-2/Shenzhen/SZTH-004/2020__EPI_ISL_406595 spike protein (1-1211)(Q965C_S1003C)
MFVFLVLLPLVSSQCVNLTTRTQLPPAYTNSFTRGVYYPDKVFRSSVLHSTQDLFLPFFSNVTWFHAIHVSGTNGTKRFDNPVLPFNDGVYFASTEKSNIIRGWIFGTTLDSKTQSLLIVNNATNVVIKVCEFQFCNDPFLGVYYHKNNKSWMESEFRVYSSANNCTFEYVSQPFLMDLEGKQGNFKNLREFVFKNIDGYFKIYSKHTPINLVRDLPQGFSALEPLVDLPIGINITRFQTLLALHRSYLTPGDSSSGWTAGAAAYYVGYLQPRTFLLKYNENGTITDAVDCALDPLSETKCTLKSFTVEKGIYQTSNFRVQPTESIVRFPNITNLCPFGEVFNATRFASVYAWDRKRISNCVAYYSVLYNSASFSTFKCYGVSPTKLNDLCFTNVYADSFVIRGDEVRQIAPGQTGKIADYNYKLPDDFTGCVIAWNSNNLDSKVGGNYNYLYRLFRKSNLKPFERDISTEIYQAGSTPCNGVEGFNCYFPLQSYGFQPTNGVGYQPYRVVVLSFELLHAPATVCGPKKSTNLVKNKCVNFNFNGLTGTGVLTESNKKFLPFQQFGRDIADTTDAVRDPQTLEILDITPCSFGGVSVITPGTNTSNQVAVLYQDVNCTEVPVAIHADQLTPTWRVYSTGSNVFQTRAGCLIGAEHVNNSYECDIPIGAGICASYQTQTNSPRRARSVASQSIIAYTMSLGAENSVAYSNNSIAIPTNFTISVTTEILPVSMTKTSVDCTMYICGDSTECSNLLLQYGSFCTQLNRALTGIAVEQDKNTQEVFAQVKQIYKTPPIKDFGGFNFSQILPDPSKPSKRSFIEDLLFNKVTLADAGFIKQYGDCLGDIAARDLICAQKFNGLTVLPPLLTDEMIAQYTSALLAGTITSGWTFGAGAALQIPFAMQMAYRFNGIGVTQNVLYENQKLIANQFNSAIGKIQDSLSSTASALGKLQDVVNQNAQALNTLVKCLSSNFGAISSVLNDILSRLDKVEAEVQIDRLITGRLQCLQTYVTQQLIRAAEIRASANLAATKMSECVLGQSKRVDFCGKGYHLMSFPQSAPHGVVFLHVTYVPAQEKNFTTAPAICHDGKAHFPREGVFVSNGTHWFVTQRNFYEPQIITTDNTFVSGNCDVVIGIVNNTVYDPLQPELDSFKEELDKYFKNHTSPDVDLGDISGINASVVNIQKEIDRLNEVAKNLNESLIDLQELGKYEQYIK

SEQ ID NO: 2290 - protein, 1211 aa, Artificial Sequence
  SARS-CoV-2/France/IDF0372/2020__EPI_ISL_406596 spike protein (1-1211)(Q965C_S1003C)
MFVFLVLLPLVSSQCVNLTTRTQLPPAYTNSFTRGVYYPDKVFRSSVLHSTQDLFLPFFSNVTWFHAIHVSGTNGTKRFDNPVLPFNDGVYFASTEKSNIIRGWIFGTTLDSKTQSLLIVNNATNVVIKVCEFQFCNDPFLGVYYHKNNKSWMESEFRVYSSANNCTFEYVSQPFLMDLEGKQGNFKNLREFVFKNIDGYFKIYSKHTPINLVRDLPQGFSALEPLVDLPIGINITRFQTLLALHRSYLTPGDSSSGWTAGAAAYYVGYLQPRTFLLKYNENGTITDAVDCALDPLSETKCTLKSFTVEKGIYQTSNFRVQPTESIVRFPNITNLCPFGEVFNATRFASVYAWNRKRISNCVADYSFLYNSASFSTFKCYGVSPTKLNDLCFTNVYADSFVIRGDEVRQIAPGQTGKIADYNYKLPDDFTGCVIAWNSNNLDSKVGGNYNYLYRLFRKSNLKPFERDISTEIYQAGSTPCNGVEGFNCYFPLQSYGFQPTNGVGYQPYRVVVLSFELLHAPATVCGPKKSTNLVKNKCVNFNFNGLTGTGVLTESNKKFLPFQQFGRDIADTTDAVRDPQTLEILDITPCSFGGVSVITPGTNTSNQVAVLYQDVNCTEVPVAIHADQLTPTWRVYSTGSNVFQTRAGCLIGAEHVNNSYECDIPIGAGICASYQTQTNSPRRARSVASQSIIAYTMSLGAENSVAYSNNSIAIPTNFTISVTTEILPVSMTKTSVDCTMYICGDSTECSNLLLQYGSFCTQLNRALTGIAVEQDKNTQEVFAQVKQIYKTPPIKDFGGFNFSQILPDPSKPSKRSFIEDLLFNKVTLADAGFIKQYGDCLGDIAARDLICAQKFNGLTVLPPLLTDEMIAQYTSALLAGTITSGWTFGAGAALQIPFAMQMAYRFNGIGVTQNVLYENQKLIANQFNSAIGKIQDSLSSTASALGKLQDVVNQNAQALNTLVKCLSSNFGAISSVLNDILSRLDKVEAEVQIDRLITGRLQCLQTYVTQQLIRAAEIRASANLAATKMSECVLGQSKRVDFCGKGYHLMSFPQSAPHGVVFLHVTYVPAQEKNFTTAPAICHDGKAHFPREGVFVSNGTHWFVTQRNFYEPQIITTDNTFVSGNCDVVIGIVNNTVYDPLQPELDSFKEELDKYFKNHTSPDVDLGDISGINASVVNIQKEIDRLNEVAKNLNESLIDLQELGKYEQYIK

SEQ ID NO: 2291 - protein, 1211 aa, Artificial Sequence
  SARS-CoV-2/Australia/VIC01/2020__EPI_ISL_406844 spike protein (1-1211)(Q965C_S1003C)
MFVFLVLLPLVSSQCVNLTTRTQLPPAYTNSFTRGVYYPDKVFRSSVLHSTQDLFLPFFSNVTWFHAIHVSGTNGTKRFDNPVLPFNDGVYFASTEKSNIIRGWIFGTTLDSKTQSLLIVNNATNVVIKVCEFQFCNDPFLGVYYHKNNKSWMESEFRVYSSANNCTFEYVSQPFLMDLEGKQGNFKNLREFVFKNIDGYFKIYSKHTPINLVRDLPQGFSALEPLVDLPIGINITRFQTLLALHRRYLTPGDSSSGWTAGAAAYYVGYLQPRTFLLKYNENGTITDAVDCALDPLSETKCTLKSFTVEKGIYQTSNFRVQPTESIVRFPNITNLCPFGEVFNATRFASVYAWNRKRISNCVADYSVLYNSASFSTFKCYGVSPTKLNDLCFTNVYADSFVIRGDEVRQIAPGQTGKIADYNYKLPDDFTGCVIAWNSNNLDSKVGGNYNYLYRLFRKSNLKPFERDISTEIYQAGSTPCNGVEGFNCYFPLQSYGFQPTNGVGYQPYRVVVLSFELLHAPATVCGPKKSTNLVKNKCVNFNFNGLTGTGVLTESNKKFLPFQQFGRDIADTTDAVRDPQTLEILDITPCSFGGVSVITPGTNTSNQVAVLYQDVNCTEVPVAIHADQLTPTWRVYSTGSNVFQTRAGCLIGAEHVNNSYECDIPIGAGICASYQTQTNSPRRARSVASQSIIAYTMSLGAENSVAYSNNSIAIPTNFTISVTTEILPVSMTKTSVDCTMYICGDSTECSNLLLQYGSFCTQLNRALTGIAVEQDKNTQEVFAQVKQIYKTPPIKDFGGFNFSQILPDPSKPSKRSFIEDLLFNKVTLADAGFIKQYGDCLGDIAARDLICAQKFNGLTVLPPLLTDEMIAQYTSALLAGTITSGWTFGAGAALQIPFAMQMAYRFNGIGVTQNVLYENQKLIANQFNSAIGKIQDSLSSTASALGKLQDVVNQNAQALNTLVKCLSSNFGAISSVLNDILSRLDKVEAEVQIDRLITGRLQCLQTYVTQQLIRAAEIRASANLAATKMSECVLGQSKRVDFCGKGYHLMSFPQSAPHGVVFLHVTYVPAQEKNFTTAPAICHDGKAHFPREGVFVSNGTHWFVTQRNFYEPQIITTDNTFVSGNCDVVIGIVNNTVYDPLQPELDSFKEELDKYFKNHTSPDVDLGDISGINASVVNIQKEIDRLNEVAKNLNESLIDLQELGKYEQYIK

SEQ ID NO: 2292 - protein, 1211 aa, Artificial Sequence
  SARS-CoV-2/Germany/BavPat1/2020__EPI_ISL_406862 spike protein (1-1211)(Q965C_S1003C)
MFVFLVLLPLVSSQCVNLTTRTQLPPAYTNSFTRGVYYPDKVFRSSVLHSTQDLFLPFFSNVTWFHAIHVSGTNGTKRFDNPVLPFNDGVYFASTEKSNIIRGWIFGTTLDSKTQSLLIVNNATNVVIKVCEFQFCNDPFLGVYYHKNNKSWMESEFRVYSSANNCTFEYVSQPFLMDLEGKQGNFKNLREFVFKNIDGYFKIYSKHTPINLVRDLPQGFSALEPLVDLPIGINITRFQTLLALHRSYLTPGDSSSGWTAGAAAYYVGYLQPRTFLLKYNENGTITDAVDCALDPLSETKCTLKSFTVEKGIYQTSNFRVQPTESIVRFPNITNLCPFGEVFNATRFASVYAWNRKRISNCVADYSVLYNSASFSTFKCYGVSPTKLNDLCFTNVYADSFVIRGDEVRQIAPGQTGKIADYNYKLPDDFTGCVIAWNSNNLDSKVGGNYNYLYRLFRKSNLKPFERDISTEIYQAGSTPCNGVEGFNCYFPLQSYGFQPTNGVGYQPYRVVVLSFELLHAPATVCGPKKSTNLVKNKCVNFNFNGLTGTGVLTESNKKFLPFQQFGRDIADTTDAVRDPQTLEILDITPCSFGGVSVITPGTNTSNQVAVLYQGVNCTEVPVAIHADQLTPTWRVYSTGSNVFQTRAGCLIGAEHVNNSYECDIPIGAGICASYQTQTNSPRRARSVASQSIIAYTMSLGAENSVAYSNNSIAIPTNFTISVTTEILPVSMTKTSVDCTMYICGDSTECSNLLLQYGSFCTQLNRALTGIAVEQDKNTQEVFAQVKQIYKTPPIKDFGGFNFSQILPDPSKPSKRSFIEDLLFNKVTLADAGFIKQYGDCLGDIAARDLICAQKFNGLTVLPPLLTDEMIAQYTSALLAGTITSGWTFGAGAALQIPFAMQMAYRFNGIGVTQNVLYENQKLIANQFNSAIGKIQDSLSSTASALGKLQDVVNQNAQALNTLVKCLSSNFGAISSVLNDILSRLDKVEAEVQIDRLITGRLQCLQTYVTQQLIRAAEIRASANLAATKMSECVLGQSKRVDFCGKGYHLMSFPQSAPHGVVFLHVTYVPAQEKNFTTAPAICHDGKAHFPREGVFVSNGTHWFVTQRNFYEPQIITTDNTFVSGNCDVVIGIVNNTVYDPLQPELDSFKEELDKYFKNHTSPDVDLGDISGINASVVNIQKEIDRLNEVAKNLNESLIDLQELGKYEQYIK

SEQ ID NO: 2293 - protein, 1211 aa, Artificial Sequence
  SARS-CoV-2/Wuhan/HBCDC-HB-02/2020__EPI_ISL_412978 spike protein (1-1211)(Q965C_S1003C)
MFVFLVLLPLVSSQCVNLTTRTQLPPAYTNSFTRGVYYPDKVFRSSVLHSTQDLFLPFFSNVTWFHAIHVSGTNGTKRFDNPVLPFNDGVYFASTEKSNIIRGWIFGTTLDSKTQSLLIVNNATNVVIKVCEFQFCNDPFLGVYYHKNNKSWMESEFRVYSSANNCTFEYVSQPFLMDLEGKQGNFKNLREFVFKNIDGYFKIYSKHTPINLVRDLPQGFSALEPLVDLPIGINITRFQTLLALHRSYLTPGDSSSGWTAGAAAYYVGYLQPRTFLLKYNENGTITDAVDCALDPLSETKCTLKSFTVEKGIYQTSNFRVQPTESIVRFPNITNLCPFGEVFNATRFASVYAWNRKRISNCVADYSVLYNSASFSTFKCYGVSPTKLNDLCFTNVYADSFVIRGDEVRQIAPGQTGKIADYNYKLPDDFTGCVIAWNSNNLDSKVGGNYNYLYRLFRKSNLKPFERDISTEIYQAGSTPCNGVEGFNCYFPLQSYGFQPTNGVGYQPYRVVVLSFELLHAPATVCGPKKSTNLVKNKCVNFNFNGLTGTGVLTESNKKFLPFQQFGRDIADTTDAVRDPQTLEILDITPCSFGGVSVITPGTNTSNQVAVLYQDVNCTEVPVAIHADQLTPTWRVYSTGSNVFQTRAGCLIGAEHVNNSYECDIPIGAGICASYQTQTNSPRRARSVASQSIIAYTMSLGAENSVAYSNNSIAIPTNFTISVTTEILPVSMTKTSVDCTMYICGDSTECSNFLLQYGSFCTQLNRALTGIAVEQDKNTQEVFAQVKQIYKTPPIKDFGGFNFSQILPDPSKPSKRSFIEDLLFNKVTLADAGFIKQYGDCLGDIAARDLICAQKFNGLTVLPPLLTDEMIAQYTSALLAGTITSGWTFGAGAALQIPFAMQMAYRFNGIGVTQNVLYENQKLIANQFNSAIGKIQDSLSSTASALGKLQDVVNQNAQALNTLVKCLSSNFGAISSVLNDILSRLDKVEAEVQIDRLITGRLQCLQTYVTQQLIRAAEIRASANLAATKMSECVLGQSKRVDFCGKGYHLMSFPQSAPHGVVFLHVTYVPAQEKNFTTAPAICHDGKAHFPREGVFVSNGTHWFVTQRNFYEPQIITTDNTFVSGNCDVVIGIVNNTVYDPLQPELDSFKEELDKYFKNHTSPDVDLGDISGINASVVNIQKEIDRLNEVAKNLNESLIDLQELGKYEQYIK

SEQ ID NO: 2294 - protein, 1211 aa, Artificial Sequence
  SARS-CoV-2/Australia/QLD02/2020__EPI_ISL_407896 spike protein (1-1211)(Q965C_S1003C)
MFVFLVLLPLVSSQCVNLTTRTQLPPAYTNSFTRGVYYPDKVFRSSVLHSTQDLFLPFFSNVTWFHAIHVSGTNGTKRFDNPVLPFNDGVYFASTEKSNIIRGWIFGTTLDSKTQSLLIVNNATNVVIKVCEFQFCNDPFLGVYYHKNNKSWMESEFRVYSSANNCTFEYVSQPFLMDLEGKQGNFKNLREFVFKNIDGYFKIYSKHTPINLVRDLPQGFSALEPLVDLPIGINITRFQTLLALHRSYLTPGDSSSGWTAGAAAYYVGYLQPRTFLLKYNENGTITDAVDCALDPLSETKCTLKSFTVEKGIYQTSNFRVQPTESIVRFPNITNLCPFGEVFNATRFASVYAWNRKRISNCVADYSVLYNSASFSTFKCYGVSPTKLNDLCFTNVYADSFVIRGDEVRQIAPGQTGKIADYNYKLPDDFTGCVIAWNSNNLDSKVGGNYNYLYRLFRKSNLKPFERDISTEIYQAGSTPCNGVEGFNCYFPLQSYGFQPTNGVGYQPYRVVVLSFELLHAPATVCGPKKSTNLVKNKCVNFNFNGLTGTGVLTESNKKFLPFQQFGRDIADTTDAVRDPQTLEILDITPCSFGGVSVITPGTNTSNQVAVLYQDVNCTEVPVAIHADQLTPTWRVYSTGSNVFQTRAGCLIGAEHVNNSYECDIPIGAGICASYQTQTNSPRRARSVASQSIIAYTMSLGAENSVAYSNNSIAIPTNFTISVTTEILPVSMTKTSVDCTMYICGDSTECSNLLLQYGSFCTQLNRALTGIAVEQDKNTQEVFAQVKQIYKTPPIKDFGGFNFSQILPDPSKPSKRSFIEDLLFNKVTLADAGFIKQYGDCLGDIAARDLICAQKFNGLTVLPPLLTDEMIAQYTSALLAGTITSGWTFGAGAALQIPFAMQMAYRFNGIGVTQNVLYENQKLIANQFNSAIGKIQDSLSSTASALGKLQDVVNQNAQALNTLVKCLSSNFGAISSVLNDILSRLDKVEAEVQIDRLITGRLQCLQTYVTQQLIRAAEIRASANLAATKMSECVLGQSKRVDFCGKGYHLMSFPQSAPHGVVFLHVTYVPAQEKNFTTAPAICHDGKAHFPREGVFVSNGTHWFVTQRNFYEPQIITTDNTFVSGNCDVVIGIVNNTVYDPLQLELDSFKEELDKYFKNHTSPDVDLGDISGINASVVNIQKEIDRLNEVAKNLNESLIDLQELGKYEQYIK

SEQ ID NO: 2295 - protein, 1211 aa, Artificial Sequence
  SARS-CoV-2/India/1-31/2020__EPI_ISL_413523 spike protein (1-1211)(Q965C_S1003C)
MFVFLVLLPLVSSQCVNLTTRTQLPPAYTNSFTRGVYYPDKVFRSSVLHSTQDLFLPFFSNVTWFHAIHVSGTNGTKRFDNPVLPFNDGVYFASTEKSNIIRGWIFGTTLDSKTQSLLIVNNATNVVIKVCEFQFCNDPFLGVYYHKNNKSWMESEFRVYSSANNCTFEYVSQPFLMDLEGKQGNFKNLREFVFKNIDGYFKIYSKHTPINLVRDLPQGFSALEPLVDLPIGINITRFQTLLALHRSYLTPGDSSSGWTAGAAAYYVGYLQPRTFLLKYNENGTITDAVDCALDPLSETKCTLKSFTVEKGIYQTSNFRVQPTESIVRFPNITNLCPFGEVFNATRFASVYAWNRKRISNCVADYSVLYNSASFSTFKCYGVSPTKLNDLCFTNVYADSFVIRGDEVRQIAPGQTGKIADYNYKLPDDFTGCVIAWNSNNLDSKVGGNYNYLYRLFRKSNLKPFERDISTEIYQAGSTPCNGVEGFNCYFPLQSYGFQPTNGVGYQPYRVVVLSFELLHAPATVCGPKKSTNLVKNKCVNFNFNGLTGTGVLTESNKKFLPFQQFGRDIADTTDAVRDPQTLEILDITPCSFGGVSVITPGTNTSNQVAVLYQDVNCTEVPVAIHADQLTPTWRVYSTGSNVFQTRAGCLIGAEHVNNSYECDIPIGAGICASYQTQTNSPRRARSVASQSIIAYTMSLGAENSVAYSNNSIAIPTNFTISVTTEILPVSMTKTSVDCTMYICGDSTECSNLLLQYGSFCTQLNRALTGIAVEQDKNTQEVFAQVKQIYKTPPIKDFGGFNFSQILPDPSKPSKRSFIEDLLFNKVTLADAGFIKQYGDCLGDIAARDLICAQKFNGLTVLPPLLTDEMIAQYTSALLAGTITSGWTFGAGAALQIPFAMQMAYRFNGIGVTQNVLYENQKLIANQFNSVIGKIQDSLSSTASALGKLQDVVNQNAQALNTLVKCLSSNFGAISSVLNDILSRLDKVEAEVQIDRLITGRLQCLQTYVTQQLIRAAEIRASANLAATKMSECVLGQSKRVDFCGKGYHLMSFPQSAPHGVVFLHVTYVPAQEKNFTTAPAICHDGKAHFPREGVFVSNGTHWFVTQRNFYEPQIITTDNTFVSGNCDVVIGIVNNTVYDPLQPELDSFKEELDKYFKNHTSPDVDLGDISGINASVVNIQKEIDRLNEVAKNLNESLIDLQELGKYEQYIK

SEQ ID NO: 2296 - protein, 1211 aa, Artificial Sequence
  SARS-CoV-2/Guangdong/GD2020087-P0008/2020__EPI_ISL_413863 spike protein (1-1211)(Q965C_S1003C)
MFVFLVLLPLVSSQCVNLTTRTQLPPAYTNSFTRGVYYPDKVFRSSVLHSTQDLFLPFFSNVTWFHAIHVSGTNGTKRFDNPVLPFNDGVYFASTEKSNIIRGWIFGTTLDSKTQSLLIVNNATNVVIKVCEFQFCNDPFLGVYYHKNNKSWMESEFRVYSSANNCTFEYVSQPFLMDLEGKQGNFKNLREFVFKNIDGYFKIYSKHTPINLVRDLPQGFSALEPLVDLPIGINITRFQTLLALHRSYLTPGDSSSGWTAGAAAYYVGYLQPRTFLLKYNENGTITDAVDCALDPLSETKCTLKSFTVEKGIYQTSNFRVQPTESIVRFPNITNLCPFGEVFNATRFASVYAWNRKRISNCVADYSVLYNSASFSTFKCYGVSPTKLNDLCFTNVYADSFVIRGDEVREIAPGQTGKIADYNYKLPDDFTGCVIAWNSNNLDSKVGGNYNYLYRLFRKSNLKPFERDISTEIYQAGSTPCNGVEGFNCYFPLQSYGFQPTNGVGYQPYRVVVLSFELLHAPATVCGPKKSTNLVKNKCVNFNFNGLTGTGVLTESNKKFLPFQQFGRDIADTTDAVRDPQTLEILDITPCSFGGVSVITPGTNTSNQVAVLYQDVNCTEVPVAIHADQLTPTWRVYSTGSNVFQTRAGCLIGAEHVNNSYECDIPIGAGICASYQTQTNSPRRARSVASQSIIAYTMSLGAENSVAYSNNSIAIPTNFTISVTTEILPVSMTKTSVDCTMYICGDSTECSNLLLQYGSFCTQLNRALTGIAVEQDKNTQEVFAQVKQIYKTPPIKDFGGFNFSQILPDPSKPSKRSFIEDLLFNKVTLADAGFIKQYGDCLGDIAARDLICAQKFNGLTVLPPLLTDEMIAQYTSALLAGTITSGWTFGAGAALQIPFAMQMAYRFNGIGVTQNVLYENQKLIANQFNSAIGKIQDSLSSTASALGKLQDVVNQNAQALNTLVKCLSSNFGAISSVLNDILSRLDKVEAEVQIDRLITGRLQCLQTYVTQQLIRAAEIRASANLAATKMSECVLGQSKRVDFCGKGYHLMSFPQSAPHGVVFLHVTYVPAQEKNFTTAPAICHDGKAHFPREGVFVSNGTHWFVTQRNFYEPQIITTDNTFVSGNCDVVIGIVNNTVYDPLQPELDSFKEELDKYFKNHTSPDVDLGDISGINASVVNIQKEIDRLNEVAKNLNESLIDLQELGKYEQYIK

SEQ ID NO: 2297 - protein, 1211 aa, Artificial Sequence
  SARS-CoV-2/Sweden/01/2020__EPI_ISL_411951 spike protein (1-1211)(Q965C_S1003C)
MFVFLVLLPLVSSQCVNLTTRTQLPPAYTNSFTRGVYYPDKVFRSSVLHSTQDLFLPFFSNVTWFHAIHVSGTNGTKRFDNPVLPFNDGVYFASTEKSNIIRGWIFGTTLDSKTQSLLIVNNATNVVIKVCEFQFCNDPFLGVYYHKNNKSWMESEFRVYSSANNCTFEYVSQPFLMDLEGKQGNFKNLREFVFKNIDGYFKIYSKHTPINLVRDLPQGFSALEPLVDLPIGINITRFQTLLALHRSYLTPGDSSSGWTAGAAAYYVGYLQPRTFLLKYNENGTITDAVDCALDPLSETKCTLKSFTVEKGIYQTSNFRVQPTESIVRFPNITNLCPFGEVFNATRFASVYAWNRKRISNCVADYSVLYNSASFSTFKCYGVSPTKLNDLCFTNVYADSFVIRGDEVRQIAPGQTGKIADYNYKLPDDFTGCVIAWNSNNLDSKVGGNYNYLYRLFRKSNLKPFERDISTEIYQAGSTPCNGVEGFNCYFPLQSYGFQPTNGVGYQPYRVVVLSFELLHAPATVCGPKKSTNLVKNKCVNFNFNGLTGTGVLTESNKKFLPFQQFGRDIADTTDAVRDPQTLEILDITPCSFGGVSVITPGTNTSNQVAVLYQDVNCTEVPVAIHADQLTPTWRVYSTGSNVFQTRAGCLIGAEHVNNSYECDIPIGAGICASYQTQTNSPRRARSVASQSIIAYTMSLGAENSVAYSNNSIAIPTNFTISVTTEILPVSMTKTSVDCTMYICGDSTECSNLLLQYGSFCTQLNRALTGIAVEQDKNTQEVFAQVKQIYKTPPIKDCGGFNFSQILPDPSKPSKRSFIEDLLFNKVTLADAGFIKQYGDCLGDIAARDLICAQKFNGLTVLPPLLTDEMIAQYTSALLAGTITSGWTFGAGAALQIPFAMQMAYRFNGIGVTQNVLYENQKLIANQFNSAIGKIQDSLSSTASALGKLQDVVNQNAQALNTLVKCLSSNFGAISSVLNDILSRLDKVEAEVQIDRLITGRLQCLQTYVTQQLIRAAEIRASANLAATKMSECVLGQSKRVDFCGKGYHLMSFPQSAPHGVVFLHVTYVPAQEKNFTTAPAICHDGKAHFPREGVFVSNGTHWFVTQRNFYEPQIITTDNTFVSGNCDVVIGIVNNTVYDPLQPELDSFKEELDKYFKNHTSPDVDLGDISGINASVVNIQKEIDRLNEVAKNLNESLIDLQELGKYEQYIK

SEQ ID NO: 2298 - protein, 1211 aa, Artificial Sequence
  SARS-CoV-2/Tianmen/HBCDC-HB-07/2020__EPI_ISL_412983 spike protein (1-1211)(Q965C_S1003C)
MFVFLVLLPLVSSQCVNLTTRTQLPPAYTNSFTRGVYYPDKVFRSSVLHSTQDLFLPFFSNVTWFHAIHVSGTNGTKRFDNPVLPFNDGVYFASTEKSNIIRGWIFGTTLDSKTQSLLIVNNATNVVIKVCEFQFCNDPFLGVYYHKNNKSWMESEFRVYSSANNCTFEYVSQPFLMDLEGKQGNFKNLREFVFKNIDGYFKIYSKHTPINLVRDLPQGFSALEPLVDLPIGINITRFQTLLALHRSYLTPGDSSSGWTAGAAAYYVGYLQPRTFLLKYNENGTITDAVDCALDPLSETKCTLKSFTVEKGIYQTSNFRVQPTESIVRFPNITNLCPFGEVFNATRFASVYAWNRKRISNCVADYSVLYNSASFSTFKCYGVSPTKLNDLCFTNVYADSFVIRGDEVRQIAPGQTGKIADYNYKLPDDFTGCVIAWNSNNLDSKVGGNYNYLYRLFRKSNLKPFERDISTEIYQAGSTPCNGVEGFNCYFPLQSYGFQPTNGVGYQPYRVVVLSFELLHAPATVCGPKKSTNLVKNKCVNFNFNGLTGTGVLTESNKKFLPFQQFGRDIADTTDAVRDPQTLEILDITPCSFGGVSVITPGTNTSNQVAVLYQDLNCTEVPVAIHADQLTPTWRVYSTGSNVFQTRAGCLIGAEHVNNSYECDIPIGAGICASYQTQTNSPRRARSVASQSIIAYTMSLGAENSVAYSNNSIAIPTNFTISVTTEILPVSMTKTSVDCTMYICGDSTECSNLLLQYGSFCTQLNRALTGIAVEQDKNTQEVFAQVKQIYKTPPIKDFGGFNFSQILPDPSKPSKRSFIEDLLFNKVTLADAGFIKQYGDCLGDIAARDLICAQKFNGLTVLPPLLTDEMIAQYTSALLAGTITSGWTFGAGAALQIPFAMQMAYRFNGIGVTQNVLYENQKLIANQFNSAIGKIQDSLSSTASALGKLQDVVNQNAQALNTLVKCLSSNFGAISSVLNDILSRLDKVEAEVQIDRLITGRLQCLQTYVTQQLIRAAEIRASANLAATKMSECVLGQSKRVDFCGKGYHLMSFPQSAPHGVVFLHVTYVPAQEKNFTTAPAICHDGKAHFPREGVFVSNGTHWFVTQRNFYEPQIITTDNTFVSGNCDVVIGIVNNTVYDPLQPELDSFKEELDKYFKNHTSPDVDLGDISGINASVVNIQKEIDRLNEVAKNLNESLIDLQELGKYEQYIK

SEQ ID NO: 2299 - protein, 1211 aa, Artificial Sequence
  SARS-CoV-2/Hong Kong/case42_VM20002493/2020__EPI_ISL_414527 spike protein (1-1211)(Q965C_S1003C)
MFVFLVLLPLVSSQCVNLTTRTQLPPAYTNSFTRGVYYPDKVFRSSVLHSTQDLFLPFFSNVTWFHAIHVSGTNGTKRFDNPVLPFNDGVYFASTEKSNIIRGWIFGTTLDSKTQSLLIVNNATNVVIKVCEFQFCNDPFLGVYYHKNNKSWMESEFRVYSSANNCTFEYVSQPFLMDLEGKQGNFKNLREFVFKNIDGYFKIYSKHTPINLVRDLPQGFSALEPLVDLPIGINITRFQTLLALHRSYLTPGDSSSGWTAGAAAYYVGYLQPRTFLLKYNENGTITDAVDCALDPLSETKCTLKSFTVEKGIYQTSNFRVQPTESIVRFPNITNLCPFGEVFNATRFASVYAWNRKRISNCVADYSVLYNSASFSTFKCYGVSPTKLNDLCFTNVYADSFVIRGDEVRQIAPGQTGKIADYNYKLPDDFTGCVIAWNSNNLDSKVGGNYNYLYRLFRKSNLKPFERDISTEIYQAGSTPCNGVEGFNCYFPLQSYGFQPTNGVGYQPYRVVVLSFELLHAPATVCGPKKSTNLVKNKCVNFNFNGLTGTGVLTESNKKFLPFQQFGRDIADTTDAVRDPQTLEILDITPCSFGGVSVITPGTNTSNQVAVLYQDVNCTEVPVAIHADQLTPTWRVYSTGSNVFQTRAGCLIGAEHVNNSYECDIPIGAGICASYQTQTNSPRRARSVASQSIIAYTMSLGAENSVAYSNNSIAIPTNFAISVTTEILPVSMTKTSVDCTMYICGDSTECSNLLLQYGSFCTQLNRALTGIAVEQDKNTQEVFAQVKQIYKTPPIKDFGGFNFSQILPDPSKPSKRSFIEDLLFNKVTLADAGFIKQYGDCLGDIAARDLICAQKFNGLTVLPPLLTDEMIAQYTSALLAGTITSGWTFGAGAALQIPFAMQMAYRFNGIGVTQNVLYENQKLIANQFNSAIGKIQDSLSSTASALGKLQDVVNQNAQALNTLVKCLSSNFGAISSVLNDILSRLDKVEAEVQIDRLITGRLQCLQTYVTQQLIRAAEIRASANLAATKMSECVLGQSKRVDFCGKGYHLMSFPQSAPHGVVFLHVTYVPAQEKNFTTAPAICHDGKAHFPREGVFVSNGTHWFVTQRNFYEPQIITTDNTFVSGNCDVVIGIVNNTVYDPLQPELDSFKEELDKYFKNHTSPDVDLGDISGINASVVNIQKEIDRLNEVAKNLNESLIDLQELGKYEQYIK

SEQ ID NO: 2300 - protein, 1211 aa, Artificial Sequence
  SARS-CoV-2/USA/CruiseA-23/2020__EPI_ISL_414482 spike protein (1-1211)(Q965C_S1003C)
MFVFLVLLPLVSSQCVNLTTRTQLPPAYTNSFTRGVYYPDKVFRSSVLHSTQDLFLPFFSNVTWFHAIHVSGTNGTKRFDNPVLPFNDGVYFASTEKSNIIRGWIFGTTLDSKTQSLLIVNNATNVVIKVCEFQFCNDPFLGVYYHKNNKSWMESEFRVYSSANNCTFEYVSQPFLMDLEVKQGNFKNLREFVFKNIDGYFKIYSKHTPINLVRDLPQGFSALEPLVDLPIGINITRFQTLLALHRSYLTPGDSSSGWTAGAAAYYVGYLQPRTFLLKYNENGTITDAVDCALDPLSETKCTLKSFTVEKGIYQTSNFRVQPTESIVRFPNITNLCPFGEVFNATRFASVYAWNRKRISNCVADYSVLYNSASFSTFKCYGVSPTKLNDLCFTNVYADSFVIRGDEVRQIAPGQTGKIADYNYKLPDDFTGCVIAWNSNNLDSKVGGNYNYLYRLFRKSNLKPFERDISTEIYQAGSTPCNGVEGFNCYFPLQSYGFQPTNGVGYQPYRVVVLSFELLHAPATVCGPKKSTNLVKNKCVNFNFNGLTGTGVLTESNKKFLPFQQFGRDIADTTDAVRDPQTLEILDITPCSFGGVSVITPGTNTSNQVAVLYQDVNCTEVPVAIHADQLTPTWRVYSTGSNVFQTRAGCLIGAEHVNNSYECDIPIGAGICASYQTQTNSPRRARSVASQSIIAYTMSLGAENSVAYSNNSIAIPTNFTISVTTEILPVSMTKTSVDCTMYICGDSTECSNLLLQYGSFCTQLNRALTGIAVEQDKNTQEVFAQVKQIYKTPPIKDFGGFNFSQILPDPSKPSKRSFIEDLLFNKVTLADAGFIKQYGDCLGDIAARDLICAQKFNGLTVLPPLLTDEMIAQYTSALLAGTITSGWTFGAGAALQIPFAMQMAYRFNGIGVTQNVLYENQKLIANQFNSAIGKIQDSLSSTASALGKLQDVVNQNAQALNTLVKCLSSNFGAISSVLNDILSRLDKVEAEVQIDRLITGRLQCLQTYVTQQLIRAAEIRASANLAATKMSECVLGQSKRVDFCGKGYHLMSFPQSAPHGVVFLHVTYVPAQEKNFTTAPAICHDGKAHFPREGVFVSNGTHWFVTQRNFYEPQIITTDNTFVSGNCDVVIGIVNNTVYDPLQPELDSFKEELDKYFKNHTSPDVDLGDISGINASVVNIQKEIDRLNEVAKNLNESLIDLQELGKYEQYIK

SEQ ID NO: 2301 - protein, 1211 aa, Artificial Sequence
  SARS-CoV-2/Hong Kong/case85_VM20002868/2020__EPI_ISL_414519 spike protein (1-1211)(Q965C_S1003C)
MFVFLVLVPLVSSQCVNLTTRTQLPPAYTNSFTRGVYYPDKVFRSSVLHSTQDLFLPFFSNVTWFHAIHVSGTNGTKRFDNPVLPFNDGVYFASTEKSNIIRGWIFGTTLDSKTQSLLIVNNATNVVIKVCEFQFCNDPFLGVYYHKNNKSWMESEFRVYSSANNCTFEYVSQPFLMDLEGKQGNFKNLREFVFKNIDGYFKIYSKHTPINLVRDLPQGFSALEPLVDLPIGINITRFQTLLALHRSYLTPGDSSSGWTAGAAAYYVGYLQPRTFLLKYNENGTITDAVDCALDPLSETKCTLKSFTVEKGIYQTSNFRVQPTESIVRFPNITNLCPFGEVFNATRFASVYAWNRKRISNCVADYSVLYNSASFSTFKCYGVSPTKLNDLCFTNVYADSFVIRGDEVRQIAPGQTGKIADYNYKLPDDFTGCVIAWNSNNLDSKVGGNYNYLYRLFRKSNLKPFERDISTEIYQAGSTPCNGVEGFNCYFPLQSYGFQPTNGVGYQPYRVVVLSFELLHAPATVCGPKKSTNLVKNKCVNFNFNGLTGTGVLTESNKKFLPFQQFGRDIADTTDAVRDPQTLEILDITPCSFGGVSVITPGTNTSNQVAVLYQDVNCTEVPVAIHADQLTPTWRVYSTGSNVFQTRAGCLIGAEHVNNSYECDIPIGAGICASYQTQTNSPRRARSVASQSIIAYTMSLGAENSVAYSNNSIAIPTNFTISVTTEILPVSMTKTSVDCTMYICGDSTECSNLLLQYGSFCTQLNRALTGIAVEQDKNTQEVFAQVKQIYKTPPIKDFGGFNFSQILPDPSKPSKRSFIEDLLFNKVTLADAGFIKQYGDCLGDIAARDLICAQKFNGLTVLPPLLTDEMIAQYTSALLAGTITSGWTFGAGAALQIPFAMQMAYRFNGIGVTQNVLYENQKLIANQFNSAIGKIQDSLSSTASALGKLQDVVNQNAQALNTLVKCLSSNFGAISSVLNDILSRLDKVEAEVQIDRLITGRLQCLQTYVTQQLIRAAEIRASANLAATKMSECVLGQSKRVDFCGKGYHLMSFPQSAPHGVVFLHVTYVPAQEKNFTTAPAICHDGKAHFPREGVFVSNGTHWFVTQRNFYEPQIITTDNTFVSGNCDVVIGIVNNTVYDPLQPELDSFKEELDKYFKNHTSPDVDLGDISGINASVVNIQKEIDRLNEVAKNLNESLIDLQELGKYEQYIK

SEQ ID NO: 2302 - protein, 1211 aa, Artificial Sequence; identical to SEQ ID NO: 2292
  SARS-CoV-2/England/200990660/2020__EPI_ISL_414523 spike protein (1-1211)(Q965C_S1003C)

SEQ ID NO: 2303 - protein, 1211 aa, Artificial Sequence
  SARS-CoV-2/Australia/NSW09/2020__EPI_ISL_413595 spike protein (1-1211)(Q965C_S1003C)
MFVFLVLLPLVSSQCVNLTTRTQLPPAYTNSFTRGVYYPDKVFRSSVLHSTQDLFLPFFSNVTWFHAIHVSGTNGTKRFDNPVLPFNDGVYFASTEKSNIIRGWIFGTTLDSKTQSLLIVNNATNVVIKVCEFQFCNDPFLGVYYHKNNKSWMESEFRVYSSANNCTFEYVSQPFLMDLEGKQGNFKNLREFVFKNIDGYFKIYSKHTPINLVRDLPQGFSALEPLVDLPIGINITRFQTLLALHRSYLTPGDSSSGWTAGAAAYYVGYLQPRTFLLKYNENGTITDAVDCALDPLSETKCTLKSFTVEKGIYQTSNFRVQPTESIVRFPNITNLCPFGEVFNATRFASVYAWNRKRISNCVADYSVLYNSASFSTFKCYGVSPTKLNDLCFTNVYADSFVIRGDEVRQIAPGQTGKIADYNYKLPDDFTGCVIAWNSNNLDSKVGGNYNYLYRLFRKSNLKPFERDISTEIYQAGSTPCNGVEGFNCYFPLQSYGFQPTNGVGYQPYRVVVLSFELLHAPATVCGPKKSTNLVKNKCVNFNFNGLTGTGVLTESNKKFLPFQQFGRDIADTTDAVRDPQTLEILDITPCSFGGVSVITPGTNTSNQVAVLYQDVNCTEVPVAIHADQLTPTWRVYSTGSNVFQTRAGCLIGAEHVNNSYECDIPIGAGICASYQTQTNSPRRARSVASQSIIAYTMSLGAENSVAYSNNSIAIPTNFTISVTTEILPVSMTKTSVDCTMYICGDSTECSNLLLQYGSFCTQLNRALTGIAVEQDKNTQEVFAQVKQIYKTPPIKDFGGFNFSQILPDPSKPSKRSFIEDLLFNKVTLADAGFIKQYGDCLGDIAARDLICAQKFNGLTVLPPLLTDEMIAQYTSALLAGTITSGWTFGAGAALQIPFAMQMAYRFNGIGVTQNVLYENQKLIANQFNSAIGKIQDSLSFTASALGKLQDVVNQNAQALNTLVKCLSSNFGAISSVLNDILSRLDKVEAEVQIDRLITGRLQCLQTYVTQQLIRAAEIRASANLAATKMSECVLGQSKRVDFCGKGYHLMSFPQSAPHGVVFLHVTYVPAQEKNFTTAPAICHDGKAHFPREGVFVSNGTHWFVTQRNFYEPQIITTDNTFVSGNCDVVIGIVNNTVYDPLQPELDSFKEELDKYFKNHTSPDVDLGDISGINASVVNIQKEIDRLNEVAKNLNESLIDLQELGKYEQYIK

SEQ ID NO: 2304 - protein, 1211 aa, Artificial Sequence; identical to SEQ ID NO: 2284
  SARS-CoV-2/Australia/NSW10/2020__EPI_ISL_413596 spike protein (1-1211)(Q965C_S1003C)

SEQ ID NO: 2305 - protein, 1211 aa, Artificial Sequence
  SARS-CoV-2/Switzerland/1000477797/2020__EPI_ISL_413023 spike protein (1-1211)(Q965C_S1003C)
MFVFLVLLPLVSSQCVNLTTRTQLPPAYTNSFTRGVYYPDKVFRSSVLHSTQDLFLPFFSNVTWFHAIHVSGTNGTKRFDNPVLPFNDGVYFASTEKSNIIRGWIFGTTLDSKTQSLLIVNNATNVVIKVCEFQFCNDPFLGVYYHKNNKSWMESEFRVYSSANNCTFEYVSQPFLMDLEGKQGNFKNLREFVFKNIDGYFNIYSKHTPINLVRDLPQGFSALEPLVDLPIGINITRFQTLLALHRSYLTPGDSSSGWTAGAAAYYVGYLQPRTFLLKYNENGTITDAVDCALDPLSETKCTLKSFTVEKGIYQTSNFRVQPTESIVRFPNITNLCPFGEVFNATRFASVYAWNRKRISNCVADYSVLYNSASFSTFKCYGVSPTKLNDLCFTNVYADSFVIRGDEVRQIAPGQTGKIADYNYKLPDDFTGCVIAWNSNNLDSKVGGNYNYLYRLFRKSNLKPFERDISTEIYQAGSTPCNGVEGFNCYFPLQSYGFQPTNGVGYQPYRVVVLSFELLHAPATVCGPKKSTNLVKNKCVNFNFNGLTGTGVLTESNKKFLPFQQFGRDIADTTDAVRDPQTLEILDITPCSFGGVSVITPGTNTSNQVAVLYQGVNCTEVPVAIHADQLTPTWRVYSTGSNVFQTRAGCLIGAEHVNNSYECDIPIGAGICASYQTQTNSPRRARSVASQSIIAYTMSLGAENSVAYSNNSIAIPTNFTISVTTEILPVSMTKTSVDCTMYICGDSTECSNLLLQYGSFCTQLNRALTGIAVEQDKNTQEVFAQVKQIYKTPPIKDFGGFNFSQILPDPSKPSKRSFIEDLLFNKVTLADAGFIKQYGDCLGDIAARDLICAQKFNGLTVLPPLLTDEMIAQYTSALLAGTITSGWTFGAGAALQIPFAMQMAYRFNGIGVTQNVLYENQKLIANQFNSAIGKIQDSLSSTASALGKLQDVVNQNAQALNTLVKCLSSNFGAISSVLNDILSRLDKVEAEVQIDRLITGRLQCLQTYVTQQLIRAAEIRASANLAATKMSECVLGQSKRVDFCGKGYHLMSFPQSAPHGVVFLHVTYVPAQEKNFTTAPAICHDGKAHFPREGVFVSNGTHWFVTQRNFYEPQIITTDNTFVSGNCDVVIGIVNNTVYDPLQPELDSFKEELDKYFKNHTSPDVDLGDISGINASVVNIQKEIDRLNEVAKNLNESLIDLQELGKYEQYIK

SEQ ID NO: 2306 - protein, 1211 aa, Artificial Sequence
  SARS-CoV-2/Belgium/BA-02291/2020__EPI_ISL_415159 spike protein (1-1211)(Q965C_S1003C)
MFVFLVLLPLVSSQCVNLTTRTQLPPAYTNSFTRGVYYPDKVFRSSVLHSTQDLFLPFFSNVTWFHAIHVSGTNGTKRFDNPVLPFNDGVYFASTEKSNIIRGWIFGTTLDSKTQSLLIVNNATNVVIKVCEFQFCNDPFLGVYYHKNNKSWMESEFRVYSSANNCTFEYVSQPFLMDLEGKQGNFKNLREFVFKNIDGYFKIYSKHTPINLVRDLPQGFSALEPLVDLPIGINITRFQTLLALHRSYLTPGDSSSGWTAGAAAYYVGYLQPRTFLLKYNENGTITDAVDCALDPLSETKCTLKSFTVEKGIYQTSNFRVQPTESIVRFPNITNLCPFGEVFNATRFASVYAWNRKRISNCVADYSVLYNSASFSTFKCYGVSPTKLNDLCFTNVYADSFVIRGDEVRQIAPGQTGKIADYNYKLPDDFTGCVIAWNSNNLDSKVGGNYNYLYRLFRRSNLKPFERDISTEIYQAGSTPCNGVEGFNCYFPLQSYGFQPTNGVGYQPYRVVVLSFELLPAPATVCGPKKSTNLVKNKCVNFNFNGLTGTGVLTESNKKFLPFQQFGRDIADTTDAVRDPQTLEILDITPCSFGGVSVITPGTNTSNQVAVLYQGVNCTEVPVAIHADQLTPTWRVYSTGSNVFQTRAGCLIGAEHVNNSYECDIPIGAGICASYQTQTNSPRRARSVASQSIIAYTMSLGAENSVAYSNNSIAIPTNFTISVTTEILPVSMTKTSVDCTMYICGDSTECSNLLLQYGSFCTQLNRALTGIAVEQDKNTQEVFAQVKQIYKTPPIKDFGGFNFSQILPDPSKPSKRSFIEDLLFNKVTLADAGFIKQYGDCLGDIAARDLICAQKFNGLTVLPPLLTDEMIAQYTSALLAGTITSGWTFGAGAALQIPFAMQMAYRFNGIGVTQNVLYENQKLIANQFNSAIGKIQDSLSSAAPALGKLQDVVNQNAQALNTLVKCLSSNFGAISSVLNDILSRLDKVEAEVQIDRLITGRLQCLQTYVTQQLIRAAEIRASANLAATKMSECVLGQSKRVDFCGKGYHLMSFPQSAPHGVVFLHVTYVPAQEKNFTTAPAICHDGKAHFPREGVFVSNGTHWFVTQRNFYEPQIITTDNTFVSGNCDVVIGIVNNTVYDPLQPELDSFKEELDKYFKNHTSPDVDLGDISGINASVVNIQKEIDRLNEVAKNLNESLIDLQELGKYEQYIK

SEQ ID NO: 2307 - protein, 1211 aa, Artificial Sequence
  SARS-CoV-2/USA/WA8-UW5/2020__EPI_ISL_413486 spike protein (1-1211)(Q965C_S1003C)
MFVFLVLLPLVSSQCVNLTTRTQLPPAYTNSFTRGVYYPDKVFRSSVLHSTQDLFLPFFSNVTWFHAIHVSGTNGTKRFDNPVLPFNDGVYFASTEKSNIIRGWIFGTTLDSKTQSLLIVNNATNVVIKVCEFQFCNDPFLGVYYHKNNKSWMESEFRVYSSANNCTFEYVSQPFLMDLEGKQGNFKNLREFVFKNIDGYFKIYSKHTPINLVRDLPQGFSALEPLVDLPIGINITRFQTLLALHRSYLTPGDSSSGWTAGAAAYYVGYLQPRTFLLKYNENGTITDAVDCALDPLSETKCTLKSFTVEKGIYQTSNFRVQPTESIVRFPNITNLCPFGEVFNATRFASVYAWNRKRISNCVADYSVLYNSASFSTFKCYGVSPTKLNDLCFTNVYADSFVIRGDEVRQIAPGQTGKIADYNYKLPDDFTGCVIAWNSNNLDSKVGGNYNYLYRLFRKSNLKPFERDISTEIYQAGSTPCNGVEGFNCYFPLQSYGFQPTNGVGYQPYRVVVLSFELLHAPATVCGPKKSTNLVKNKCVNFNFNGLTGTGVLTESNKKFLPFQQFGRDIADTTDAVRDPQTLEILDITPCSFGGVSVITPGTNTSNQVAVLYQDVNCTEVPVAIHADQLTPTWRVYSTGSNVFQTRAGCLIGAEYVNNSYECDIPIGAGICASYQTQTNSPRRARSVASQSIIAYTMSLGAENSVAYSNNSIAIPTNFTISVTTEILPVSMTKTSVDCTMYICGDSTECSNLLLQYGSFCTQLNRALTGIAVEQDKNTQEVFAQVKQIYKTPPIKDFGGFNFSQILPDPSKPSKRSFIEDLLFNKVTLADAGFIKQYGDCLGDIAARDLICAQKFNGLTVLPPLLTDEMIAQYTSALLAGTITSGWTFGAGAALQIPFAMQMAYRFNGIGVTQNVLYENQKLIANQFNSAIGKIQDSLSSTASALGKLQDVVNQNAQALNTLVKCLSSNFGAISSVLNDILSRLDKVEAEVQIDRLITGRLQCLQTYVTQQLIRAAEIRASANLAATKMSECVLGQSKRVDFCGKGYHLMSFPQSAPHGVVFLHVTYVPAQEKNFTTAPAICHDGKAHFPREGVFVSNGTHWFVTQRNFYEPQIITTDNTFVSGNCDVVIGIVNNTVYDPLQPELDSFKEELDKYFKNHTSPDVDLGDISGINASVVNIQKEIDRLNEVAKNLNESLIDLQELGKYEQYIK

SEQ ID NO: 2308 - protein, 1211 aa, Artificial Sequence
  SARS-CoV-2/England/20102000506/2020__EPI_ISL_415147 spike protein (1-1211)(Q965C_S1003C)
MFVFLVLLPLVSSQCVNLTTRTQLPPAYTNSFTRGVYYPDKVFRSSVLHSTQDLFLPFFSNVTWFHAIHVSGTNGTKRFDNPVLPFNDGVYFASTEKSNIIRGWIFGTTLDSKTQSLLIVNNATNVVIKVCEFQFCNDPFLGVYYHKNNKSWMESEFRVYSSANNCTFEYVSQPFLMDLEGKQGNFKNLREFVFKNIDGYFKIYSKHTPINLVRDLPQGFSALEPLVDLPIGINITRFQTLLALHRSYLTPGDSSSGWTAGAAAYYVGYLQPRTFLLKYNENGTITDAVDCALDPLSETKCTLKSFTVEKGIYQTSNFRVQPTESIVRFPNITNLCPFGEVFNATRFASVYAWNRKRISNCVADYSVLYNSASFSTFKCYGVSPTKLNDLCFTNVYADSFVIRGDEVRQIAPGQTGKIADYNYKLPDDFTGCVIAWNSNNLDSKVGGNYNYLYRLFRKSNLKPFERDISTEIYQAGSTPCNGVEGFNCYFPLQSYGFQPTNGVGYQPYRVVVLSFELLHAPATVCGPKKSTNLVKNKCVNFNFNGLTGTGVLTESNKKFLPFQQFGRDIADTTDAVRDPQTLEILDITPCSFGGVSVITPGTNTSNQVAVLYQGVNCTEVPVAIHADQLTPTWRVYSTGSNVFQTRAGCLIGAEHVNNSYECDIPIGAGICASYQTQTNSPRRARSVASQSIIAYTMSLGAENSVAYSNNSIAIPTNFTISVTTEILPVSMTKTSVDCTMYICGDSTECSNLLLQYGSFCTQLNRALTGIAVEQDKNTQEVFAQVKQIYKTPPIKDFGGFNFSQILPDPSKPSKRSFIEDLLFNKVTLADAGFIKQYGYCLGDIAARDLICAQKFNGLTVLPPLLTDEMIAQYTSALLAGTITSGWTFGAGAALQIPFAMQMAYRFNGIGVTQNVLYENQKLIANQFNSAIGKIQDSLSSTASALGKLQDVVNQNAQALNTLVKCLSSNFGAISSVLNDILSRLDKVEAEVQIDRLITGRLQCLQTYVTQQLIRAAEIRASANLAATKMSECVLGQSKRVDFCGKGYHLMSFPQSAPHGVVFLHVTYVPAQEKNFTTAPAICHDGKAHFPREGVFVSNGTHWFVTQRNFYEPQIITTDNTFVSGNCDVVIGIVNNTVYDPLQPELDSFKEELDKYFKNHTSPDVDLGDISGINASVVNIQKEIDRLNEVAKNLNESLIDLQELGKYEQYIK

SEQ ID NO: 2309 - protein, 1211 aa, Artificial Sequence
  SARS-CoV-2/Belgium/VAG-03013/2020__EPI_ISL_415155 spike protein (1-1211)(Q965C_S1003C)
MFVFLVLLPLVSSQCVNLTTRTQLPPAYTNSFTRGVYYPDKVFRSSVLHSTQDLFLPFFSNVTWFHAIHVSGTNGTKRFDNPVLPFNDGVYFASTEKSNIIRGWIFGTTLDSKTQSLLIVNNATNVVIKVCEFQFCNDPFLGVYYHKNNKSWMESEFRVYSSANNCTFEYVSQPFLMDLEGKQGNFKNLREFVFKNIDGYFKIYSKHTPINLVRDLPQGFSALEPLVDLPIGINITRFQTLLALHRSYLTPGDSSSGWTAGAAAYYVGYLQPRTFLLKYNENGTITDAVDCALDPLSETKCTLKSFTVEKGIYQTSNFRVQPTESIVRFPNITNLCPFGEVFNATRFASVYAWNRKRISNCVADYSVLYNSASFSTFKCYGVSPTKLNDLCFTNVYADSFVIRGDEVRQIAPGQTGKIADYNYKLPDDFTGCVIAWNSNNLDSKVGGNYNYLYRLFRKSNLKPFERDISTEIYQAGSTPCNGVEGFNCYFPLQSYGFQPTNGVGYQPYRVVVLSFELLHAPATVCGPKKSTNLVKNKCVNFNFNGLTGTGVLTESNKKFLPFQQFGRDIADTTDAVRDPQTLEILDITPCSFGGVSVITPGTNTSNQVAVLYQGVNCTEVPVAIHADQLTPTWRVYSTGSNVFQTRAGCLIGAEHVNNSYECDIPIGAGICASYQTQTNSPRRARSVASQSIIAYTMSLGAENSVAYSNNSIAIPTNFTISVTTEILPVSMTKTSVDCTMYICGDSTECSNLLLQYGSFCTQLNRALTGIAVEQDKNTQEVFAQVKQIYKTPPIKDFGGFNFSQILPDPSKPSKRSFIEDLLFNKVTLADAGFIKQYGDCLGDIAARDLICAQKFNGLTVLPPLLTDEMIAQYTSALLAGTITSGWTFGAGAALQIPFAMQMAYRFNGIGVTQNVLYENQKLIANQFNSAIGKIQDSLSSTATALGKLQDVVNQNAQALNTLVKCLSSNFGAISSVLNDILSRLDKVEAEVQIDRLITGRLQCLQTYVTQQLIRAAEIRASANLAATKMSECVLGQSKRVDFCGKGYHLMSFPQSAPHGVVFLHVTYVPAQEKNFTTAPAICHDGKAHFPREGVFVSNGTHWFVTQRNFYEPQIITTDNTFVSGNCDVVIGIVNNTVYDPLQPELDSFKEELDKYFKNHTSPDVDLGDISGINASVVNIQKEIDRLNEVAKNLNESLIDLQELGKYEQYIK

SEQ ID NO: 2310 - protein, 1211 aa, Artificial Sequence
  SARS-CoV-2/Belgium/BC-03016/2020__EPI_ISL_415157 spike protein (1-1211)(Q965C_S1003C)
MFVFLVLLPLVSSQCVNLTTRTQLPPAYTNSFTRGVYYPDKVFRSSVLHSTQDLFLPFFSNVTWFHAIHVSGTNGTKRFDNPVLPFNDGVYFASTEKSNIIRGWIFGTTLDSKTQSLLIVNNATNVVIKVCEFQFCNDPFLGVYYHKNNKSWMESEFRVYSSANNCTFEYVSQPFLMDLEGKQGNFKNLREFVFKNIDGYFKIYSKHTPINLVRDLPQGFSALEPLVDLPIGINITRFQTLLALHRSYLTPGDSSSGWTAGAAAYYVGYLQPRTFLLKYNENGTITDAVDCALDPLSETKCTLKSFTVEKGIYQTSNFRVQPTESIVRFPNITNLCPFGEVFNATRFASVYAWNRKRISNCVADYSVLYNSASFSTFKCYGVSPTKLNDLCFTNVYADSFVIRGDEVRQIAPGQTGKIADYNYKLPDDFTGCVIAWNSNNLDSKVGGNYNYLYRLFRKSNLKPFERDISTEIYQAGSTPCNGVEGFNCYFPLQSYGFQPTNGVGYQPYRVVVLSFELLHAPATVCGPKKSTNLVKNKCVNFNFNGLTGTGVLTESNKKFLPFQQFGRDIADTTDAVRDPQTLEILDITPCSFGGVSVITPGTNTSNQVAVLYQGVNCTEVPVAIHADQLTPTWRVYSTGSNVFQTRAGCLIGAEHVNNSYECDIPIGAGICASYQTQTNSPRRARSVASQSIIAYTMSLGAENSVAYSNNSIAIPTNFTISVTTEILPVSMTKTSVDCTMYICGDSTECSNLLLQYGSFCTQLNRALTGIAVEQDKNTQEVFAQVKQIYKTPPIKDFGGFNFSQILPDPSKPSKRSFIEDLLFNKVTLADAGFIKQYGDCLGDIAARDLICAQKFNGLTVLPPLLTDEMIAQYTSALLAGTITSGWTFGAGAALQIPFAMQMAYRFNGIGVTQNVLYENQKLIANQFNSAIGKIQDSLSSTAPALGKLQDVVNQNAQALNTLVKCLSSNFGAISSVLNDILSRLDKVEAEVQIDRLITGRLQCLQTYVTQQLIRAAEIRASANLAATKMSECVLGQSKRVDFCGKGYHLMSFPQSAPHGVVFLHVTYVPAQEKNFTTAPAICHDGKAHFPREGVFVSNGTHWFVTQRNFYEPQIITTDNTFVSGNCDVVIGIVNNTVYDPLQPELDSFKEELDKYFKNHTSPDVDLGDISGINASVVNIQKEIDRLNEVAKNLNESLIDLQELGKYEQYIK

SEQ ID NO: 2311 - protein, 1211 aa, Artificial Sequence
  SARS-CoV-2/Germany/BavPat3/2020__EPI_ISL_414521 spike protein (1-1211)(Q965C_S1003C)
MFVFLVLLPLVSSQCVNLTTRTQLPPAYTNSFTRGVYYPDKVFRSSVLHSTQDLFLPFFSNVTWFHAIHVSGTNGTKRFDNPVLPFNDGVYFASTEKSNIIRGWIFGTTLDSKTQSLLIVNNATNVVIKVCEFQFCNDPFLGVYYHKNNKSWMESEFRVYSSANNCTFEYVSQPFLMDLEGKQGNFKNLREFVFKNIDGYFKIYSKHTPINLVRDLPQGFSALEPLVDLPIGINITRFQTLLALHRSYLTPGDSSSGWTAGAAAYYVGYLQPRTFLLKYNENGTITDAVDCALDPLSETKCTLKSFTVEKGIYQTSNFRVQPTESIVRFPNITNLCPFGEVFNATRFASVYAWNRKRISNCVADYSVLYNSASFSTFKCYGVSPTKLNDLCFTNVYADSFVIRGDEVRQIAPGQTGKIADYNYKLPDDFTGCVIAWNSNNLDSKVGGNYNYLYRLFRKSNLKPFERDISTEIYQAGSTPCNGVEGFNCYFPLQSYGFQPTNGVGYQPYRVVVLSFELLHAPATVCGPKKSTNLVKNKCVNFNFNGLTGTGVLTESNKKFLPFQQFGRDIADTTDAVRDPQTLEILDITPCSFGGVSVITPGTNTSNQVAVLYQDVNCTEVPVAIHADQLTPTWRVYSTGSNVFQTRAGCLIGAEHVNNSYECDIPIGAGICASYQTQTNSPRRARSVASQSIIAYTMSLGAENSVAYSNNSIAIPTNFTISVTTEILPVSMTKTSVDCTMYICGDSTECSNLLLQYGSFCTQLNRALTGIAVEQDKNTQQVFAQVKQIYKTPPIKDFGGFNFSQILPDPSKPSKRSFIEDLLFNKVTLADAGFIKQYGDCLGDIAARDLICAQKFNGLTVLPPLLTDEMIAQYTSALLAGTITSGWTFGAGAALQIPFAMQMAYRFNGIGVTQNVLYENQKLIANQFNSAIGKIQDSLSSTASALGKLQDVVNQNAQALNTLVKCLSSNFGAISSVLNDILSRLDKVEAEVQIDRLITGRLQCLQTYVTQQLIRAAEIRASANLAATKMSECVLGQSKRVDFCGKGYHLMSFPQSAPHGVVFLHVTYVPAQEKNFTTAPAICHDGKAHFPREGVFVSNGTHWFVTQRNFYEPQIITTDNTFVSGNCDVVIGIVNNTVYDPLQPELDSFKEELDKYFKNHTSPDVDLGDISGINASVVNIQKEIDRLNEVAKNLNESLIDLQELGKYEQYIK

SEQ ID NO: 2312 - protein, 1211 aa, Artificial Sequence
  SARS-CoV-2/France/HF1805/2020__EPI_ISL_414628 spike protein (1-1211)(Q965C_S1003C)
MFVFLVLLPLVSSQCVNLTTRTQLPPAYTNSFTRGVYYPDKVFRSSVLHSTQDLFLPFFSNVTWFHAIHVSGTNGTKRFDNPVLPFNDGVYFASTEKSNIIRGWIFGTTLDSKTQSLLIVNNATNVVIKVCEFQFCNDPFLGVYYHKNNKSWMESEFRVYSSANNCTFEYVSQPFLMDLEGKQGNFKNLREFVFKNIDGYFKIYSKHTPINLVRDLPQGFSALEPLVDLPIGINITRFQTLLALHRSYLTPGDSSSGWTAGAAAYYVGYLQPRTFLLKYNENGTITDAVDCALDPLSETKCTLKSFTVEKGIYQTSNFRVQPTESIVRFPNITNLCPFGEVFNATRFASVYAWNRKRISNCVADYSVLYNSASFSTFKCYGVSPTKLNDLCFTNVYADSFVIRGDEVRQIAPGQTGKIADYNYKLPDDFTGCVIAWNSNNLDSKVGGNYNYLYRLFRKSNLKPFERDISTEIYQAGSTPCNGVEGFNCYFPLQSYGFQPTNGVGYQPYRVVVLSFELLHAPATVCGPKKSTNLVKNKCVNFNFNGLTGTGVLTESNKKFLPFQQFGRDIADTTDAVRDPQTLEILDITPCSFGGVSVITPGTNTSNQVAVLYQGVNCTEVPVAIHADQLTPTWRVYSTGSNVFQTRAGCLIGAEHVNNSYECDIPIGAGICASYQTQTNSPRRARSVASQSIIAYTMSLGAENSVAYSNNSIAIPTNFTISVTTEILPVSMTKTSVDCTMYICGDSTECSNLLLQYGSFCTQLNRALTGIAVEQDKNTQEVFAQVKQIYKTPPIKDFGGFNFSQILPDPSKPSKRSFIEDLLFNKVTLADAGFIKQYGDCLGDIAARDLICAQKFNGLTVLPPLLTDEMIAQYTSALLAGTITSGWTFGAGAALQIPFAMQMAYRFNGIGVTQNVLYENQKLIANQFNSAIGKIQDSLSSTASALGKLQDVVNQNAQALNTLVKCLSSNFGAISSVLNDILSRLDKVEAEVQIDRLITGRLQCLQTYVTQQLIRAAEIRASANLAATKMSECVLGQSKRVDFCGKGYHLMSFPQSAPHGVVFLHVTYVPAQEKNFTTAPAICHDGKAHFPREGVFVSNGTHWFVTQRNFYEPQIITTDNTFVSGNCDVVIGVVNNTVYDPLQPELDSFKEELDKYFKNHTSPDVDLGDISGINASVVNIQKEIDRLNEVAKNLNESLIDLQELGKYEQYIK

SEQ ID NO: 2313 - protein, 1211 aa, Artificial Sequence
  SARS-CoV-2/Netherlands/ZuidHolland_9/2020__EPI_ISL_414445 spike protein (1-1211)(Q965C_S1003C)
MFVFLVLLPLVSSQCVNLTTRTQLPPAYTNSFTRGVYYPDKVFRSSVLHSTQDLFLPFFSNVTWFHAIHVSGTNGTKRFDNPVLPFNDGVYFASTEKSNIIRGWIFGTTLDSKTQSLLIVNNATNVVIKVCEFQFCNDPFLGVYYHKNNKSWMESEFRVYSSANNCTFEYVSQPFLMDLEGKQGNFKNLREFVFKNIDGYFKIYSKHTPINLVRDLPQGFSALEPLVDLPIGINITRFQTLLALHRSYLTPGDSSSGWTAGAAAYYVGYLQPRTFLLKYNENGTITDAVDCALDPLSETKCTLKSFTVEKGIYQTSNFRVQPTESIVRFPNITNLCPFGEVFNATRFASVYAWNRKRISNCVADYSVLYNSASFSTFKCYGVSPTKLNDLCFTNVYADSFVIRGDEVRQIAPGQTGKIADYNYKLPDDFTGCVIAWNSNNLDSKVGGNYNYLYRLFRKSNLKPFERDISTEIYQAGSTPCNGVEGFNCYFPLQSYGFQPTNGVGYQPYRVVVLSFELLHAPATVCGPKKSTNLVKNKCVNFNFNGLTGTGVLTESNKKFLPFQQFGRDIADTTDAVRDPQTLEILDITPCSFGGVSVITPGTNTSNQVAVLYQGVNCTEVPVAIHADQLTPTWRVYSTGSNVFQTRAGCLIGAEHVNNSYECDIPIGAGICASYQTQTNSPRRARSVASQSIIAYTMSLGAENSVAYSNNSIAIPTNFTISVTTEILPVSMTKTSVDCTMYICGDSTECSNLLLQYGSFCTQLNRALTGIAVEQDKNTQEVFAQVKQIYKTPPIKDFGGFNFSQILPDPSKPSKRSFIEDLLFNKVTLADAGFIKQYGDCLGDIAARDLICVQKFNGLTVLPPLLTDEMIAQYTSALLAGTITSGWTFGAGAALQIPFAMQMAYRFNGIGVTQNVLYENQKLIANQFNSAIGKIQDSLSSTASALGKLQDVVNQNAQALNTLVKCLSSNFGAISSVLNDILSRLDKVEAEVQIDRLITGRLQCLQTYVTQQLIRAAEIRASANLAATKMSECVLGQSKRVDFCGKGYHLMSFPQSAPHGVVFLHVTYVPAQEKNFTTAPAICHDGKAHFPREGVFVSNGTHWFVTQRNFYEPQIITTDNTFVSGNCDVVIGIVNNTVYDPLQPELDSFKEELDKYFKNHTSPDVDLGDISGINASVVNIQKEIDRLNEVAKNLNESLIDLQELGKYEQYIK

SEQ ID NO: 2314 - protein, 1211 aa, Artificial Sequence
  SARS-CoV-2/Finland/FIN03032020A/2020__EPI_ISL_413602 spike protein (1-1211)(Q965C_S1003C)
MFVFLVLLPLVSSQCVNLTTRTQLPPAYTNSFTRGVYYPDKVFRSSVLHSTQDLFLPFFSNVTWFHAIHVSGTNGTKRFDNPVLPFNDGVYFASTEKSNIIRGWIFGTTLDSKTQSLLIVNNATNVVIKVCEFQFCNDPFLGVYYHKNNKSWMESEFRVYSSANNCTFEYVSQPFLMDLEGKQGNFKNLREFVFKNIDGYFKIYSKHTPINLVRDLPQGFSALEPLVDLPIGINITRFQTLLALHRSYLTPGDSSSGWTAGAAAYYVGYLQPRTFLLKYNENGTITDAVDCALDPLSETKCTLKSFTVEKGIYQTSNFRVQPTESIVRFPNITNLCPFGEVFNATRFASVYAWNRKRISNCVADYSVLYNSASFSTFKCYGVSPTKLNDLCFTNVYADSFVIRGDEVRQIAPGQTGKIADYNYKLPDDFTGCVISWNSNNLDSKVGGNYNYLYRLFRKSNLKPFERDISTEIYQAGSTPCNGVEGFNCYFPLQSYGFQPTNGVGYQPYRVVVLSFELLHAPATVCGPKKSTNLVKNKCVNFNFNGLTGTGVLTESNKKFLPFQQFGRDIADTTDAVRDPQTLEILDITPCSFGGVSVITPGTNTSNQVAVLYQGVNCTEVPVAIHADQLTPTWRVYSTGSNVFQTRAGCLIGAEHVNNSYECDIPIGAGICASYQTQTNSPRRARSVASQSIIAYTMSLGAENSVAYSNNSIAIPTNFTISVTTEILPVSMTKTSVDCTMYICGDSTECSNLLLQYGSFCTQLNRALTGIAVEQDKNTQEVFAQVKQIYKTPPIKDFGGFNFSQILPDPSKPSKRSFIEDLLFNKVTLADAGFIKQYGDCLGDIAARDLICAQKFNGLTVLPPLLTDEMIAQYTSALLAGTITSGWTFGAGAALQIPFAMQMAYRFNGIGVTQNVLYENQKLIANQFNSAIGKIQDSLSSTASALGKLQDVVNQNAQALNTLVKCLSSNFGAISSVLNDILSRLDKVEAEVQIDRLITGRLQCLQTYVTQQLIRAAEIRASANLAATKMSECVLGQSKRVDFCGKGYHLMSFPQSAPHGVVFLHVTYVPAQEKNFTTAPAICHDGKAHFPREGVFVSNGTHWFVTQRNFYEPQIITTDNTFVSGNCDVVIGIVNNTVYDPLQPELDSFKEELDKYFKNHTSPDVDLGDISGINASVVNIQKEIDRLNEVAKNLNESLIDLQELGKYEQYIK

SEQ ID NO: 2315 - protein, 1211 aa, Artificial Sequence
  SARS-CoV-2/France/GE1977/2020__EPI_ISL_414632 spike protein (1-1211)(Q965C_S1003C)
MFVFLVLLPLVSSQCVNLTTRTQLPPAYTNSFTRGVYYPDKVFRSSVLHSTQDLFLPFFSNVTWFHAIHVSGTNGTKRFDNPVLPFNDGVYFASTEKSNIIRGWIFGTTLDSKTQSLLIVNNATNVVIKVCEFQFCNDPFLGVYYHKNNKSWMESEFRVYSSANNCTFEYVSQPFLMDLEGKQGNFKNLREFVFKNIDGYFKIYSKHTPINLVRDLPQGFSALEPLVDLPIGINITRFQTLLALHRSYLTPGDSSSGWTAGAAAYYVGYLQPRTFLLKYNENGTITDAVDCALDPLSETKCTLKSFTVEKGIYQTSNFRVQPTESIVRFPNITNLCPFGEVFNATRFASVYAWNRKRISNCVADYSVLYNSASFSTFKCYGVSPTKLNDLCFTNVYADSFVIRGDEVRQIAPGQTGKIADYNYKLPDDFTGCVIAWNSNNLDSKVGGNYNYLYRLFRKSNLKPFERDISTEIYQAGSTPCNGVEGFNCYFPLQSYGFQPTNGVGYQPYRVVVLSFELLHAPATVCGPKKSTNLVKNKCVNFNFNGLTGTGVLTESNKKFLPFQQFGRDIADTTDAVRDPQTLEILDITPCSFGGVSVITPGTNTSNQVAVLYQGVNCTEVPVAIHADQLTPTWRVYSTGSNVFQTRAGCLIGAEHVNNSYECDIPIGAGICASYQTQTNSPRRARSVASQSIIAYTMSLGAENSVAYSNNSIAIPTNFTISVTTEILPVSMTKTSVDCTMYICGDSTECSNLLLQYGSFCTQLNRALTGIAVEQDKNTQEVFAQVKQIYKTPPIKDFGGFNFSQILPDPSKPSKRSFIEDLLFNKVTLADAGFIKQYGDCLGDIAARDLICAQKFNGLTVLPPLLTDEMIAQYTSALLAGTITSGWTFGAGAALQIPFAMQMAYRFNGIGVTQNVLYENQKLIANQFNSAIGKIQDSLFSTASALGKLQDVVNQNAQALNTLVKCLSSNFGAISSVLNDILSRLDKVEAEVQIDRLITGRLQCLQTYVTQQLIRAAEIRASANLAATKMSECVLGQSKRVDFCGKGYHLMSFPQSAPHGVVFLHVTYVPAQEKNFTTAPAICHDGKAHFPREGVFVSNGTHWFVTQRNFYEPQIITTDNTFVSGNCDVVIGIVNNTVYDPLQPELDSFKEELDKYFKNHTSPDVDLGDISGINASVVNIQKEIDRLNEVAKNLNESLIDLQELGKYEQYIK

SEQ ID NO: 2316 - protein, 1211 aa, Artificial Sequence
  SARS-CoV-2/Finland/FIN-313/2020__EPI_ISL_414641 spike protein (1-1211)(Q965C_S1003C)
MFVFLVLLPLVSSQCVNLTTRTQLPPAYTNSFTRGVYYPDKVFRSSVLHSTQDLFLPFFSNVTWFHAIHVSGTNGTKRFDNPVLPFNDGVYFASTEKSNIIRGWIFGTTLDSKTQSLLIVNNATNVVIKVCEFQFCNDPFLGVYYHKNNKSWMESEFRVYSSANNCTFEYVSQPFLMDLEGKQGNFKNLREFVFKNIDGYFKIYSKHTPINLVRDLPQGFSALEPLVDLPIGINITRFKTLLALHRSYLTPGDSSSGWTAGAAAYYVGYLQPRTFLLKYNENGTITDAVDCALDPLSETKCTLKSFTVEKGIYQTSNFRVQPTESIVRFPNITNLCPFGEVFNATRFASVYAWNRKRISNCVADYSVLYNSASFSTFKCYGVSPTKLNDLCFTNVYADSFVIRGDEVRQIAPGQTGKIADYNYKLPDDFTGCVIAWNSNNLDSKVGGNYNYLYRLFRKSNLKPFERDISTEIYQAGSTPCNGVEGFNCYFPLQSYGFQPTNGVGYQPYRVVVLSFELLHAPATVCGPKKSTNLVKNKCVNFNFNGLTGTGVLTESNKKFLPFQQFGRDIADTTDAVRDPQTLEILDITPCSFGGVSVITPGTNTSNQVAVLYQGVNCTEVPVAIHADQLTPTWRVYSTGSNVFQTRAGCLIGAEHVNNSYECDIPIGAGICASYQTQTNSPRRARSVASQSIIAYTMSLGAENSVAYSNNSIAIPTNFTISVTTEILPVSMTKTSVDCTMYICGDSTECSNLLLQYGSFCTQLNRALTGIAVEQDKNTQEVFAQVKQIYKTPPIKDFGGFNFSQILPDPSKPSKRSFIEDLLFNKVTLADAGFIKQYGDCLGDIAARDLICAQKFNGLTVLPPLLTDEMIAQYTSALLAGTITSGWTFGAGAALQIPFAMQMAYRFNGIGVTQNVLYENQKLIANQFNSAIGKIQDSLSSTASALGKLQDVVNQNAQALNTLVKCLSSNFGAISSVLNDILSRLDKVEAEVQIDRLITGRLQCLQTYVTQQLIRAAEIRASANLAATKMSECVLGQSKRVDFCGKGYHLMSFPQSAPHGVVFLHVTYVPAQEKNFTTAPAICHDGKAHFPREGVFVSNGTHWFVTQRNFYEPQIITTDNTFVSGNCDVVIGIVNNTVYDPLQPELDSFKEELDKYFKNHTSPDVDLGDISGINASVVNIQKEIDRLNEVAKNLNESLIDLQELGKYEQYIK

SEQ ID NO: 2317 - protein, 1211 aa, Artificial Sequence
  SARS-CoV-2/Netherlands/ZuidHolland_2/2020__EPI_ISL_414556 spike protein (1-1211)(Q965C_S1003C)
MFVFLVLLPLVSSQCVNLTTRTQLPPAYTNSFTRGVYYPDKVFRSSVLHSTQDLFLPFFSNVTWFHAIHVSGTNGTKRFDNPVLPFNDGVYFASTEKSNIIRGWIFGTTLDSKTQSLLIVNNATNVVIKVCEFQFCNDPFLGVYYHKNNKSWMESEFRVYSSANNCTFEYVSQPFLMDLEGKQGNFKNLREFVFKNIDGYFKIYSKHTPINLVRDLPQGFSALEPLVDLPIGINITRFQTLLALHRSYLTPGDSSSGWTAGAAAYYVGYLQPRTFLLKYNENGTITDAVDCALDPLSETKCTLKSFTVEKGIYQTSNFRVQPTESIVRFPNITNLCPFGEVFNATRFASVYAWNRKRISNCVADYSVLYNSASFSTFKCYGVSPTKLNDLCFTNVYADSFVIRGDEVRQIAPGQTGKIADYNYKLPDDFTGCVIAWNSNNLDSKVGGNYNYLYRLFRKSNLKPFERDISTEIYQAGSTPCNGVEGFNCYFPLQSYGFQPTNGVGYQPYRVVVLSFELLHAPATVCGPKKSTNLVKNKCVNFNFNGLTGTGVLTESNKKFLPFQQFGRDIADTTDAVRDPQTLEILDITPCSFGGVSVITPGTNTSNQVAVLYQGVNCTEVPVAIHADQLTPTWRVYSTGSNVFQTRAGCLIGAEHVNNSYECDIPIGAGICASYQTQTNSPRRARSVASQSIIAYTMSLGAENSVAYSNNSIAIPTNFTISVTTEILPVSMTKTSVDCTMYICGDSTECSNLLLQYGSFCTQLNRALTGIALEQDKNTQEVFAQVKQIYKTPPIKDFGGFNFSQILPDPSKPSKRSFIEDLLFNKVTLADAGFIKQYGDCLGDIAARDLICAQKFNGLTVLPPLLTDEMIAQYTSALLAGTITSGWTFGAGAALQIPFAMQMAYRFNGIGVTQNVLYENQKLIANQFNSAIGKIQDSLSSTASALGKLQDVVNQNAQALNTLVKCLSSNFGAISSVLNDILSRLDKVEAEVQIDRLITGRLQCLQTYVTQQLIRAAEIRASANLAATKMSECVLGQSKRVDFCGKGYHLMSFPQSAPHGVVFLHVTYVPAQEKNFTTAPAICHDGKAHFPREGVFVSNGTHWFVTQRNFYEPQIITTDNTFVSGNCDVVIGIVNNTVYDPLQPELDSFKEELDKYFKNHTSPDVDLGDISGINASVVNIQKEIDRLNEVAKNLNESLIDLQELGKYEQYIK

SEQ ID NO: 2318 - protein, 1211 aa, Artificial Sequence
  SARS-CoV-2/USA/WA-UW31/2020__EPI_ISL_414618 spike protein (1-1211)(Q965C_S1003C)
MFVFLVLLPLVSSQCVNLTTRTQLPPAYTNSFTRGVYYPDKVFRSSVLHSTQDLFLPFFSNVTWFHAIHVSGTNGTKRFDNPVLPFNDGVYFASTEKSNIIRGWIFGTTLDSKTQSLLIVNNATNVVIKVCEFQFCNDPFLGVYYHKNNKSWMESEFRVYSSANNCTFEYVSQPFLMDLEGKQGNFKNLREFVFKNIDGYFKIYSKHTPINLVRDLPQGFSALEPLVDLPIGINITRFQTLLALHRSYLTPGDSSSGWTAGAAAYYVGYLQPRTFLLKYNENGTITDAVDCALDPLSETKCTLKSFTVEKGIYQTSNFRVQPTESIVRFPNITNLCPFGEVFNATRFASVYAWNRKRISNCVADYSVLYNSASFSTFKCYGVSPTKLNDLCFTNVYADSFVIRGDEVRQIAPGQTGKIADYNYKLPDDFTGCVIAWNSNNLDSKVGGNYNYLYRLFRKSNLKPFERDISTEIYQAGSTPCNGAEGFNCYFPLQSYGFQPTNGVGYQPYRVVVLSFELLHAPATVCGPKKSTNLVKNKCVNFNFNGLTGTGVLTESNKKFLPFQQFGRDIADTTDAVRDPQTLEILDITPCSFGGVSVITPGTNTSNQVAVLYQDVNCTEVPVAIHADQLTPTWRVYSTGSNVFQTRAGCLIGAEHVNNSYECDIPIGAGICASYQTQTNSPRRARSVASQSIIAYTMSLGAENSVAYSNNSIAIPTNFTISVTTEILPVSMTKTSVDCTMYICGDSTECSNLLLQYGSFCTQLNRALTGIAVEQDKNTQEVFAQVKQIYKTPPIKDFGGFNFSQILPDPSKPSKRSFIEDLLFNKVTLADAGFIKQYGDCLGDIAARDLICAQKFNGLTVLPPLLTDEMIAQYTSALLAGTITSGWTFGAGAALQIPFAMQMAYRFNGIGVTQNVLYENQKLIANQFNSAIGKIQDSLSSTASALGKLQDVVNQNAQALNTLVKCLSSNFGAISSVLNDILSRLDKVEAEVQIDRLITGRLQCLQTYVTQQLIRAAEIRASANLAATKMSECVLGQSKRVDFCGKGYHLMSFPQSAPHGVVFLHVTYVPAQEKNFTTAPAICHDGKAHFPREGVFVSNGTHWFVTQRNFYEPQIITTDNTFVSGNCDVVIGIVNNTVYDPLQPELDSFKEELDKYFKNHTSPDVDLGDISGINASVVNIQKEIDRLNEVAKNLNESLIDLQELGKYEQYIK

SEQ ID NO: 2319 - protein, 1211 aa, Artificial Sequence
  SARS-CoV-2/South Korea/SNU01/2020__EPI_ISL_411929 spike protein (1-1211)(Q965C_S1003C)
MFVFLVLLPLVSSQCVNLTTRTQLPPAYTNSFTRGVYYPDKVFRSSVLHSTQDLFLPFFSNVTWFHAIHVSGTNGTKRFDNPVLPFNDGVYFASTEKSNIIRGWIFGTTLDSKTQSLLIVNNATNVVIKVCEFQFCNDPFLGVYYHKNNKSWMESEFRVYSSANNCTFEYVSQPFLMDLEGKQGNFKNLREFVFKNIDGYFKIYSKHTPINLVRDLPQGFWALEPLVDLPIGINITRFQTLLALHRSYLTPGDSSSGWTAGAAAYYVGYLQPRTFLLKYNENGTITDAVDCALDPLSETKCTLKSFTVEKGIYQTSNFRVQPTESIVRFPNITNLCPFGEVFNATRFASVYAWNRKRISNCVADYSVLYNSASFSTFKCYGVSPTKLNDLCFTNVYADSFVIRGDEVRQIAPGQTGKIADYNYKLPDDFTGCVIAWNSNNLDSKVGGNYNYLYRLFRKSNLKPFERDISTEIYQAGSTPCNGVEGFNCYFPLQSYGFQPTNGVGYQPYRVVVLSFELLHAPATVCGPKKSTNLVKNKCVNFNFNGLTGTGVLTESNKKFLPFQQFGRDIADTTDAVRDPQTLEILDITPCSFGGVSVITPGTNTSNQVAVLYQDVNCTEVPVAIHADQLTPTWRVYSTGSNVFQTRAGCLIGAEHVNNSYECDIPIGAGICASYQTQTNSPRRARSVASQSIIAYTMSLGAENSVAYSNNSIAIPTNFTISVTTEILPVSMTKTSVDCTMYICGDSTECSNLLLQYGSFCTQLNRALTGIAVEQDKNTQEVFAQVKQIYKTPPIKDFGGFNFSQILPDPSKPSKRSFIEDLLFNKVTLADAGFIKQYGDCLGDIAARDLICAQKFNGLTVLPPLLTDEMIAQYTSALLAGTITSGWTFGAGAALQIPFAMQMAYRFNGIGVTQNVLYENQKLIANQFNSAIGKIQDSLSSTASALGKLQDVVNQNAQALNTLVKCLSSNFGAISSVLNDILSRLDKVEAEVQIDRLITGRLQCLQTYVTQQLIRAAEIRASANLAATKMSECVLGQSKRVDFCGKGYHLMSFPQSAPHGVVFLHVTYVPAQEKNFTTAPAICHDGKAHFPREGVFVSNGTHWFVTQRNFYEPQIITTDNTFVSGNCDVVIGIVNNTVYDPLQPELDSFKEELDKYFKNHTSPDVDLGDISGINASVVNIQKEIDRLNEVAKNLNESLIDLQELGKYEQYIK

SEQ ID NO: 2320 - protein, 1211 aa, Artificial Sequence
  SARS-CoV-2/China/WF0004/2020__EPI_ISL_413694 spike protein (1-1211)(Q965C_S1003C)
MFVFLVLLPLVSSQCVNLTTRTQLPPAYTNSFTRGVYYPDKVFRSSVLHSTQDLFLPFFSNVTWFHAIHVSGTNGTKRFDNPVLPFNDGVYFASTEKSNIIRGWIFGTTLDSKTQSLLIVNNATNVVIKVCEFQFCNDPFLGVYYHKNNKSWTESEFRVYSSANNCTFEYVSQPFLMDLEGKQGNFKNLREFVFKNIDGYFKIYSKHTPINLVRDLPQGFSALEPLVDLPIGINITRFQTLLALHRSYLTPGDSSSGWTAGAAAYYVGYLQPRTFLLKYNENGTITDAVDCALDPLSETKCTLKSFTVEKGIYQTSNFRVQPTESIVRFPNITNLCPFGEVFNATRFASVYAWNRKRISNCVADYSVLYNSASFSTFKCYGVSPTKLNDLCFTNVYADSFVIRGDEVRQIAPGQTGKIADYNYKLPDDFTGCVIAWNSNNLDSKVGGNYNYLYRLFRKSNLKPFERDISTEIYQAGSTPCNGVEGFNCYFPLQSYGFQPTNGVGYQPYRVVVLSFELLHAPATVCGPKKSTNLVKNKCVNFNFNGLTGTGVLTESNKKFLPFQQFGRDIADTTDAVRDPQTLEILDITPCSFGGVSVITPGTNTSNQVAVLYQDVNCTEVPVAIHADQLTPTWRVYSTGSNVFQTRAGCLIGAEHVNNSYECDIPIGAGICASYQTQTNSPRRARSVASQSIIAYTMSLGAENSVAYSNNSIAIPTNFTISVTTEILPVSMTKTSVDCTMYICGDSTECSNLLLQYGSFCTQLNRALTGIAVEQDKNTQEVFAQVKQIYKTPPIKDFGGFNFSQILPDPSKPSKRSFIEDLLFNKVTLADAGFIKQYGDCLGDIAARDLICAQKFNGLTVLPPLLTDEMIAQYTSALLAGTITSGWTFGAGAALQIPFAMQMAYRFNGIGVTQNVLYENQKLIANQFNSAIGKIQDSLSSTASALGKLQDVVNQNAQALNTLVKCLSSNFGAISSVLNDILSRLDKVEAEVQIDRLITGRLQCLQTYVTQQLIRAAEIRASANLAATKMSECVLGQSKRFDFCGKGYHLMSFPQSAPHGVVFLHVTYVPAQEKNFTTAPAICHDGKAHFPREGVFVSNGTHWFVTQRNFYEPQIITTDNTFVSGNCDVVIGIVNNTVYDPLQPELDSFKEELDKYFKNHTSPDVDLGDISGINASVVNIQKEIDRLNEVAKNLNESLIDLQELGKYEQYIK

SEQ ID NO: 2321 - protein, 1211 aa, Artificial Sequence
  SARS-CoV-2/China/WF0028/2020__EPI_ISL_413791 spike protein (1-1211)(Q965C_S1003C)
MFVFLVLLPLVSSQCVNLTTRTQLPPAYTNSFTRGVYYPDKVFRSSVLHSTQDLFLPFFSNVTWFHAIHVSGTNGTKRFDNPVLPFNDGVYFASTEKSNIIRGWIFGTTLDSKTQSLLIVNNATNVVIKVCEFQFCNDPFLGVYYHKNNKSWMESEFRVYSSANNCTFEYVSQPFLMDLEGKQGNFKNLREFVFKNIDGYFKIYSKHTPINLVRDLPQGFSALEPLVDLPIGINITRFQTLLALHRSYLTPGDSSSGWTAGAAAYYVGYLQPRTFLLKYNENGTITDAVDCALDPLSETKCTLKSFTVEKGIYQTSNFRVQPTESIVRFPNITNLCPFGEVFNATRFASVYAWNRKRISNCVADYSVLYNSASFSTFKCYGVSPTKLNDLCFTNVYADSFVIRGDEVRQIAPGQTGKIADYNYKLPDDFTGCVIAWNSNNLDSKVGGNYNYLYRLFRKSNLKPFERDISTEIYQAGSTPCNGVEGFNCYFPLQSYGFQPTNGVGYQPYRVVVLSFELLHAPATVCGPKKSTNLVKNKCVNFNFNGLTGTGVLTESNKKFLPFQQFGRDIADTTDAVRDPQTLEILDITPCSFGGVSVITPGTNTSNQVAVLYQDVNCTEVPVAIHADQLTPTWRVYSTGSNVFQTRAGCLIGAEHVNNSYECDIPIGAGICASYQTQTNSPRRARSVASQSIIAYTMSLGAENSVAYSNNSIAIPTNFTISVTTEILPVSMTKTSVDCTMYICGDSTECSNLLLQYGSFCTQLNRALTGIAVEQDKNTQEVFAQVKQIYKTPPIKDFGGFNFSQILPDPSKPSKRSFIEDLLFNKVTLADAGFIKQYGDCLGDIAARDLICAQKFNGLTVLPPLLTDEMIAQYTSALLAGTITSGWTFGAGAALQIPFAMQMAYRFNGIGVTQNVLYENQKLIANQFNSAIGKIQDSLSSTASALGKLQDVVNQNAQALNTLVKCLSSNFGAISSVLNDILSRLDKVEAEVQIDRLITGRLQCLQTYVTQQLIRAAEIRASANLAATKMSECVLGQSKRVDFCGKGYHLMSFPQSAPHGVVFLHVTYVPAQEKNFTTAPAICHDGKAHFPREGVFVSNGTHWFVTQRNFYEPQIITTDNTFVSGNCDVVIGIVNNTVYDPLQPELESFKEELDKYFKNHTSPDVDLGDISGINASVVNIQKEIDRLNEVAKNLNESLIDLQELGKYEQYIK

SEQ ID NO: 2322 - protein, 1211 aa, Artificial Sequence
  SARS-CoV-2/2019-nCoV/USA-CruiseA-18/2020__MT159716.1 spike protein (1-1211)(Q965C_S1003C)
MFVFLVLLPLVSSQCVNLTTRTQLPPAYTNSFTRGVYYPDKVFRSSVLHSTQDLFLPFFSNVTWFHAIHVSGTNGTKRFDNPVLPFNDGVYFASTEKSNIIRGWIFGTTLDSKTQSLLIVNNATNVVIKVCEFQFCNDPFLGVYYHKNNKSWMESELRVYSSANNCTFEYVSQPFLMDLEGKQGNFKNLREFVFKNIDGYFKIYSKHTPINLVRDLPQGFSALEPLVDLPIGINITRFQTLLALHRSYLTPGDSSSGWTAGAAAYYVGYLQPRTFLLKYNENGTITDAVDCALDPLSETKCTLKSFTVEKGIYQTSNFRVQPTESIVRFPNITNLCPFGEVFNATRFASVYAWNRKRISNCVADYSVLYNSASFSTFKCYGVSPTKLNDLCFTNVYADSFVIRGDEVRQIAPGQTGKIADYNYKLPDDFTGCVIAWNSNNLDSKVGGNYNYLYRLFRKSNLKPFERDISTEIYQAGSTPCNGVEGFNCYFPLQSYGFQPTNGVGYQPYRVVVLSFELLHAPATVCGPKKSTNLVKNKCVNFNFNGLTGTGVLTESNKKFLPFQQFGRDIADTTDAVRDPQTLEILDITPCSFGGVSVITPGTNTSNQVAVLYQDVNCTEVPVAIHADQLTPTWRVYSTGSNVFQTRAGCLIGAEHVNNSYECDIPIGAGICASYQTQTNSPRRARSVASQSIIAYTMSLGAENSVAYSNNSIAIPTNFTISVTTEILPVSMTKTSVDCTMYICGDSTECSNLLLQYGSFCTQLNRALTGIAVEQDKNTQEVFAQVKQIYKTPPIKDFGGFNFSQILPDPSKPSKRSFIEDLLFNKVTLADAGFIKQYGDCLGDIAARDLICAQKFNGLTVLPPLLTDEMIAQYTSALLAGTITSGWTFGAGAALQIPFAMQMAYRFNGIGVTQNVLYENQKLIANQFNSAIGKIQDSLSSTASALGKLQDVVNQNAQALNTLVKCLSSNFGAISSVLNDILSRLDKVEAEVQIDRLITGRLQCLQTYVTQQLIRAAEIRASANLAATKMSECVLGQSKRVDFCGKGYHLMSFPQSAPHGVVFLHVTYVPAQEKNFTTAPAICHDGKAHFPREGVFVSNGTHWFVTQRNFYEPQIITTDNTFVSGNCDVVIGIVNNTVYDPLQPELDSFKEELDKYFKNHTSPDVDLGDISGINASVVNIQKEIDRLNEVAKNLNESLIDLQELGKYEQYIK

SEQ ID NO: 2323 - protein, 1211 aa, Artificial Sequence
  SARS-CoV-2/SARS-CoV-2/Yunnan-01/human/2020/CHN__MT049951.1 spike protein (1-1211)(Q965C_S1003C)
MFVFLVLLPLVSSQCVNLTTRTQLPPANTNSFTRGVYYPDKVFRSSVLHSTQDLFLPFFSNVTWFHAIHVSGTNGTKRFDNPVLPFNDGVYFASTEKSNIIRGWIFGTTLDSKTQSLLIVNNATNVVIKVCEFQFCNDPFLGVYYHKNNKSWMESEFRVYSSANNCTFEYVSQPFLMDLEGKQGNFKNLREFVFKNIDGYFKIYSKHTPINLVRDLPQGFSALEPLVDLPIGINITRFQTLLALHRSYLTPGDSSSGWTAGAAAYYVGYLQPRTFLLKYNENGTITDAVDCALDPLSETKCTLKSFTVEKGIYQTSNFRVQPTESIVRFPNITNLCPFGEVFNATRFASVYAWNRKRISNCVADYSVLYNSASFSTFKCYGVSPTKLNDLCFTNVYADSFVIRGDEVRQIAPGQTGKIADYNYKLPDDFTGCVIAWNSNNLDSKVGGNYNYLYRLFRKSNLKPFERDISTEIYQAGSTPCNGVEGFNCYFPLQSYGFQPTNGVGYQPYRVVVLSFELLHAPATVCGPKKSTNLVKNKCVNFNFNGLTGTGVLTESNKKFLPFQQFGRDIADTTDAVRDPQTLEILDITPCSFGGVSVITPGTNTSNQVAVLYQDVNCTEVPVAIHADQLTPTWRVYSTGSNVFQTRAGCLIGAEHVNNSYECDIPIGAGICASYQTQTNSPRRARSVASQSIIAYTMSLGAENSVAYSNNSIAIPTNFTISVTTEILPVSMTKTSVDCTMYICGDSTECSNLLLQYGSFCTQLNRALTGIAVEQDKNTQEVFAQVKQIYKTPPIKDFGGFNFSQILPDPSKPSKRSFIEDLLFNKVTLADAGFIKQYGDCLGDIAARDLICAQKFNGLTVLPPLLTDEMIAQYTSALLAGTITSGWTFGAGAALQIPFAMQMAYRFNGIGVTQNVLYENQKLIANQFNSAIGKIQDSLSSTASALGKLQDVVNQNAQALNTLVKCLSSNFGAISSVLNDILSRLDKVEAEVQIDRLITGRLQCLQTYVTQQLIRAAEIRASANLAATKMSECVLGQSKRVDFCGKGYHLMSFPQSAPHGVVFLHVTYVPAQEKNFTTAPAICHDGKAHFPREGVFVSNGTHWFVTQRNFYEPQIITTDNTFVSGNCDVVIGIVNNTVYDPLQPELDSFKEELDKYFKNHTSPDVDLGDISGINASVVNIQKEIDRLNEVAKNLNESLIDLQELGKYEQYIK

SEQ ID NO: 2324 - protein, 1211 aa, Artificial Sequence
  SARS-CoV-2/USA/WA-UW292/2020__EPI_ISL_418077 spike protein (1-1211)(Q965C_S1003C)
MFVFLVLLPLVSSQCVNLTTRTQLPPAYTNSFTRGVYYPDKVFRSSVLHSTQDLFLPFFSNVTWFHAIHVSGTNGTKRFDNPVLPFNDGVYFASTEKSNIIRGWIFGTTLDSKTQSLLIVNNATNVVIKVCEFQFCNDPFLGVYYHKNNKSWMESEFRVYSSANNCTFEYVSQPFLMDLEGKQGNFKNLREFVFKNIDGYFKIYSKHTPINLVRDLPQGFSALEPLVDLPIGINITRFQTLLALHRSYLTPGDSSSGWTAGAAAYYVGYLQPRTFLLKYNENGTITDAVDCALDPLSETKCTLKSFTVEKGIYQTSNFRVQPTESIVRFPNITNLCPFGEVFNATRFASVYAWNRKRISNCVADYSVLYNSASFSTFKCYGVSPTKLNDLCFTNVYADSFVIRGDEVRQIAPGQTGKIADYNYKLPDDFTGCVIAWNSNNLDSKVGGNYNYLYRLFRKSNLKPFERDISTEIYQASSTPCNGVEGFNCYFPLQSYGFQPTNGVGYQPYRVVVLSFELLHAPATVCGPKKSTNLVKNKCVNFNFNGLTGTGVLTESNKKFLPFQQFGRDIADTTDAVRDPQTLEILDITPCSFGGVSVITPGTNTSNQVAVLYQDVNCTEVPVAIHADQLTPTWRVYSTGSNVFQTRAGCLIGAEHVNNSYECDIPIGAGICASYQTQTNSPRRARSVASQSIIAYTMSLGAENSVAYSNNSIAIPTNFTISVTTEILPVSMTKTSVDCTMYICGDSTECSNLLLQYGSFCTQLNRALTGIAVEQDKNTQEVFAQVKQIYKTPPIKDFGGFNFSQILPDPSKPSKRSFIEDLLFNKVTLADAGFIKQYGDCLGDIAARDLICAQKFNGLTVLPPLLTDEMIAQYTSALLAGTITSGWTFGAGAALQIPFAMQMAYRFNGIGVTQNVLYENQKLIANQFNSAIGKIQDSLSSTASALGKLQDVVNQNAQALNTLVKCLSSNFGAISSVLNDILSRLDKVEAEVQIDRLITGRLQCLQTYVTQQLIRAAEIRASANLAATKMSECVLGQSKRVDFCGKGYHLMSFPQSAPHGVVFLHVTYVPAQEKNFTTAPAICHDGKAHFPREGVFVSNGTHWFVTQRNFYEPQIITTDNTFVSGNCDVVIGIVNNTVYDPLQPELDSFKEELDKYFKNHTSPDVDLGDISGINASVVNIQKEIDRLNEVAKNLNESLIDLQELGKYEQYIK

SEQ ID NO: 2325 - protein, 1211 aa, Artificial Sequence
  SARS-CoV-2/Iceland/192/2020__EPI_ISL_417819 spike protein (1-1211)(Q965C_S1003C)
MFVFFVLLPLVSSQCVNLTTRTQLPPAYTNSFTRGVYYPDKVFRSSVLHSTQDLFLPFFSNVTWFHAIHVSGTNGTKRFDNPVLPFNDGVYFASTEKSNIIRGWIFGTTLDSKTQSLLIVNNATNVVIKVCEFQFCNDPFLGVYYHKNNKSWMESEFRVYSSANNCTFEYVSQPFLMDLEGKQGNFKNLREFVFKNIDGYFKIYSKHTPINLVRDLPQGFSALEPLVDLPIGINITRFQTLLALHRSYLTPGDSSSGWTAGAAAYYVGYLQPRTFLLKYNENGTITDAVDCALDPLSETKCTLKSFTVEKGIYQTSNFRVQPTESIVRFPNITNLCPFGEVFNATRFASVYAWNRKRISNCVADYSVLYNSASFSTFKCYGVSPTKLNDLCFTNVYADSFVIRGDEVRQIAPGQTGKIADYNYKLPDDFTGCVIAWNSNNLDSKVGGNYNYLYRLFRKSNLKPFERDISTEIYQAGSTPCNGVEGFNCYFPLQSYGFQPTNGVGYQPYRVVVLSFELLHAPATVCGPKKSTNLVKNKCVNFNFNGLTGTGVLTESNKKFLPFQQFGRDIADTTDAVRDPQTLEILDITPCSFGGVSVITPGTNTSNQVAVLYQGVNCTEVPVAIHADQLTPTWRVYSTGSNVFQTRAGCLIGAEHVNNSYECDIPIGAGICASYQTQTNSPRRARSVASQSIIAYTMSLGAENSVAYSNNSIAIPTNFTISVTTEILPVSMTKTSVDCTMYICGDSTECSNLLLQYGSFCTQLNRALTGIAVEQDKNTQEVFAQVKQIYKTPPIKDFGGFNFSQILPDPSKPSKRSFIEDLLFNKVTLADAGFIKQYGDCLGDIAARDLICAQKFNGLTVLPPLLTDEMIAQYTSALLAGTITSGWTFGAGAALQIPFAMQMAYRFNGIGVTQNVLYENQKLIANQFNSAIGKIQDSLSSTASALGKLQDVVNQNAQALNTLVKCLSSNFGAISSVLNDILSRLDKVEAEVQIDRLITGRLQCLQTYVTQQLIRAAEIRASANLAATKMSECVLGQSKRVDFCGKGYHLMSFPQSAPHGVVFLHVTYVPAQEKNFTTAPAICHDGKAHFPREGVFVSNGTHWFVTQRNFYEPQIITTDNTFVSGNCDVVIGIVNNTVYDPLQPELDSFKEELDKYFKNHTSPDVDLGDISGINASVVNIQKEIDRLNEVAKNLNESLIDLQELGKYEQYIK

SEQ ID NO: 2326 - protein, 1211 aa, Artificial Sequence
  SARS-CoV-2/Belgium/ULG-6939/2020__EPI_ISL_417020 spike protein (1-1211)(Q965C_S1003C)
MFVFLVLLPLVSSQCVNLTTRTQLPPAYTNSFTRGVYYPDKVFRSSVLHSTQDLFLPFFSNVTWFHAIHVSGTNGTKRFDNPVLPFNDGVYFASTEKSNIIRGWIFGTTLDSKTQSLLIVNNATNVVIKVCEFQFCNDPFLGVYYHKNNKSWMESEFRVYSSANNCTFEYVSQPFLMDLEGKQGNFKNLREFVFKNIDGYFKIYSKHTPINLVRDLPQGFSALEPLVDLPIGINITRFQTLLALHRSYLTPGDSSSGWTAGAAAYYVGYLQPRTFLLKYNENGTITDAVDCALDPLSETKCTLKSFTVEKGIYQTSNFRVQPTESIVRFPNITNLCPFGEVFNATRFASVYAWNRKRISNCVADYSVLYNSASFSTFKCYGVSPTKLNDLCFTNVYADSFVIRGDEVRQIAPGQTGKIADYNYKLPDDFTGCVIAWNSNNLDSKVGGNYNYLYRLFRKSNLKPFERDISTEIYQAGSTPCNGVEGFNCYFPLQSYGFQPTNGVGYQPYRVVVLSFELLHAPATVCGPKKSTNLVKNKCVNFNFNGLTGTGVLTESNKKFLPFQQFGRDIADTTDAVRDPQTLEILDITPCSFGGVSVITPGTNTSNQVAVLYQGVNCTEVPVAIHADQLTPTWRVYSTGSNVFQTRAGCLIGAEHVNNSYECDIPIGAGICASYQTQTNSPRRARSVASQSIIAYTMSLGAENSVVYSNNSIAIPTNFTISVTTEILPVSMTKTSVDCTMYICGDSTECSNLLLQYGSFCTQLNRALTGIAVEQDKNTQEVFAQVKQIYKTPPIKDFGGFNFSQILPDPSKPSKRSFIEDLLFNKVTLADAGFIKQYGDCLGDIAARDLICAQKFNGLTVLPPLLTDEMIAQYTSALLAGTITSGWTFGAGAALQIPFAMQMAYRFNGIGVTQNVLYENQKLIANQFNSAIGKIQDSLSSTASALGKLQDVVNQNAQALNTLVKCLSSNFGAISSVLNDILSRLDKVEAEVQIDRLITGRLQCLQTYVTQQLIRAAEIRASANLAATKMSECVLGQSKRVDFCGKGYHLMSFPQSAPHGVVFLHVTYVPAQEKNFTTAPAICHDGKAHFPREGVFVSNGTHWFVTQRNFYEPQIITTDNTFVSGNCDVVIGIVNNTVYDPLQPELDSFKEELDKYFKNHTSPDVDLGDISGINASVVNIQKEIDRLNEVAKNLNESLIDLQELGKYEQYIK

SEQ ID NO: 2327 - protein, 1211 aa, Artificial Sequence
  SARS-CoV-2/France/HF2496/2020__EPI_ISL_418231 spike protein (1-1211)(Q965C_S1003C)
MFVFLVLLPLVSSQCVNLTTRTQLPPAYTNSFTRGVYYPDKVFRSSVLHSTQDLFLPFFSNVTWFHAIHVSGTNGTKRFDNPVLPFNDGVYFASTEKSNIIRGWIFGTTLDSKTQSLLIVNNATNVVIKVCEFQFCNDPFLGVYYHKNNKSWMESEFRVYSSANNCTFEYVSQPFLMDLEGKQGNFKNLREFVFKNIDGYFKIYSKHTPINLVRDLPQGFSALEPLVDLPIGINITRFQTLLALHRSYLTPGDSSSGWTAGAAAYYVGYLQPRTFLLKYNENGTITDAVDCALDPLSETKCTLKSFTVEKGIYQTSNFRVQPTESIVRFPNITNLCPFGEVFNATRFASVYAWNRKRISNCVADYSVLYNSASFSTFKCYGVSPTKLNDLCFTNVYADSFVIRGDEVRQIAPGQTGKIADYNYKLPDDFTGCVIAWNSNNLDSKVGGNYNYLYRLFRKSNLKPFERDISTEIYQAGSTPCNGVEGFNCYFPLQSYGFQPTNGVGYQPYRVVVLSFELLHAPATVCGPKKSTNLVKNKCVNFNFNGLTGTGVLTESNKKFLPFQQFGRDIADTTDAVRDPQTLEILDITPCSFGGVSVITPGTNTSNQVAVLYQGVNCTEVPVAIHADQLTPTWRVYSTGSNVFQTRAGCLIGAEHVNNSYECDIPIGAGICASYQTQTNSPRRARSVASQSIIAYTMSLGAENSVAYSNNSIAIPTNFTISVTTEILPVSMTKTSVDCTMYICGDSTECSNLLLQYGSFCTQLNRALTGIAVEQDKNTQEVFAQVKQIYKTPPIKDFGGFNFSQILPDPSKPSKRSFIEDLLFNKVTLADAGFIKQYGDCLGDIVARDLICAQKFNGLTVLPPLLTDEMIAQYTSALLAGTITSGWTFGAGAALQIPFAMQMAYRFNGIGVTQNVLYENQKLIANQFNSAIGKIQDSLSSTASALGKLQDVVNQNAQALNTLVKCLSSNFGAISSVLNDILSRLDKVEAEVQIDRLITGRLQCLQTYVTQQLIRAAEIRASANLAATKMSECVLGQSKRVDFCGKGYHLMSFPQSAPHGVVFLHVTYVPAQEKNFTTAPAICHDGKAHFPREGVFVSNGTHWFVTQRNFYEPQIITTDNTFVSGNCDVVIGIVNNTVYDPLQPELDSFKEELDKYFKNHTSPDVDLGDISGINASVVNIQKEIDRLNEVAKNLNESLIDLQELGKYEQYIK

SEQ ID NO: 2328 - protein, 1211 aa, Artificial Sequence
  SARS-CoV-2/USA/WA-UW291/2020__EPI_ISL_418076 spike protein (1-1211)(Q965C_S1003C)
MFVFLVLLPLVSSQCVNLTTRTQLPPAYTNSFTRGVYYPDKVFRSSVLHSTQDLFLPFFSNVTWFHAIHVSGTNGTKRFDNPVLPFNDGVYFASTEKSNIIRGWIFGTTLDSKTQSLLIVNNATNVVIKVCEFQFCNDPFLGVYYHKNNKSWMESEFRVYSSANNCTFEYVSQPFLMDLEGKQGNFKNLREFVFKNIDGYFKIYSKHTPINLVRDLPQGFSALEPLVDLPIGINITRFQTLLALHRSYLTPGDSSSGWTAGAAAYYVGYLQPRTFLLKYNENGTITDAVDCALDPLSETKCTLKSFTVEKGIYQTSNFRVQPTESIVRFPNITNLCPFGEVFNATRFASVYAWNRKRISNCVADYSVLYNSASFSTFKCYGVSPTKLNDLCFTNVYADSFVIRGDEVRQIAPGQTGKIADYNYKLPDDFTGCVIAWNSNNLDSKVGGNYNYLYRLFRKSNLKPFERDISTEIYQAGSTPCNGVEGFNCYFPLQSYGFQPTNGVGYQPYRVVVLSFELLHAPATVCGPKKSTNLVKNKCVNFNFNGLTGTGVLTESNKKFLPFQQFGRDIADTTDAVRDPQTLEILDITPCSFGGVSVITPGTNTSNQVAVLYQGVNCTEVPVAIHADQLTPTWRVYSTGSNVFQTRAGCLIGAEHVNNSYECDIPIGAGICASYQTQTNSPRRARSVASQSIIAYTMSLGAENSVAYSNNSIAIPTNFTISVTTEILPVSMTKTSVDCTMYICGDSTECSNLLLQYGSFCTQLNRALTGIAVEQDKNTQEVFAQVKQIYKTPPIKDFGGFNFSQILPDPSKPSKRSFIEDLLFNKVTLADAGFIKQYGDCLGDIAARDLICAQKFNGLTVLPPLLTDEMIAQYTSALLAGTITSGWTFGAGAALQIPFAMQMAYRFNGIGVTQNVLYENQKLIANQFNSAIGKIQYSLSSTASALGKLQDVVNQNAQALNTLVKCLSSNFGAISSVLNDILSRLDKVEAEVQIDRLITGRLQCLQTYVTQQLIRAAEIRASANLAATKMSECVLGQSKRVDFCGKGYHLMSFPQSAPHGVVFLHVTYVPAQEKNFTTAPAICHDGKAHFPREGVFVSNGTHWFVTQRNFYEPQIITTDNTFVSGNCDVVIGIVNNTVYDPLQPELDSFKEELDKYFKNHTSPDVDLGDISGINASVVNIQKEIDRLNEVAKNLNESLIDLQELGKYEQYIK

SEQ ID NO: 2329 - protein, 1211 aa, Artificial Sequence; identical to SEQ ID NO: 2292
  SARS-CoV-2/Portugal/PT0034/2020__EPI_ISL_418019 spike protein (1-1211)(Q965C_S1003C)

SEQ ID NO: 2330 - protein, 1211 aa, Artificial Sequence
  SARS-CoV-2/Iceland/202/2020__EPI_ISL_417750 spike protein (1-1211)(Q965C_S1003C)
MFVFLVLLPLVSSQCVNLTTRTQLPPAYTNSFTRGVYYPDKVFRSSVLHSTQDLFLPFFSNVTWFHAIHVSGTNGTKRFDNPVLPFNDGVYFASTEKSNIIRGWIFGTTLDSKTQSLLIVNNATNVVIKVCEFQFCNDPFLGVYYHKNNKSWMESEFRVYSSANNCTFEYVSQPFLMDLEGKQGNFKNLREFVFKNIDGYFKIYSKHTPINLVRDLPQGFSALEPLVDLPIGINITRFQTLLALHRSYLTPGDSSSGWTAGAAAYYVGYLQPRTFLLKYNENGTITDAVDCALDPLSETKCTLKSFTVEKGIYQTSNFRVQPTESIVRFPNITNLCPFGEVFNATRFASVYAWNRKRISNCVADYSVLYNSASFSTFKCYGVSPTKLNDLCFTNVYADSFVIRGDEVRQIAPGQTGKIADYNYKLPDDFTGCVIAWNSNNLDSKVGGNYNYLYRLFRKSNLKPFERDISTEIYQAGSTPCNGVEGFNCYFPLQSYGFQPTNGVGYQPYRVVVLSFELLHAPATVCGPKKSTNLVKNKCVNFNFNGLTGTGVLTESNKKFLPFQQFGRDIADTTDAVRDPQTLEILDITPCSFGGVSVITPGTNTSNQVAVLYQDVNCTEVPVAIHADQLTPTWRVYSTGSNVFQTRAGCLIGAEHVNNSYECDIPIGAGICASYQTQTNSPRRARSVASQSIIAYTMSLGAENSVAYSNNSIAIPTNFTISVTTEILPVSMTKTSVDCTMYICGDSTECSNLLLQYGSFCTQLNRALTGIAVEQDKNTQEVFAQVKQIYKTPPIKDFGGFNFSQILPDPSKPSKRSFIEDLLFNKVTLADAGFIKQYGDCLGDIAARDLICAQKFNGLTVLPPLLTDEMIAQYTSALLAGTITSGWTFGAGAALQIPFAMQMAYRFNGIGVTQNVLYENQKLIANQFNSAIGKIQDSLSSTASALGKLQDVVNQNAQALNTLVKCLSSNFGAISSVLNDILSRLDKVEAEVQIDRLITGRLQCLQTYVTQQLIRAAEIRASANLAATKMSECVLGQSKRVDFCGKGYHLMSFPQSAPHGVVFLHVTYVPAQEKNFTTAPAICHDGKAHFPREGVFVSNGTHWFVTQRNFYEPQIITTDNTFVSGNCDVVIGIVNNTVYDPLQPELDSFKEELDKYFKNHTSPDVDLGDIPGINASVVNIQKEIDRLNEVAKNLNESLIDLQELGKYEQYIK

SEQ ID NO: 2331 - protein, 1211 aa, Artificial Sequence
  SARS-CoV-2/USA/WA-UW261/2020__EPI_ISL_418046 spike protein (1-1211)(Q965C_S1003C)
MFVFLVLLPLVSSQCVNLTTRTQLPPAYTNSFTRGVYYPDKVFRSSVLHSTQDLFLPFFSNVTWFHAIHVSGTNGTKRFDNPVLPFNDGVYFASTEKSNIIRGWIFGTTLDSKTQSLLIVNNATNVVIKVCEFQFCNDPFLGVYYHKNNKSWMESEFRVYSSANNCTFEYVSQPFLMDLEGKQGNFKNLREFVFKNIDGYFKIYSKHTPINLVRDLPQGFSALEPLVDLPIGINITRFQTLLALHRSYLTPGDSSSGWTAGAAAYYVGYLQPRTFLLKYNENGTITDAVDCALDPLSETKCTLKSFTVEKGIYQTSNFRVQPTESIVRFPNITNLCPFGEVFNATRFTSVYAWNRKRISNCVADYSVLYNSASFSTFKCYGVSPTKLNDLCFTNVYADSFVIRGDEVRQIAPGQTGKIADYNYKLPDDFTGCVIAWNSNNLDSKVGGNYNYLYRLFRKSNLKPFERDISTEIYQAGSTPCNGVEGFNCYFPLQSYGFQPTNGVGYQPYRVVVLSFELLHAPATVCGPKKSTNLVKNKCVNFNFNGLTGTGVLTESNKKFLPFQQFGRDIADTTDAVRDPQTLEILDITPCSFGGVSVITPGTNTSNQVAVLYQDVNCTEVPVAIHADQLTPTWRVYSTGSNVFQTRAGCLIGAEHVNNSYECDIPIGAGICASYQTQTNSPRRARSVASQSIIAYTMSLGAENSVAYSNNSIAIPTNFTISVTTEILPVSMTKTSVDCTMYICGDSTECSNLLLQYGSFCTQLNRALTGIAVEQDKNTQEVFAQVKQIYKTPPIKDFGGFNFSQILPDPSKPSKRSFIEDLLFNKVTLADAGFIKQYGDCLGDIAARDLICAQKFNGLTVLPPLLTDEMIAQYTSALLAGTITSGWTFGAGAALQIPFAMQMAYRFNGIGVTQNVLYENQKLIANQFNSAIGKIQDSLSSTASALGKLQDVVNQNAQALNTLVKCLSSNFGAISSVLNDILSRLDKVEAEVQIDRLITGRLQCLQTYVTQQLIRAAEIRASANLAATKMSECVLGQSKRVDFCGKGYHLMSFPQSAPHGVVFLHVTYVPAQEKNFTTAPAICHDGKAHFPREGVFVSNGTHWFVTQRNFYEPQIITTDNTFVSGNCDVVIGIVNNTVYDPLQPELDSFKEELDKYFKNHTSPDVDLGDISGINASVVNIQKEIDRLNEVAKNLNESLIDLQELGKYEQYIK

SEQ ID NO: 2332 - protein, 1211 aa, Artificial Sequence
  SARS-CoV-2/Portugal/PT0035/2020__EPI_ISL_418020 spike protein (1-1211)(Q965C_S1003C)
MFVFLVLLPLVSSQCVNLTTRTQLPPAYTNSFTRGVYYPDKVFRSSVLHSTQDLFLPFFSNVTWFHAIHVSGTNGTKRFDNPVLPFNDGVYFASTEKSNIIRGWIFGTTLDSKTQSLLIVNNATNVVIKVCEFQFCNDPFLGVYYHKNNKSWMESEFRVYSSANNCTFEYVSQPFLMDLEGKQGNFKNLREFVFKNIDGYFKIYSKHTPINLVRDLPQGFSALEPLVDLPIGINITRFQTLLALHRSYLTPGDSSSGWTAGAAAYYVGYLQPRTFLLKYNENGTITDAVDCALDPLSETKCTLKSFTVEKGIYQTSNFRVQPTESIVRFPNITNLCPFGEVFNATRFASVYAWNRKRISNCVADYSVLYNSASFSTFKCYGVSPTKLNDLCFTNVYADSFVIRGDEVRQIAPGQTGKIADYNYKLPDDFTGCVIAWNSNNLDSKVGGNYNYLYRLFRKSNLKPFERDISTEIYQAGSTPCNGVEGFNCYFPLQSYGFQPTNGVGYQPYRVVVLSFELLHAPATVCGPKKSTNLVKNKCVNFNFNGLTGTGVLTESNKKFLPFQQFGRDIADTTDAVRDPQTLEILDITPCSFGGVSVITPGTNTSNQVAVLYQDVNCTEVPVAIHADQLTPTWRVYSTGSNVFQTRAGCLIGAEHVNNSYECDIPIGAGICASYQTQTNSPRRARSVASQSIIAYTMSLGAENSVAYSNNSIAIPTNFTISVTTEILPVSMTKTSVDCTMYICGDSTECSNLLLQYGSFCTQLNRALTGIAVEQDKNTQEVFAQVKQIYKTPPIKDFGGFNFSQILPDPSKPSKRSFIEDLLFNKVTLADAGFIKQYGDCLGDISARDLICAQKFNGLTVLPPLLTDEMIAQYTSALLAGTITSGWTFGAGAALQIPFAMQMAYRFNGIGVTQNVLYENQKLIANQFNSAIGKIQDSLSSTASALGKLQDVVNQNAQALNTLVKCLSSNFGAISSVLNDILSRLDKVEAEVQIDRLITGRLQCLQTYVTQQLIRAAEIRASANLAATKMSECVLGQSKRVDFCGKGYHLMSFPQSAPHGVVFLHVTYVPAQEKNFTTAPAICHDGKAHFPREGVFVSNGTHWFVTQRNFYEPQIITTDNTFVSGNCDVVIGIVNNTVYDPLQPELDSFKEELDKYFKNHTSPDVDLGDISGINASVVNIQKEIDRLNEVAKNLNESLIDLQELGKYEQYIK

SEQ ID NO: 2333 - protein, 1211 aa, Artificial Sequence
  SARS-CoV-2/USA/NY-NYUMC7/2020__EPI_ISL_418192 spike protein (1-1211)(Q965C_S1003C)
MFVFLVLLPLVSSQCVNLTTRTQLPPAYTNSFTRGVYYPDKVFRSSVLHSTQDLFLPFFSNVTWFHAIHVSGTNGTKRFDNPVLPFNDGVYFASTEKSNIIRGWIFGTTLDSKTQSLLIVNNATNVVIKVCEFQFCNDPFLGVYHHKNNKSWMESEFRVYSSANNCTFEYVSQPFLMDLEGKQGNFKNLREFVFKNIDGYFKIYSKHTPINLVRDLPQGFSALEPLVDLPIGINITRFQTLLALHRSYLTPGDSSSGWTAGAAAYYVGYLQPRTFLLKYNENGTITDAVDCALDPLSETKCTLKSFTVEKGIYQTSNFRVQPTESIVRFPNITNLCPFGEVFNATRFASVYAWNRKRISNCVADYSVLYNSASFSTFKCYGVSPTKLNDLCFTNVYADSFVIRGDEVRQIAPGQTGKIADYNYKLPDDFTGCVIAWNSNNLDSKVGGNYNYLYRLFRKSNLKPFERDISTEIYQAGSTPCNGVEGFNCYFPLQSYGFQPTNGVGYQPYRVVVLSFELLHAPATVCGPKKSTNLVKNKCVNFNFNGLTGTGVLTESNKKFLPFQQFGRDIADTTDAVRDPQTLEILDITPCSFGGVSVITPGTNTSNQVAVLYQGVNCTEVPVAIHADQLTPTWRVYSTGSNVFQTRAGCLIGAEHVNNSYECDIPIGAGICASYQTQTNSPRRARSVASQSIIAYTMSLGAENSVAYSNNSIAIPTNFTISVTTEILPVSMTKTSVDCTMYICGDSTECSNLLLQYGSFCTQLNRALTGIAVEQDKNTQEVFAQVKQIYKTPPIKDFGGFNFSQILPDPSKPSKRSFIEDLLFNKVTLADAGFIKQYGDCLGDIAARDLICAQKFNGLTVLPPLLTDEMIAQYTSALLAGTITSGWTFGAGAALQIPFAMQMAYRFNGIGVTQNVLYENQKLIANQFNSAIGKIQDSLSSTASALGKLQDVVNQNAQALNTLVKCLSSNFGAISSVLNDILSRLDKVEAEVQIDRLITGRLQCLQTYVTQQLIRAAEIRASANLAATKMSECVLGQSKRVDFCGKGYHLMSFPQSAPHGVVFLHVTYVPAQEKNFTTAPAICHDGKAHFPREGVFVSNGTHWFVTQRNFYEPQIITTDNTFVSGNCDVVIGIVNNTVYDPLQPELDSFKEELDKYFKNHTSPDVDLGDISGINASVVNIQKEIDRLNEVAKNLNESLIDLQELGKYEQYIK

SEQ ID NO: 2334 - protein, 1211 aa, Artificial Sequence
  SARS-CoV-2/Iceland/189/2020__EPI_ISL_417709 spike protein (1-1211)(Q965C_S1003C)
MFVFLVLLPLVSSQCVNLTTRTQLPPAYTNSFTRGVYYPDKVFRSSVLHSTQDLFLPFFSNVTWFHAIHVSGTNGTKRFDNPVLPFNDGVYFASTEKSNIIRGWIFGTTLDSKTQSLLIVNNATNVVIKVCEFQFCNDPFLGVYYHKNNKSWMESEFRVYSSANNCTFEYVSQPFLMDLEGKQGNFKNLREFVFKNIDGYFKIYSKHTPINLVRDLPQGFSALEPLVDLPIGINITRFQTLLALHRSYLTPGDSSSGWTAGAAAYYVGYLQPRTFLLKYNENGTITDAVDCALDPLSETKCTLKSFTVEKGIYQTSNFRVQPTESIVRFPNITNLCPFGEVFNATRFASVYAWNRKRISNCVADYSVLYNSASFSTFKCYGVSPTKLNDLCFTNVYADSFVIRGDEVRQIAPGQTGKIADYNYKLPDDFTGCVIAWNSNNLDSKVGGNYNYLYRLFRKSNLKPFERDISTEIYQAGSTPCNGVEGFNCYFPLQSYGFQPTNGVGYQPYRVVVLSFELLHAPATVCGPKKSTNLVKNKCVNFNFNGLTGTGVLTESNKKFLPFQQFGRDIADTTDAVRDPQTLEILDITPCSFGGVSVITPGTNTSNQVAVLYQGVNCTEVPVAIHADQLTPTWRVYSTGSNVFQTRAGCLIGAEHVNNSYECDIPIGAGICASYQTQTNSPRRARSVASQSIIAYTMSLGAENSVAYSNNSIAIPTNFTISVTTEILPVSMTKTSVDCTMYICGDSTECSNLLLQYGSFCTQLNRALTGIAVEQDKNTQEVFAQVKQIYKTPPIKDFGGFNFSQILPDPSKPSKRSFIEDLLFNKVTLADAGFTKQYGDCLGDIAARDLICAQKFNGLTVLPPLLTDEMIAQYTSALLAGTITSGWTFGAGAALQIPFAMQMAYRFNGIGVTQNVLYENQKLIANQFNSAIGKIQDSLSSTASALGKLQDVVNQNAQALNTLVKCLSSNFGAISSVLNDILSRLDKVEAEVQIDRLITGRLQCLQTYVTQQLIRAAEIRASANLAATKMSECVLGQSKRVDFCGKGYHLMSFPQSAPHGVVFLHVTYVPAQEKNFTTAPAICHDGKAHFPREGVFVSNGTHWFVTQRNFYEPQIITTDNTFVSGNCDVVIGIVNNTVYDPLQPELDSFKEELDKYFKNHTSPDVDLGDISGINASVVNIQKEIDRLNEVAKNLNESLIDLQELGKYEQYIK

SEQ ID NO: 2335 - protein, 1211 aa, Artificial Sequence
  SARS-CoV-2/Australia/NSW56/2020__EPI_ISL_417408 spike protein (1-1211)(Q965C_S1003C)
MFVFLVLLPLVSSQCVNLTTRTQLPPAYTNSFTRGVYYPDKVFRSSVLHSTQDLFLPFFSNVTWFHAIHVSGTNGTKRFDNPVLPFNDGVYFASTEKSNIIRGWIFGTTLDSKTQSLLIVNNATNVVIKVCEFQFCNDPFLGVYYHKNNKSWMESEFRVYSSANNCTFEYVSQPFLMDLEGKQGNFKNLREFVFKNIDGYFKIYSKHTPINLVRDLPQGFSALEPLVDLPIGINITRFQTLLALHRSYLTPGDSSSGWTAGAAAYYVGYLQPRTFLLKYNENGTITDAVDCALDPLSETKCTLKSFTVEKGIYQTSNFRVQPTESIVRFPNITNLCPFGEVFNATRFASVYAWNRKRISNCVADYSVLYNSASFSTFKCYGVSPTKLNDLCFTNVYADSFVIRGDEVRQIAPGQTGKIADYNYKLPDDFTGCVIAWNSNNLDSKVGGNYNYLYRLFRKSNLKPFERDISTEIYQAGSTPCNGVEGFNCYFPLQSYGFQPTNGVGYQPYRVVVLSFELLHAPATVCGPKKSTNLVKNKCVNFNFNGLTGTGVLTESNKKFLPFQQFGRDIADTTDAVRDPQTLEILDITPCSFGGVSVITPGTNTSNQVAVLYQDVNCTEVPVAIHADQLTPTWRVYSTGSNVFQTRAGCLIGAEHVNNSYECDIPIGAGICASYQTQTNSPRRARSVASQSIIAYTMSLGAENSVAYSNNSIAIPTNFTISVTTEILPVSMTKTSVDCTMYICGDSTECSNLLLQYGSFCTQLNRALTGIAVEQDKNTQEVFAQVKQIYKTPPIKDFGGFNFSQILPDSSKPSKRSFIEDLLFNKVTLADAGFIKQYGDCLGDIAARDLICAQKFNGLTVLPPLLTDEMIAQYTSALLAGTITSGWTFGAGAALQIPFAMQMAYRFNGIGVTQNVLYENQKLIANQFNSAIGKIQDSLSSTASALGKLQDVVNQNAQALNTLVKCLSSNFGAISSVLNDILSRLDKVEAEVQIDRLITGRLQCLQTYVTQQLIRAAEIRASANLAATKMSECVLGQSKRVDFCGKGYHLMSFPQSAPHGVVFLHVTYVPAQEKNFTTAPAICHDGKAHFPREGVFVSNGTHWFVTQRNFYEPQIITTDNTFVSGNCDVVIGIVNNTVYDPLQPELDSFKEELDKYFKNHTSPDVDLGDISGINASVVNIQKEIDRLNEVAKNLNESLIDLQELGKYEQYIK

SEQ ID NO: 2336 - protein, 1211 aa, Artificial Sequence
  SARS-CoV-2/Iceland/280/2020__EPI_ISL_417608 spike protein (1-1211)(Q965C_S1003C)
MFVFLVLLPLVSSQCVNLTTRTQLPPAYTNSFTRGVYYPDKVFRSSVLHSTQDLFLPFFSNVTWFHAIHVSGTNGTKRFDNPVLPFNDGVYFASTEKSNIIRGWIFGTTLDSKTQSLLIVNNATNVVIKVCEFQFCNDPFLGVYYHKNNKSWMESEFRVYSSANNCTFEYVSQPFLMDLEGKQGNFKNLREFVFKNIDGYFKIYSKHTPINLVRDLPQGFSALEPLVDLPIGINITRFQTLLALHRSYLTPGDSSSGWTAGAAAYYVGYLQPRTFLLKYNENGTITDAVDCALDPLSETKCTLKSFTVEKGIYQTSNFRVQPTESIVRFPNITNLCPFGEVFNATRFASVYAWNRKRISNCVADYSVLYNSASFSTFKCYGVSPTKLNDLCFTNVYADSFVIRGDEVRQIAPGQTGKIADYNYKLPDDFTGCVIAWNSNNLDSKVGGNYNYLYRLFRKSNLKPFERDISTEIYQAGSTPCNGVEGFNCYFPLQSYGFQPTNGVGYQPYRVVVLSFELLHAPATVCGPKKSTNLVKNKCVNFNFNGLTGTGVLTESNKKFLPFQQFGRDIADTTDAVRDPQTLEILDITPCSFGGVSVITPGTNTSNQVAVLYQGVNCTEVPVAIHADQLTPTWRVYSTGSNVFQTRAGCLIGAEHVNNSYECDIPIGAGICASYHTQTNSPRRARSVASQSIIAYTMSLGAENSVAYSNNSIAIPTNFTISVTTEILPVSMTKTSVDCTMYICGDSTECSNLLLQYGSFCTQLNRALTGIAVEQDKNTQEVFAQVKQIYKTPPIKDFGGFNFSQILPDPSKPSKRSFIEDLLFNKVTLADAGFIKQYGDCLGDIAARDLICAQKFNGLTVLPPLLTDEMIAQYTSALLAGTITSGWTFGAGAALQIPFAMQMAYRFNGIGVTQNVLYENQKLIANQFNSAIGKIQDSLSSTASALGKLQDVVNQNAQALNTLVKCLSSNFGAISSVLNDILSRLDKVEAEVQIDRLITGRLQCLQTYVTQQLIRAAEIRASANLAATKMSECVLGQSKRVDFCGKGYHLMSFPQSAPHGVVFLHVTYVPAQEKNFTTAPAICHDGKAHFPREGVFVSNGTHWFVTQRNFYEPQIITTDNTFVSGNCDVVIGIVNNTVYDPLQPELDSFKEELDKYFKNHTSPDVDLGDISGINASVVNIQKEIDRLNEVAKNLNESLIDLQELGKYEQYIK

SEQ ID NO: 2337 - protein, 1211 aa, Artificial Sequence; identical to SEQ ID NO: 2292
  SARS-CoV-2/Iceland/247/2020__EPI_ISL_417575 spike protein (1-1211)(Q965C_S1003C)

SEQ ID NO: 2338 - protein, 1211 aa, Artificial Sequence
  SARS-CoV-2/Iceland/238/2020__EPI_ISL_417566 spike protein (1-1211)(Q965C_S1003C)
MFVFLVLLPLVSSQCVNLTTRTQLPPAYTNSFTRGVYYPDKVFRSSVLHSTQDLFLPFFSNVTWFHAIHVSGTNGTKRFDNPVLPFNDGVYFASTEKSNIIRGWIFGTTLDSKTQSLLIVNNATNVVIKVCEFQFCNDPFLGVYYHKNNKSWMESEFRVYSSANNCTFEYVSQPFLMDLEGKQGNFKNLREFVFKNIDGYFKIYSKHTPINLVRDLPQGFSALEPLVDLPIGINITRFQTLLALHRSYLTPGDSSSGWTAGAAAYYVGYLQPRTFLLKYNENGTITDAVDCALDPLSETKCTLKSFTVEKGIYQTSNFRVQPTESIVRFPNITNLCPFGEVFNATRFASVYAWNRKRISNCVADYSVLYNSASFSTFKCYGVSPTKLNDLCFTNVYADSFVIRGDEVRQIAPGQTGKIADYNYKLPDDFTGCVIAWNSNNLDSKVGGNYNYLYRLFRKSNLKPFERDISTEIYQAGSTPCNGVEGFNCYFPLQSYGFQPTNGVGYQPYRVVVLSFELLHAPATVCGPKKSTNLVKNKCVNFNFNGLTGTGVLTESNKKFLPFQQFGRDIADTTDAVRDPQTLEILDITPCSFGGVSVITPGTNTSNQVAVLYQGVNCTEVPVAIHADQLTPTWRVYSTGSNVFQTRAGCLIGAEHVNNSYECDIPIGAGICASYQTQTNSPRRARSVASQSIIAYTMSLGAENSVAYSNNSIAIPTNFTISVTTEILPVSMTKTSVDCTMYICGDSTECSNLLLQYGSFCTQLNRALTGIAVEQDKNTQEVFAQVKQIYKTPPIKDFGGFNFSQILPDPSKPSKRSFIEDLLFNKVTLADVGFIKQYGDCLGDIAARDLICAQKFNGLTVLPPLLTDEMIAQYTSALLAGTITSGWTFGAGAALQIPFAMQMAYRFNGIGVTQNVLYENQKLIANQFNSAIGKIQDSLSSTASALGKLQDVVNQNAQALNTLVKCLSSNFGAISSVLNDILSRLDKVEAEVQIDRLITGRLQCLQTYVTQQLIRAAEIRASANLAATKMSECVLGQSKRVDFCGKGYHLMSFPQSAPHGVVFLHVTYVPAQEKNFTTAPAICHDGKAHFPREGVFVSNGTHWFVTQRNFYEPQIITTDNTFVSGNCDVVIGIVNNTVYDPLQPELDSFKEELDKYFKNHTSPDVDLGDISGINASVVNIQKEIDRLNEVAKNLNESLIDLQELGKYEQYIK

SEQ ID NO: 2339 - protein, 1211 aa, Artificial Sequence
  SARS-CoV-2/Greece/16/2020__EPI_ISL_418265 spike protein (1-1211)(Q965C_S1003C)
MFVFLVLLPLVSSQCVNLTTRTQLPPAYTNSFTRGVYYPDKVFRSSVLHSTQDLFLPFFSNVTWFHAIHVSGTNGTKRFDNPVLPFNDGVYFASTEKSNIIRGWIFGTTLDSKTQSLLIVNNATNVVIKVCEFQFCNDPFLGVYYHKNNKSWMESEFRVYSSANNCTFEYVSQPFLMDLEGKQGNFKNLREFVFKNVDGYFKIYSKHTPINLVRDLPQGFSALEPLVDLPIGINITRFQTLLALHRSYLTPGDSSSGWTAGAAAYYVGYLQPRTFLLKYNENGTITDAVDCALDPLSETKCTLKSFTVEKGIYQTSNFRVQPTESIVRFPNITNLCPFGEVFNATRFASVYAWNRKRISNCVADYSVLYNSASFSTFKCYGVSPTKLNDLCFTNVYADSFVIRGDEVRQIAPGQTGKIADYNYKLPDDFTGCVIAWNSNNLDSKVGGNYNYLYRLFRKSNLKPFERDISTEIYQAGSTPCNGVEGFNCYFPLQSYGFQPTNGVGYQPYRVVVLSFELLHAPATVCGPKKSTNLVKNKCVNFNFNGLTGTGVLTESNKKFLPFQQFGRDIADTTDAVRDPQTLEILDITPCSFGGVSVITPGTNTSNQVAVLYQDVNCTEVPVAIHADQLTPTWRVYSTGSNVFQTRAGCLIGAEHVNNSYECDIPIGAGICASYQTQTNSPRRARSVASQSIIAYTMSLGAENSVAYSNNSIAIPTNFTISVTTEILPVSMTKTSVDCTMYICGDSTECSNLLLQYGSFCTQLNRALTGIAVEQDKNTQEVFAQVKQIYKTPPIKDFGGFNFSQILPDPSKPSKRSFIEDLLFNKVTLADAGFIKQYGDCLGDIAARDLICAQKFNGLTVLPPLLTDEMIAQYTSALLAGTITSGWTFGAGAALQIPFAMQMAYRFNGIGVTQNVLYENQKLIANQFNSAIGKIQDSLSSTASALGKLQDVVNQNAQALNTLVKCLSSNFGAISSVLNDILSRLDKVEAEVQIDRLITGRLQCLQTYVTQQLIRAAEIRASANLAATKMSECVLGQSKRVDFCGKGYHLMSFPQSAPHGVVFLHVTYVPAQEKNFTTAPAICHDGKAHFPREGVFVSNGTHWFVTQRNFYEPQIITTDNTFVSGNCDVVIGIVNNTVYDPLQPELDSFKEELDKYFKNHTSPDVDLGDISGINASVVNIQKEIDRLNEVAKNLNESLIDLQELGKYEQYIK

SEQ ID NO: 2340 - protein, 1211 aa, Artificial Sequence
  SARS-CoV-2/Iceland/319/2020__EPI_ISL_417648 spike protein (1-1211)(Q965C_S1003C)
MFVFLVLLPLVSSQCVNLTTRTQLPPAYTNSFTRGVYYPDKVFRSSVLHSTQDLFLPFFSNVTWFHAIHVSGTNGTKRFDNPVLPFNDGVYFASTEKSNIIRGWIFGTTLDSKTQSLLIVNNATNVVIKVCEFQFCNDPFLGVYYHKNNKSWMESEFRVYSSANNCTFEYVSQPFLIDLEGKQGNFKNLREFVFKNIDGYFKIYSKHTPINLVRDLPQGFSALEPLVDLPIGINITRFQTLLALHRSYLTPGDSSSGWTAGAAAYYVGYLQPRTFLLKYNENGTITDAVDCALDPLSETKCTLKSFTVEKGIYQTSNFRVQPTESIVRFPNITNLCPFGEVFNATRFASVYAWNRKRISNCVADYSVLYNSASFSTFKCYGVSPTKLNDLCFTNVYADSFVIRGDEVRQIAPGQTGKIADYNYKLPDDFTGCVIAWNSNNLDSKVGGNYNYLYRLFRKSNLKPFERDISTEIYQAGSTPCNGVEGFNCYFPLQSYGFQPTNGVGYQPYRVVVLSFELLHAPATVCGPKKSTNLVKNKCVNFNFNGLTGTGVLTESNKKFLPFQQFGRDIADTTDAVRDPQTLEILDITPCSFGGVSVITPGTNTSNQVAVLYQGVNCTEVPVAIHADQLTPTWRVYSTGSNVFQTRAGCLIGAEHVNNSYECDIPIGAGICASYQTQTNSPRRARSVASQSIIAYTMSLGAENSVAYSNNSIAIPTNFTISVTTEILPVSMTKTSVDCTMYICGDSTECSNLLLQYGSFCTQLNRALTGIAVEQDKNTQEVFAQVKQIYKTPPIKDFGGFNFSQILPDPSKPSKRSFIEDLLFNKVTLADAGFIKQYGDCLGDIAARDLICAQKFNGLTVLPPLLTDEMIAQYTSALLAGTITSGWTFGAGAALQIPFAMQMAYRFNGIGVTQNVLYENQKLIANQFNSAIGKIQDSLSSTASALGKLQDVVNQNAQALNTLVKCLSSNFGAISSVLNDILSRLDKVEAEVQIDRLITGRLQCLQTYVTQQLIRAAEIRASANLAATKMSECVLGQSKRVDFCGKGYHLMSFPQSAPHGVVFLHVTYVPAQEKNFTTAPAICHDGKAHFPREGVFVSNGTHWFVTQRNFYEPQIITTDNTFVSGNCDVVIGIVNNTVYDPLQPELDSFKEELDKYFKNHTSPDVDLGDISGINASVVNIQKEIDRLNEVAKNLNESLIDLQELGKYEQYIK

SEQ ID NO: 2341 - protein, 1211 aa, Artificial Sequence
  SARS-CoV-2/Congo/94/2020__EPI_ISL_417947 spike protein (1-1211)(Q965C_S1003C)
MFVFLVLLPLVSSQCVNLTTRTQLPPAYTNSFTRGVYYPDKVFRSSVLHSTQDLFLPFFSNVTWFHAIHVSGTNGTKRFDNPVLPFNDGVYFASTEKSNIIRGWIFGTTLDSKTQSLLIVNNATNVVIKVCEFQFCNDPFLGVYYHKNNKSWMESEFRVYSSANNCTFEYVSQPFLMDLEGKQGNFKNLREFVFKNIDGYFKIYSKHTPINLVRDLPQGFSALEPLVDLPIGINITRFQTLLALHRSYLTPGDSSSGWTAGAAAYYVGYLQPRTFLLKYNENGTITDAVDCALDPLSETKCTLKSFTVEKGIYQTSNFRVQPTESIVRFPNITNLCPFGEVFNATRFASVYAWNRKRISNCVADYSVLYNSASFSTFKCYGVSPTKLNDLCFTNVYADSFVIRGDEVRQIAPGQTGKIADYNYKLPDDFTGCVIAWNSNNLDSKVGGNYNYLYRLFRKSNLKPFERDISTEIYQAGSTPCNGVEGFNCYFPLQSYGFQPTNGVGYQPYRVVVLSFELLHAPATVCGPKKSTNLVKNKCVNFNFNGLTGTGVLTESNKKFLPFQQFGRDIADTTDAVRDPQTLEILDITPCSFGGVSVITPGTNTSNQVAVLYQGVNCTEVPVAIHADQLTPTWRVYSTGSNVFQTRAGCLIGAEHVNNSYECDIPIGAGICASYQTQTNSPRRARSVASQSIIAYTMSLGAENSVAYSNNSIAIPTNFTISVTTEILPVSMTKTSVDCTMYICGDSTECSNLLLQYGSFCTQLNRALTGIAVEQDKNTQEVFAQVKQIYKTPPIKDFGGFNFSQILPDPSKPSKRSFIEDILFNKVTLADAGFIKQYGDCLGDIAARDLICAQKFNGLTVLPPLLTDEMIAQYTSALLAGTITSGWTFGAGAALQIPFAMQMAYRFNGIGVTQNVLYENQKLIANQFNSAIGKIQDSLSSTASALGKLQDVVNQNAQALNTLVKCLSSNFGAISSVLNDILSRLDKVEAEVQIDRLITGRLQCLQTYVTQQLIRAAEIRASANLAATKMSECVLGQSKRVDFCGKGYHLMSFPQSAPHGVVFLHVTYVPAQEKNFTTAPAICHDGKAHFPREGVFVSNGTHWFVTQRNFYEPQIITTDNTFVSGNCDVVIGIVNNTVYDPLQPELDSFKEELDKYFKNHTSPDVDLGDISGINASVVNIQKEIDRLNEVAKNLNESLIDLQELGKYEQYIK

SEQ ID NO: 2342 - protein, 1211 aa, Artificial Sequence
  SARS-CoV-2/Congo/158/2020__EPI_ISL_417950 spike protein (1-1211)(Q965C_S1003C)
MFVFLVLLPLVSSQCVNLTTRTQLPPAYTNSFTRGVYYPDKVFRSSVLHSTQDLFLPFFSNVTWFHAIHVSGTNGTKRFDNPVLPFNDGVYFASTEKSNIIRGWIFGTTLDSKTQSLLIVNNATNVVIKVCEFQFCNDPFLGVYYHKNNKSWMESEFRVYSSANNCTFEYVSQPFLMDLEGKQGNFKNLREFVFKNIDGYFKIYSKHTPINLVRDLPQGFSALEPLVDLPIGINITRFQTLLALHRSYLTPGDSSSGWTAGAAAYYVGYLQPRTFLLKYNENGTITDAVDCALDPLSETKCTLKSFTVEKGIYQTSNFRVQPTESIVRFPNITNLCPFGEVFNATRFASVYAWNRKRISNCVADYSVLYNSASFSTFKCYGVSPTKLNDLCFTNVYADSFVIRGDEVRQIAPGQTGKIADYNYKLPDDFTGCVIAWNSNNLDSKVGGNYNYLYRLFRKSNLKPFERDISTEIYQAGSTPCNGVEGFNCYFPLQSYGFQPTNGVGYQPYRVVVLSFELLHAPATVCGPKKSTNLVKNKCVNFNFNGLTGTGVLTESNKKFLPFQQFGRDIADTTDAVRDPQTLEILDITPCSFGGVSVITPGTNTSNQVAVLYQDVNCTEVPVAIHADQLTPTWRVYSTGSNVFQTRAGCLIGAEHVNNSYECDIPIGAGICASYQTQTNSPRRARSVASQSIIAYTMSLGAENSVAYSNNSIAIPTNFTISVTTEILPVSMTKTSVDCTMYICGDSTECSNLLLQYGSFCTQLNRALTGIAVEQDKNTQEVFAQVKQIYKTPPIKDFGGFNFSQILPDPSKPSKRSFIEDLLFNKVTLADAGFIKQYGDCLGDIAARDLICAQKFNGLTVLPPLLTDEMIAQYTSALLAGTITSGWTFGAGAALQIPFAMQMAYRFNGIGVTQNVLYENQKLIANQFNSAIGKIQDSLSSTASALGKLQDVVNQNAQALNTLVKCLSSNFGAISSVLNDILSRLDKVEAEVQIDRLITGRLQCLQTYVTQQLIRAAEIRASANLAATKMSECVLGQSKRVDFCGKGYHLMSFPQSAPHGVVFLHVTYVPAQEKNFTTAPAICHDGKAHFPREGVFVSNGTHWFVTQRNFYEPQIITTDNTFLSGNCDVVIGIVNNTVYDPLQPELDSFKEELDKYFKNHTSPDVDLGDISGINASVVNIQKEIDRLNEVAKNLNESLIDLQELGKYEQYIK

SEQ ID NO: 2343 - protein, 1211 aa, Artificial Sequence
  SARS-CoV-2/USA/UT-00034/2020__EPI_ISL_417977 spike protein (1-1211)(Q965C_S1003C)
MFVFLVLLPLVSSQCVNLTTRTQLPPAYTNSFTRGVYYPDKVFRSSVLHSTQDLFLPFFSNVTWFHAIHVSGTNGTKRFDNPVLPFNDGVYFASTEKSNIIRGWIFGTTLDSKTQSLLIVNNATNVVIKVCEFQFCNDPFLGVYYYKNNKSWMESEFRVYSSANNCTFEYVSQPFLMDLEGKQGNFKNLREFVFKNIDGYFKIYSKHTPINLVRDLPQGFSALEPLVDLPIGINITRFQTLLALHRSYLTPGDSSSGWTAGAAAYYVGYLQPRTFLLKYNENGTITDAVDCALDPLSETKCTLKSFTVEKGIYQTSNFRVQPTESIVRFPNITNLCPFGEVFNATRFASVYAWNRKRISNCVADYSVLYNSASFSTFKCYGVSPTKLNDLCFTNVYADSFVIRGDEVRQIAPGQTGKIADYNYKLPDDFTGCVIAWNSNNLDSKVGGNYNYLYRLFRKSNLKPFERDISTEIYQAGSTPCNGVEGFNCYFPLQSYGFQPTNGVGYQPYRVVVLSFELLHAPATVCGPKKSTNLVKNKCVNFNFNGLTGTGVLTESNKKFLPFQQFGRDIADTTDAVRDPQTLEILDITPCSFGGVSVITPGTNTSNQVAVLYQGVNCTEVPVAIHADQLTPTWRVYSTGSNVFQTRAGCLIGAEHVNNSYECDIPIGAGICASYQTQTNSPRRARSVASQSIIAYTMSLGAENSVAYSNNSIAIPTNFTISVTTEILPVSMTKTSVDCTMYICGDSTECSNLLLQYGSFCTQLNRALTGIAVEQDKNTQEVFAQVKQIYKTPPIKDFGGFNFSQILPDPSKPSKRSFIEDLLFNKVTLADAGFIKQYGDCLGDIAARDLICAQKFNGLTVLPPLLTDEMIAQYTSALLAGTITSGWTFGAGAALQIPFAMQMAYRFNGIGVTQNVLYENQKLIANQFNSAIGKIQDSLSSTASALGKLQDVVNQNAQALNTLVKCLSSNFGAISSVLNDILSRLDKVEAEVQIDRLITGRLQCLQTYVTQQLIRAAEIRASANLAATKMSECVLGQSKRVDFCGKGYHLMSFPQSAPHGVVFLHVTYVPAQEKNFTTAPAICHDGKAHFPREGVFVSNGTHWFVTQRNFYEPQIITTDNTFVSGNCDVVIGIVNNTVYDPLQPELDSFKEELDKYFKNHTSPDVDLGDISGINASVVNIQKEIDRLNEVAKNLNESLIDLQELGKYEQYIK

SEQ ID NO: 2344 - protein, 1211 aa, Artificial Sequence
  SARS-CoV-2/USA/UT-00033/2020__EPI_ISL_417976 spike protein (1-1211)(Q965C_S1003C)
MFVFLVLLPLVSSQCVNLTTRTQLPPAYTNSFTRGVYYPDKVFRSSVLHSTQDLFLPFFSNVTWFHAIHVSGTNGTKRFDNPVLPFNDGVYFASTEKSNIIRGWIFGTTLDSKTQSLLIVNNATNVVIKVCEFQFCNDPFLGVYYHKNNKSWMESEFRVYSSANNCTFEYVSQPFLMDLEGKQGNFKNLREFVFKNIDGYFKIYSKHTPINLVRDLPQGFSALEPLVDLPIGINITRFQTLLALHRSYLTPGDSSSGLTAGAAAYYVGYLQPRTFLLKYNENGTITDAVDCALDPLSETKCTLKSFTVEKGIYQTSNFRVQPTESIVRFPNITNLCPFGEVFNATRFASVYAWNRKRISNCVADYSVLYNSASFSTFKCYGVSPTKLNDLCFTNVYADSFVIRGDEVRQIAPGQTGKIADYNYKLPDDFTGCVIAWNSNNLDSKVGGNYNYLYRLFRKSNLKPFERDISTEIYQAGSTPCNGVEGFNCYFPLQSYGFQPTNGVGYQPYRVVVLSFELLHAPATVCGPKKSTNLVKNKCVNFNFNGLTGTGVLTESNKKFLPFQQFGRDIADTTDAVRDPQTLEILDITPCSFGGVSVITPGTNTSNQVAVLYQGVNCTEVPVAIHADQLTPTWRVYSTGSNVFQTRAGCLIGAEHVNNSYECDIPIGAGICASYQTQTNSPRRARSVASQSIIAYTMSLGAENSVAYSNNSIAIPTNFTISVTTEILPVSMTKTSVDCTMYICGDSTECSNLLLQYGSFCTQLNRALTGIAVEQDKNTQEVFAQVKQIYKTPPIKDFGGFNFSQILPDPSKPSKRSFIEDLLFNKVTLADAGFIKQYGDCLGDIAARDLICAQKFNGLTVLPPLLTDEMIAQYTSALLAGTITSGWTFGAGAALQIPFAMQMAYRFNGIGVTQNVLYENQKLIANQFNSAIGKIQDSLSSTASALGKLQDVVNQNAQALNTLVKCLSSNFGAISSVLNDILSRLDKVEAEVQIDRLITGRLQCLQTYVTQQLIRAAEIRASANLAATKMSECVLGQSKRVDFCGKGYHLMSFPQSAPHGVVFLHVTYVPAQEKNFTTAPAICHDGKAHFPREGVFVSNGTHWFVTQRNFYEPQIITTDNTFVSGNCDVVIGIVNNTVYDPLQPELDSFKEELDKYFKNHTSPDVDLGDISGINASVVNIQKEIDRLNEVAKNLNESLIDLQELGKYEQYIK

SEQ ID NO: 2345 - protein, 1211 aa, Artificial Sequence
  SARS-CoV-2/USA/WI-13/2020__EPI_ISL_417516 spike protein (1-1211)(Q965C_S1003C)
MFVFLVLLPLVSSQCVNLTTRTQLPPAYTNSFTRGVYYPDKVFRSSVLHSTQDLFLPFFSNVTWFHAIHVSGTNGTKRFDNPVLPFNDGVYFASTEKSNIIRGWIFGTTLDSKTQSLLIVNNATNVVIKVCEFQFCNDPFLGVYYHKNNKSWMESEFRVYSSANNCTFEYVSQPFLMDLEGKQGNFKNLREFVFKNIDGYFKIYSKHTPINLVRDLPQGFSALEPLVDLPIGINITRFQTLLALHRSYLTPGDSSSGWTAGAAAYYVGYLQPRTFLLKYNENGTITDAVDCALDPLSETKCTLKSFTVEKGIYQTSNFRVLPTESIVRFPNITNLCPFGEVFNATRFASVYAWNRKRISNCVADYSVLYNSASFSTFKCYGVSPTKLNDLCFTNVYADSFVIRGDEVRQIAPGQTGKIADYNYKLPDDFTGCVIAWNSNNLDSKVGGNYNYLYRLFRKSNLKPFERDISTEIYQAGSTPCNGVEGFNCYFPLQSYGFQPTNGVGYQPYRVVVLSFELLHAPATVCGPKKSTNLVKNKCVNFNFNGLTGTGVLTESNKKFLPFQQFGRDIADTTDAVRDPQTLEILDITPCSFGGVSVITPGTNTSNQVAVLYQGVNCTEVPVAIHADQLTPTWRVYSTGSNVFQTRAGCLIGAEHVNNSYECDIPIGAGICASYQTQTNSPRRARSVASQSIIAYTMSLGAENSVAYSNNSIAIPTNFTISVTTEILPVSMTKTSVDCTMYICGDSTECSNLLLQYGSFCTQLNRALTGIAVEQDKNTQEVFAQVKQIYKTPPIKDFGGFNFSQILPDPSKPSKRSFIEDLLFNKVTLADAGFIKQYGDCLGDIAARDLICAQKFNGLTVLPPLLTDEMIAQYTSALLAGTITSGWTFGAGAALQIPFAMQMAYRFNGIGVTQNVLYENQKLIANQFNSAIGKIQDSLSSTASALGKLQDVVNQNAQALNTLVKCLSSNFGAISSVLNDILSRLDKVEAEVQIDRLITGRLQCLQTYVTQQLIRAAEIRASANLAATKMSECVLGQSKRVDFCGKGYHLMSFPQSAPHGVVFLHVTYVPAQEKNFTTAPAICHDGKAHFPREGVFVSNGTHWFVTQRNFYEPQIITTDNTFVSGNCDVVIGIVNNTVYDPLQPELDSFKEELDKYFKNHTSPDVDLGDISGINASVVNIQKEIDRLNEVAKNLNESLIDLQELGKYEQYIK

SEQ ID NO: 2346 - protein, 1210 aa, Artificial Sequence
  SARS-CoV-2/India/1-27/2020__EPI_ISL_413522 spike protein (1-1210)(Q964C_S1002C)
MFVFLVLLPLVSSQCVNLTTRTQLPPAYTNSFTRGVYYPDKVFRSSVLHSTQDLFLPFFSNVTWFHAIHVSGTNGTKRFDNPVLPFNDGVYFASTEKSNIIRGWIFGTTLDSKTQSLLIVNNATNVVIKVCEFQFCNDPFLGVYHKNNKSWMESEFRVYSSANNCTFEYVSQPFLMDLEGKQGNFKNLREFVFKNIDGYFKIYSKHTPINLVRDLPQGFSALEPLVDLPIGINITRFQTLLALHRSYLTPGDSSSGWTAGAAAYYVGYLQPRTFLLKYNENGTITDAVDCALDPLSETKCTLKSFTVEKGIYQTSNFRVQPTESIVRFPNITNLCPFGEVFNATRFASVYAWNRKRISNCVADYSVLYNSASFSTFKCYGVSPTKLNDLCFTNVYADSFVIRGDEVIQIAPGQTGKIADYNYKLPDDFTGCVIAWNSNNLDSKVGGNYNYLYRLFRKSNLKPFERDISTEIYQAGSTPCNGVEGFNCYFPLQSYGFQPTNGVGYQPYRVVVLSFELLHAPATVCGPKKSTNLVKNKCVNFNFNGLTGTGVLTESNKKFLPFQQFGRDIADTTDAVRDPQTLEILDITPCSFGGVSVITPGTNTSNQVAVLYQDVNCTEVPVAIHADQLTPTWRVYSTGSNVFQTRAGCLIGAEHVNNSYECDIPIGAGICASYQTQTNSPRRARSVASQSIIAYTMSLGAENSVAYSNNSIAIPTNFTISVTTEILPVSMTKTSVDCTMYICGDSTECSNLLLQYGSFCTQLNRALTGIAVEQDKNTQEVFAQVKQIYKTPPIKDFGGFNFSQILPDPSKPSKRSFIEDLLFNKVTLADAGFIKQYGDCLGDIAARDLICAQKFNGLTVLPPLLTDEMIAQYTSALLAGTITSGWTFGAGAALQIPFAMQMAYRFNGIGVTQNVLYENQKLIANQFNSAIGKIQDSLSSTASALGKLQDVVNQNAQALNTLVKCLSSNFGAISSVLNDILSRLDKVEAEVQIDRLITGRLQCLQTYVTQQLIRAAEIRASANLAATKMSECVLGQSKRVDFCGKGYHLMSFPQSAPHGVVFLHVTYVPAQEKNFTTAPAICHDGKAHFPREGVFVSNGTHWFVTQRNFYEPQIITTDNTFVSGNCDVVIGIVNNTVYDPLQPELDSFKEELDKYFKNHTSPDVDLGDISGINASVVNIQKEIDRLNEVAKNLNESLIDLQELGKYEQYIK

SEQ ID NO: 2347 - protein, 1205 aa, Artificial Sequence
  SARS-CoV-2/pangolin/Guangxi/P4L/2017__EPI_ISL_410538 spike protein (1-1205)(Q959C_S997C)
MFVFLFVLPLVSSQCVNLTTRTGIPPGYTNSSTRGVYYPDKVFRSSILHLTQDLFLPFFSNVTWFNTINYQGGFKKFDNPVLPFNDGVYFASTEKSNIIRGWIFGTTLDARTQSLLIVNNATNVVIKVCEFQFCTDPFLGVYYHNNNKTWVENEFRVYSSANNCTFEYISQPFLMDLEGKQGNFKNLREFVFKNVDGYFKIYSKHTPIDLVRDLPRGFAALEPLVDLPIGINITRFQTLLALHRSYLTPGNLESGWTTGAAAYYVGYLQQRTFLLSYNQNGTITDAVDCSLDPLSETKCTLKSLTVEKGIYQTSNFRVQPTISIVRFPNITNLCPFGEVFNASKFASVYAWNRKRISNCVADYSVLYNSTSFSTFKCYGVSPTKLNDLCFTNVYADSFVVKGDEVRQIAPGQTGVIADYNYKLPDDFTGCVIAWNSVKQDALTGGNYGYLYRLFRKSKLKPFERDISTEIYQAGSTPCNGQVGLNCYYPLERYGFHPTTGVNYQPFRVVVLSFELLNGPATVCGPKLSTTLVKDKCVNFNFNGLTGTGVLTTSKKQFLPFQQFGRDISDTTDAVRDPQTLEILDITPCSFGGVSVITPGTNTSNQVAVLYQDVNCTEVPMAIHAEQLTPAWRVYSAGANVFQTRAGCLVGAEHVNNSYECDIPVGAGICASYHSMSSLRSVNQRSIIAYTMSLGAENSVAYSNNSIAIPTNFTISVTTEILPVSMTKTSVDCTMYICGDSIECSNLLLQYGSFCTQLNRALTGIAVEQDKNTQEVFAQVKQIYKTPPIKDFGGFNFSQILPDPSKPSKRSFIEDLLFNKVTLADAGFIKQYGDCLGDIAARDLICAQKFNGLTVLPPLLTDEMIAQYTSALLAGTITSGWTFGAGAALQIPFAMQMAYRFNGIGVTQNVLYENQKLIANQFNSAIGKIQDSLSSTASALGKLQDVVNQNAQALNTLVKCLSSNFGAISSVLNDILSRLDKVEAEVQIDRLITGRLQCLQTYVTQQLIRAAEIRASANLAATKMSECVLGQSKRVDFCGKGYHLMSFPQSAPHGVVFLHVTYVPAQEKNFTTAPAICHEGKAHFPREGVFVSNGTHWFITQRNFYEPQIITTDNTFVSGSCDVVIGIVNNTVYDPLQPELDSFKEELDKYFKNHTSPDVDLGDISGINASVVNIQKEIDRLNEVAKNLNESPIDLQELGKYEQYIK

SEQ ID NO: 2348 - protein, 1205 aa, Artificial Sequence
  SARS-CoV-2/pangolin/Guangxi/P5L/2017__EPI_ISL_410540 spike protein (1-1205)(Q959C_S997C)
MFVFLFVLPLVSSQCVNLTTRTGIPPGYTNSSTRGVYYPDKVFRSSILHLTQDLFLPFFSNVTWFNTINYQGGFKKFDNPVLPFNDGVYFASTEKSNIIRGWIFGTTLDARTQSLLIVNNATNVVIKVCEFQFCTDPFLGVYYHNNNKTWVENEFRVYSSANNCTFEYISQPFLMDLEGKQGNFKNLREFVFKNVDGYFKIYSKHTPIDLVRDLPRGFAALEPLVDLPIGINITRFQTLLALHRSYLTPGKLESGWTTGAAAYYVGYLQQRTFLLSYNQNGTITDAVDCSLDPLSETKCTLKSLTVEKGIYQTSNFRVQPTISIVRFPNITNLCPFGEVFNASKFASVYAWNRKRISNCVADYSVLYNSTSFSTFKCYGVSPTKLNDLCFTNVYADSFVVKGDEVRQIAPGQTGVIADYNYKLPDDFTGCVIAWNSVKQDALTGGNYGYLYRLFRKSKLKPFERDISTEIYQAGSTPCNGQVGLNCYYPLERYGFHPTTGVNYQPFRVVVLSFELLNGPATVCGPKLSTTLVKDKCVNFNFNGLTGTGVLTTSKKQFLPFQQFGRDISDTTDAVRDPQTLEILDITPCSFGGVSVITPGTNTSNQVAVLYQDVNCTEVPMAIHAEQLTPAWRVYSAGANVFQTRAGCLVGAEHVNNSYECDIPVGAGICASYHSMSSFRSVNQRSIIAYTMSLGAENSVAYSNNSIAIPTNFTISVTTEILPVSMTKTSVDCTMYICGDSIECSNLLLQYGSFCTQLNRALTGIAVEQDKNTQEVFAQVKQIYKTPPIKDFGGFNFSQILPDPSKPSKRSFIEDLLFNKVTLADAGFIKQYGDCLGDIAARDLICAQKFNGLTVLPPLLTDEMIAQYTSALLAGTITSGWTFGAGAALQIPFAMQMAYRFNGIGVTQNVLYENQKLIANQFNSAIGKIQDSLSSTASALGKLQDVVNQNAQALNTLVKCLSSNFGAISSVLNDILSRLDKVEAEVQIDRLITGRLQCLQTYVTQQLIRAAEIRASANLAATKMSECVLGQSKRVDFCGKGYHLMSFPQSAPHGVVFLHVTYVPAQEKNFTTAPAICHEGKAHFPREGVFVSNGTHWFITQRNFYEPQIITTDNTFVSGSCDVVIGIVNNTVYDPLQPELDSFKEELDKYFKNHTSPDVDLGDISGINASVVNIQKEIDRLNEVAKNLNESLIDLQELGKYEQYIK

SEQ ID NO: 2349 - protein, 1205 aa, Artificial Sequence
  SARS-CoV-2/pangolin/Guangxi/P5E/2017__EPI_ISL_410541 spike protein (1-1205)(Q959C_S997C)
MFVFLFVLPLVSSQCVNLTTRTGIPPGYTNSSTRGVYYPDKVFRSSILHLTQDLFLPFFSNVTWFNTITYQGGSKKFDNPVLPFNDGVYFASTEKSNIIRGWIFGTTLDARTQSLLIVNNATNVVIKVCEFQFCTDPFLGVYYHNNNKTWVENEFRVYSSANNCTFEYISQPFLMDLEGKQGNFKNLREFVFKNVDGYFKIYSKHTPIDLVRDLPRGFAALEPLVDLPIGINITRFQTLLALHRSYLTPGKLESGWTTGAAAYYVGYLQQRTFLLSYNQNGTITDAVDCSLDPLSETKCTLKSLTVEKGIYQTSNFRVQPTISIVRFPNITNLCPFGEVFNASKFASVYAWNRKRISNCVADYSVLYNSTSFSTFKCYGVSPTKLNDLCFTNVYADSFVVKGDEVRQIAPGQTGVIADYNYKLPDDFTGCVIAWNSVKQDALTGDNYGYLYRLFRKSKLKPFERDISTEIYQAGSTPCNGQVGLNCYYPLERYGFHPTTGVNYQPFRVVVLSFELLNGPATVCGPKLSTTLVKDKCVNFNFNGLTGTGVLTTSKKQFLPFQQFGRDISDTTDAVRDPQTLEILDITPCSFGGVSVITPGTNTSNQVAVLYQDVNCTEVPMAIHAEQLTPAWRVYSAGANVFQTRAGCLVGAEHVNNSYECDIPVGAGICASYHSMSSFRSVNQRSIIAYTMSLGAENSVAYSNNSIAIPTNFTISVTTEILPVSMTKTSVDCTMYICGDSIECSNLLLQYGSFCTQLNRALTGIAVEQDKNTQEVFAQVKQIYKTPPIKDFGGFNFSQILPDPSKPSKRSFIEDLLFNKVTLADAGFIKQYGDCLGDIAARDLICAQKFNGLTVLPPLLTDEMIAQYTSALLAGTITSGWTFGAGAALQIPFAMQMAYRFNGIGVTQNVLYENQKLIANQFNSAIGKIQDSLSSTASALGKLQDVVNQNAQALNTLVKCLSSNFGAISSVLNDILSRLDKVEAEVQIDRLITGRLQCLQTYVTQQLIRAAEIRASANLAATKMSECVLGQSKRVDFCGKGYHLMSFPQSAPHGVVFLHVTYVPAQEKNFTTAPAICHEGKAHFPREGVFVSNGTHWFITQRNFYEPQIITTDNTFVSGSCDVVIGIVNNTVYDPLQPELDSFKEELDKYFKNHTSPDVDLGDISGINASVVNIQKEIDRLNEVAKNLNESLIDLQELGKYEQYIK

SEQ ID NO: 2350 - protein, 1203 aa, Artificial Sequence
  SARS-CoV-2/pangolin/Guangxi/P1E/2017__EPI_ISL_410539 spike protein (1-1203)(Q957C_S995C)
MFVFLFVLPLVSSQCVNLTTRTGIQPGYTNSSTRGVYYPDKVFRSSILHLTQDLFLPFFSNVTWFNTINYQGGFKKFDNPVLPFNDGVYFASTEKSNIIRGWIFGTTLDARTQSLLIVNNATNVVIKVCEFQFCTDPFLGVYYHNNNKTWVENEFRVYSSANNCTFEYISQPFLMDLEGKQGNFKNLREFVFKNVDGYFKIYSKHTPIDLVRDLPRGFAALEPLVDLPIGINITRFQTLLALHRSYLTPGKLESGWTTGAAAYYVGYLQQRTFLLSYNQNGTITDAVDCSLDPLSETKCTLKSLTVEKGIYQTSNFRVQPTISIVRFPNITNLCPFGEVFNASKFASVYAWNRKRISNCVADYSVLYNSTSFSTFKCYGVSPTKLNDLCFTNVYADSFVVKGDEVRQIAPGQTGVIADYNYKLPDDFTGCVIAWNSVKQDALTGGNYLYRLFRKSKLKPFERDISTEIYQAGSTPCNGQVGLNCYYPLERYGFHPTTGVNYQPFRVVVLSFELLNGPATVCGPKLSTTLVKDKCVNFNFNGLTGTGVLTTSKKQFLPFQQFGRDISDTTDAVRDPQTLEILDITPCSFGGVSVITPGTNTSNQVAVLYQDVNCTEVPMAIHAEQLTPAWRVYSAGANVFQTRAGCLVGAEHVNNSYECDIPVGAGICASYHSMSSLRSVNQRSIIAYTMSLGAENSVAYSNNSIAIPTNFTISVTTEILPVSMTKTSVDCTMYICGDSIECSNLLLQYGSFCTQLNRALTGIAVEQDKNTQEVFAQVKQIYKTPPIKDFGGFNFSQILPDPSKPSKRSFIEDLLFNKVTLADAGFIKQYGDCLGDIAARDLICAQKFNGLTVLPPLLTDEMIAQYTSALLAGTITSGWTFGAGAALQIPFAMQMAYRFNGIGVTQNVLYENQKLIANQFNSAIGKIQDSLSSTASALGKLQDVVNQNAQALNTLVKCLSSNFGAISSVLNDILSRLDKVEAEVQIDRLITGRLQCLQTYVTQQLIRAAEIRASANLAATKMSECVLGQSKRVDFCGKGYHLMSFPQSAPHGVVFLHVTYVPAQEKNFTTAPAICHEGKAHFPREGVFVSNGTHWFITQRNFYEPQIITTDNTFVSGSCDVVIGIVNNTVYDPLQPELDSFKEELDKYFKNHTSPDVDLGDISGINASVVNIQKEIDRLNEVAKNLNESLIDLQELGKYEQYIK

SEQ ID NO: 2351 - protein, 1211 aa, Artificial Sequence
  SARS-CoV-2/Wuhan/WIV05/2019__EPI_ISL_402128 spike protein (1-1211)(F970C_G999C)
MFVFLVLLPLVSSQCVNLTTRTQLPPAYTNSFTRGVYYPDKVFRSSVLHSTQDLFLPFFSNVTWFHAIHVSGTNGTKRFDNPVLPFNDGVYFASTEKSNIIRGWIFGTTLDSKTQSLLIVNNATNVVIKVCEFQFCNDPFLGVYYHKNNKSWMESEFRVYSSANNCTFEYVSQPFLMDLEGKQGNFKNLREFVFKNIDGYFKIYSKHTPINLVRDLPQGFSALEPLVDLPIGINITRFQTLLALHRSYLTPGDSSSGWTAGAAAYYVGYLQPRTFLLKYNENGTITDAVDCALDPLSETKCTLKSFTVEKGIYQTSNFRVQPTESIVRFPNITNLCPFGEVFNATRFASVYAWNRKRISNCVADYSVLYNSASFSTFKCYGVSPTKLNDLCFTNVYADSFVIRGDEVRQIAPGQTGKIADYNYKLPDDFTGCVIAWNSNNLDSKVGGNYNYLYRLFRKSNLKPFERDISTEIYQAGSTPCNGVEGFNCYFPLQSYGFQPTNGVGYQPYRVVVLSFELLHAPATVCGPKKSTNLVKNKCVNFNFNGLTGTGVLTESNKKFLPFQQFGRDIADTTDAVRDPQTLEILDITPCSFGGVSVITPGTNTSNQVAVLYQDVNCTEVPVAIHADQLTPTWRVYSTGSNVFQTRAGCLIGAEHVNNSYECDIPIGAGICASYQTQTNSPRRARSVASQSIIAYTMSLGAENSVAYSNNSIAIPTNFTISVTTEILPVSMTKTSVDCTMYICGDSTECSNLLLQYGSFCTQLNRALTGIAVEQDKNTQEVFAQVKQIYKTPPIKDFGGFNFSQILPDPSKPSKRSFIEDLLFNKVTLADAGFIKQYGDCLGDIAARDLICAQKFNGLTVLPPLLTDEMIAQYTSALLAGTITSGWTFGAGAALQIPFAMQMAYRFNGIGVTQNVLYENQKLIANQFNSAIGKIQDSLSSTASALGKLQDVVNQNAQALNTLVKQLSSNCGAISSVLNDILSRLDKVEAEVQIDRLITCRLQSLQTYVTQQLIRAAEIRASANLAATKMSECVLGQSKRVDFCGKGYHLMSFPQSAPHGVVFLHVTYVPAQEKNFTTAPAICHDGKAHFPREGVFVSNGTHWFVTQRNFYEPQIITTDNTFVSGNCDVVIGIVNNTVYDPLQPELDSFKEELDKYFKNHTSPDVDLGDISGINASVVNIQKEIDRLNEVAKNLNESLIDLQELGKYEQYIK

SEQ ID NO: 2352 - protein, 1207 aa, Artificial Sequence
  SARS-CoV-2/bat/Yunnan/RaTG13/2013__EPI_ISL_402131 spike protein (1-1207)(F966C_G995C)
MFVFLVLLPLVSSQCVNLTTRTQLPPAYTNSSTRGVYYPDKVFRSSVLHLTQDLFLPFFSNVTWFHAIHVSGTNGIKRFDNPVLPFNDGVYFASTEKSNIIRGWIFGTTLDSKTQSLLIVNNATNVVIKVCEFQFCNDPFLGVYYHKNNKSWMESEFRVYSSANNCTFEYVSQPFLMDLEGKQGNFKNLREFVFKNIDGYFKIYSKHTPINLVRDLPPGFSALEPLVDLPIGINITRFQTLLALHRSYLTPGDSSSGWTAGAAAYYVGYLQPRTFLLKYNENGTITDAVDCALDPLSETKCTLKSFTVEKGIYQTSNFRVQPTDSIVRFPNITNLCPFGEVFNATTFASVYAWNRKRISNCVADYSVLYNSTSFSTFKCYGVSPTKLNDLCFTNVYADSFVITGDEVRQIAPGQTGKIADYNYKLPDDFTGCVIAWNSKHIDAKEGGNFNYLYRLFRKANLKPFERDISTEIYQAGSKPCNGQTGLNCYYPLYRYGFYPTDGVGHQPYRVVVLSFELLNAPATVCGPKKSTNLVKNKCVNFNFNGLTGTGVLTESNKKFLPFQQFGRDIADTTDAVRDPQTLEILDITPCSFGGVSVITPGTNASNQVAVLYQDVNCTEVPVAIHADQLTPTWRVYSTGSNVFQTRAGCLIGAEHVNNSYECDIPIGAGICASYQTQTNSRSVASQSIIAYTMSLGAENSVAYSNNSIAIPTNFTISVTTEILPVSMTKTSVDCTMYICGDSTECSNLLLQYGSFCTQLNRALTGIAVEQDKNTQEVFAQVKQIYKTPPIKDFGGFNFSQILPDPSKPSKRSFIEDLLFNKVTLADAGFIKQYGDCLGDIAARDLICAQKFNGLTVLPPLLTDEMIAQYTSALLAGTITSGWTFGAGAALQIPFAMQMAYRFNGIGVTQNVLYENQKLIANQFNSAIGKIQDSLSSTASALGKLQDVVNQNAQALNTLVKQLSSNCGAISSVLNDILSRLDKVEAEVQIDRLITCRLQSLQTYVTQQLIRAAEIRASANLAATKMSECVLGQSKRVDFCGKGYHLMSFPQSAPHGVVFLHVTYVPAQEKNFTTAPAICHDGKAHFPREGVFVSNGTHWFVTQRNFYEPQIITTDNTFVSGSCDVVIGIVNNTVYDPLQPELDSFKEELDKYFKNHTSPDVDLGDISGINASVVNIQKEIDRLNEVAKNLNESLIDLQELGKYEQYIK

SEQ ID NO: 2353 - protein, 1211 aa, Artificial Sequence
  SARS-CoV-2/Wuhan/HBCDC-HB-01/2019__EPI_ISL_402132 spike protein (1-1211)(F970C_G999C)
MFVFLVLLPLVSSQCVNLTTRTQLPPAYTNSITRGVYYPDKVFRSSVLHSTQDLFLPFFSNVTWFHAIHVSGTNGTKRFDNPVLPFNDGVYFASTEKSNIIRGWIFGTTLDSKTQSLLIVNNATNVVIKVCEFQFCNDPFLGVYYHKNNKSWMESEFRVYSSANNCTFEYVSQPFLMDLEGKQGNFKNLREFVFKNIDGYFKIYSKHTPINLVRDLPQGFSALEPLVDLPIGINITRFQTLLALHRSYLTPGDSSSGWTAGAAAYYVGYLQPRTFLLKYNENGTITDAVDCALDPLSETKCTLKSFTVEKGIYQTSNFRVQPTESIVRFPNITNLCPFGEVFNATRFASVYAWNRKRISNCVADYSVLYNSASFSTFKCYGVSPTKLNDLCFTNVYADSFVIRGDEVRQIAPGQTGKIADYNYKLPDDFTGCVIAWNSNNLDSKVGGNYNYLYRLFRKSNLKPFERDISTEIYQAGSTPCNGVEGFNCYFPLQSYGFQPTNGVGYQPYRVVVLSFELLHAPATVCGPKKSTNLVKNKCVNFNFNGLTGTGVLTESNKKFLPFQQFGRDIADTTDAVRDPQTLEILDITPCSFGGVSVITPGTNTSNQVAVLYQDVNCTEVPVAIHADQLTPTWRVYSTGSNVFQTRAGCLIGAEHVNNSYECDIPIGAGICASYQTQTNSPRRARSVASQSIIAYTMSLGAENSVAYSNNSIAIPTNFTISVTTEILPVSMTKTSVDCTMYICGDSTECSNLLLQYGSFCTQLNRALTGIAVEQDKNTQEVFAQVKQIYKTPPIKDFGGFNFSQILPDPSKPSKRSFIEDLLFNKVTLADAGFIKQYGDCLGDIAARDLICAQKFNGLTVLPPLLTDEMIAQYTSALLAGTITSGWTFGAGAALQIPFAMQMAYRFNGIGVTQNVLYENQKLIANQFNSAIGKIQDSLSSTASALGKLQDVVNQNAQALNTLVKQLSSNCGAISSVLNDILSRLDKVEAEVQIDRLITCRLQSLQTYVTQQLIRAAEIRASANLAATKMSECVLGQSKRVDFCGKGYHLMSFPQSAPHGVVFLHVTYVPAQEKNFTTAPAICHDGKAHFPREGVFVSNGTHWFVTQRNFYEPQIITTDNTFVSGNCDVVIGIVNNTVYDPLQPELDSFKEELDKYFKNHTSPDVDLGDISGINASVVNIQKEIDRLNEVAKNLNESLIDLQELGKYEQYIK

SEQ ID NO: 2354 - protein, 1211 aa, Artificial Sequence
  SARS-CoV-2/Guangdong/20SF028/2020__EPI_ISL_403936 spike protein (1-1211)(F970C_G999C)
MFVFLVLLPLVSSQCVNLTTRTQLPPAYTNSFTRGVYYPDKVFRSSVLYSTQDLFLPFFSNVTWFHAIHVSGTNGTKRFDNPVLPFNDGVYFASTEKSNIIRGWIFGTTLDSKTQSLLIVNNATNVVIKVCEFQFCNDPFLGVYYHKNNKSWMESEFRVYSSANNCTFEYVSQPFLMDLEGKQGNFKNLREFVFKNIDGYFKIYSKHTPINLVRDLPQGFSALEPLVDLPIGINITRFQTLLALHRSYLTPGDSSSGWTAGAAAYYVGYLQPRTFLLKYNENGTITDAVDCALDPLSETKCTLKSFTVEKGIYQTSNFRVQPTESIVRFPNITNLCPFGEVFNATRFASVYAWNRKRISNCVADYSVLYNSASFSTFKCYGVSPTKLNDLCFTNVYADSFVIRGDEVRQIAPGQTGKIADYNYKLPDDFTGCVIAWNSNNLDSKVGGNYNYLYRLFRKSNLKPFERDISTEIYQAGSTPCNGVEGFNCYFPLQSYGFQPTNGVGYQPYRVVVLSFELLHAPATVCGPKKSTNLVKNKCVNFNFNGLTGTGVLTESNKKFLPFQQFGRDIADTTDAVRDPQTLEILDITPCSFGGVSVITPGTNTSNQVAVLYQDVNCTEVPVAIHADQLTPTWRVYSTGSNVFQTRAGCLIGAEHVNNSYECDIPIGAGICASYQTQTNSPRRARSVASQSIIAYTMSLGAENSVAYSNNSIAIPTNFTISVTTEILPVSMTKTSVDCTMYICGDSTECSNLLLQYGSFCTQLNRALTGIAVEQDKNTQEVFAQVKQIYKTPPIKDFGGFNFSQILPDPSKPSKRSFIEDLLFNKVTLADAGFIKQYGDCLGDIAARDLICAQKFNGLTVLPPLLTDEMIAQYTSALLAGTITSGWTFGAGAALQIPFAMQMAYRFNGIGVTQNVLYENQKLIANQFNSAIGKIQDSLSSTASALGKLQDVVNQNAQALNTLVKQLSSNCGAISSVLNDILSRLDKVEAEVQIDRLITCRLQSLQTYVTQQLIRAAEIRASANLAATKMSECVLGQSKRVDFCGKGYHLMSFPQSAPHGVVFLHVTYVPAQEKNFTTAPAICHDGKAHFPREGVFVSNGTHWFVTQRNFYEPQIITTDNTFVSGNCDVVIGIVNNTVYDPLQPELDSFKEELDKYFKNHTSPDVDLGDISGINASVVNIQKEIDRLNEVAKNLNESLIDLQELGKYEQYIK

SEQ ID NO: 2355 - protein, 1211 aa, Artificial Sequence
  SARS-CoV-2/Shenzhen/SZTH-001/2020__EPI_ISL_406592 spike protein (1-1211)(F970C_G999C)
MFVFLVLLPLVSSQCVNLTTRTQLPPAYTNSFTRGVYYPDKVFRSSVLHSTQDLFLPFFSNVTWFHAIHVSGTNGTKRFDNPVLPFNDGVYFASTEKSNIIRGWIFGTTLDSKTQSLLIVNNATNVVIKVCEFQFCNDPFLGVYYHKNNKSWMESEFRVYSSANNCTFEYVSQPFLMDLEGKQGNFKNLREFVFKNIDGYFKIYSKHTPINLVRDLPQGFSALEPLVDLPIGINITRFQTLLALHRSYLTPGDSSSGWTAGAAAYYVGYLQPRTFLLKYNENGTITDAVDCALDPLSETKCTLKSFTVEKGIYQTSNFRVQPTESIVRFPNITNLCPFGEVFNATRFASVYAWNRKRISNCVADYSVLYNSASFSTFKCYGVSPTKLNDLCFTNVYADSFVIRGDEVRQIAPGQTGKIADYNYKLPDDFTGCVIAWNSNNLDSKVGGNYNYLYRLFRKSNLKPFERDISTEIYQAGSTPCNGVEGFNCYFPLQSYGFQPTNGVGYQPYRVVVLSFELLHAPATVCGPKKSTNLVKNKCVNFNFNGLTGTGVLTESNKKFLPFQQFGRDIADTTDAVRDPQTLEILDITPCSFGGVSVITPGTNTSNQVAVLYQDVNCTEVPVAIHADQLTPTWRVYSTGSNVFQTRAGCLIGAEHVNNSYECDIPIGAGICASYQTQTNSPRRARSVASQSIIAYTMSLGAENSVAYSNNSIAIPTNFTISVTTEILPVSMTKTSVDCTMYICGDSTECSNLLLQYGSFCTQLNRALTGIAVEQDKNTQEVFAQVKQIYKTPPIKDFGGFNFSQILPDPSKPSKRSFIEDLLFNKVTLADAGFIKQYGDCLGDIAARDLICAQKFNGLTVLPPLLTDEMIAQYTSALLAGTITSGWTFGAGAALQIPFAMQMAYRFNGIGVTQNVLYENQKLIANQFNSAIGKIQDSLSSTASALGKLQDVVNQNAQALNTLVKQLSSNCGAISSVLNDILSRLDKVEAEVQIDRLITCRLQSLQTYVTQQLIRAAEIRASANLAATKMSECVLGQSKRVDFCGKGYHLMSFPQSAPHGVVFLHVTYVPAQEKNFTTAPAICHDGKAHFPREGVFVSNGTHWFVTQRNFYEPQIITTDNTFVSGNCDVLIGIVNNTVYDPLQPELDSFKEELDKYFKNHTSPDVDLGDISGINASVVNIQKEIDRLNEVAKNLNESLIDLQELGKYEQYIK

SEQ ID NO: 2356 - protein, 1211 aa, Artificial Sequence
  SARS-CoV-2/Shenzhen/SZTH-004/2020__EPI_ISL_406595 spike protein (1-1211)(F970C_G999C)
MFVFLVLLPLVSSQCVNLTTRTQLPPAYTNSFTRGVYYPDKVFRSSVLHSTQDLFLPFFSNVTWFHAIHVSGTNGTKRFDNPVLPFNDGVYFASTEKSNIIRGWIFGTTLDSKTQSLLIVNNATNVVIKVCEFQFCNDPFLGVYYHKNNKSWMESEFRVYSSANNCTFEYVSQPFLMDLEGKQGNFKNLREFVFKNIDGYFKIYSKHTPINLVRDLPQGFSALEPLVDLPIGINITRFQTLLALHRSYLTPGDSSSGWTAGAAAYYVGYLQPRTFLLKYNENGTITDAVDCALDPLSETKCTLKSFTVEKGIYQTSNFRVQPTESIVRFPNITNLCPFGEVFNATRFASVYAWDRKRISNCVAYYSVLYNSASFSTFKCYGVSPTKLNDLCFTNVYADSFVIRGDEVRQIAPGQTGKIADYNYKLPDDFTGCVIAWNSNNLDSKVGGNYNYLYRLFRKSNLKPFERDISTEIYQAGSTPCNGVEGFNCYFPLQSYGFQPTNGVGYQPYRVVVLSFELLHAPATVCGPKKSTNLVKNKCVNFNFNGLTGTGVLTESNKKFLPFQQFGRDIADTTDAVRDPQTLEILDITPCSFGGVSVITPGTNTSNQVAVLYQDVNCTEVPVAIHADQLTPTWRVYSTGSNVFQTRAGCLIGAEHVNNSYECDIPIGAGICASYQTQTNSPRRARSVASQSIIAYTMSLGAENSVAYSNNSIAIPTNFTISVTTEILPVSMTKTSVDCTMYICGDSTECSNLLLQYGSFCTQLNRALTGIAVEQDKNTQEVFAQVKQIYKTPPIKDFGGFNFSQILPDPSKPSKRSFIEDLLFNKVTLADAGFIKQYGDCLGDIAARDLICAQKFNGLTVLPPLLTDEMIAQYTSALLAGTITSGWTFGAGAALQIPFAMQMAYRFNGIGVTQNVLYENQKLIANQFNSAIGKIQDSLSSTASALGKLQDVVNQNAQALNTLVKQLSSNCGAISSVLNDILSRLDKVEAEVQIDRLITCRLQSLQTYVTQQLIRAAEIRASANLAATKMSECVLGQSKRVDFCGKGYHLMSFPQSAPHGVVFLHVTYVPAQEKNFTTAPAICHDGKAHFPREGVFVSNGTHWFVTQRNFYEPQIITTDNTFVSGNCDVVIGIVNNTVYDPLQPELDSFKEELDKYFKNHTSPDVDLGDISGINASVVNIQKEIDRLNEVAKNLNESLIDLQELGKYEQYIK

SEQ ID NO: 2357 - protein, 1211 aa, Artificial Sequence
  SARS-CoV-2/France/IDF0372/2020__EPI_ISL_406596 spike protein (1-1211)(F970C_G999C)
MFVFLVLLPLVSSQCVNLTTRTQLPPAYTNSFTRGVYYPDKVFRSSVLHSTQDLFLPFFSNVTWFHAIHVSGTNGTKRFDNPVLPFNDGVYFASTEKSNIIRGWIFGTTLDSKTQSLLIVNNATNVVIKVCEFQFCNDPFLGVYYHKNNKSWMESEFRVYSSANNCTFEYVSQPFLMDLEGKQGNFKNLREFVFKNIDGYFKIYSKHTPINLVRDLPQGFSALEPLVDLPIGINITRFQTLLALHRSYLTPGDSSSGWTAGAAAYYVGYLQPRTFLLKYNENGTITDAVDCALDPLSETKCTLKSFTVEKGIYQTSNFRVQPTESIVRFPNITNLCPFGEVFNATRFASVYAWNRKRISNCVADYSFLYNSASFSTFKCYGVSPTKLNDLCFTNVYADSFVIRGDEVRQIAPGQTGKIADYNYKLPDDFTGCVIAWNSNNLDSKVGGNYNYLYRLFRKSNLKPFERDISTEIYQAGSTPCNGVEGFNCYFPLQSYGFQPTNGVGYQPYRVVVLSFELLHAPATVCGPKKSTNLVKNKCVNFNFNGLTGTGVLTESNKKFLPFQQFGRDIADTTDAVRDPQTLEILDITPCSFGGVSVITPGTNTSNQVAVLYQDVNCTEVPVAIHADQLTPTWRVYSTGSNVFQTRAGCLIGAEHVNNSYECDIPIGAGICASYQTQTNSPRRARSVASQSIIAYTMSLGAENSVAYSNNSIAIPTNFTISVTTEILPVSMTKTSVDCTMYICGDSTECSNLLLQYGSFCTQLNRALTGIAVEQDKNTQEVFAQVKQIYKTPPIKDFGGFNFSQILPDPSKPSKRSFIEDLLFNKVTLADAGFIKQYGDCLGDIAARDLICAQKFNGLTVLPPLLTDEMIAQYTSALLAGTITSGWTFGAGAALQIPFAMQMAYRFNGIGVTQNVLYENQKLIANQFNSAIGKIQDSLSSTASALGKLQDVVNQNAQALNTLVKQLSSNCGAISSVLNDILSRLDKVEAEVQIDRLITCRLQSLQTYVTQQLIRAAEIRASANLAATKMSECVLGQSKRVDFCGKGYHLMSFPQSAPHGVVFLHVTYVPAQEKNFTTAPAICHDGKAHFPREGVFVSNGTHWFVTQRNFYEPQIITTDNTFVSGNCDVVIGIVNNTVYDPLQPELDSFKEELDKYFKNHTSPDVDLGDISGINASVVNIQKEIDRLNEVAKNLNESLIDLQELGKYEQYIK

SEQ ID NO: 2358 - protein, 1211 aa, Artificial Sequence
  SARS-CoV-2/Australia/VIC01/2020__EPI_ISL_406844 spike protein (1-1211)(F970C_G999C)
MFVFLVLLPLVSSQCVNLTTRTQLPPAYTNSFTRGVYYPDKVFRSSVLHSTQDLFLPFFSNVTWFHAIHVSGTNGTKRFDNPVLPFNDGVYFASTEKSNIIRGWIFGTTLDSKTQSLLIVNNATNVVIKVCEFQFCNDPFLGVYYHKNNKSWMESEFRVYSSANNCTFEYVSQPFLMDLEGKQGNFKNLREFVFKNIDGYFKIYSKHTPINLVRDLPQGFSALEPLVDLPIGINITRFQTLLALHRRYLTPGDSSSGWTAGAAAYYVGYLQPRTFLLKYNENGTITDAVDCALDPLSETKCTLKSFTVEKGIYQTSNFRVQPTESIVRFPNITNLCPFGEVFNATRFASVYAWNRKRISNCVADYSVLYNSASFSTFKCYGVSPTKLNDLCFTNVYADSFVIRGDEVRQIAPGQTGKIADYNYKLPDDFTGCVIAWNSNNLDSKVGGNYNYLYRLFRKSNLKPFERDISTEIYQAGSTPCNGVEGFNCYFPLQSYGFQPTNGVGYQPYRVVVLSFELLHAPATVCGPKKSTNLVKNKCVNFNFNGLTGTGVLTESNKKFLPFQQFGRDIADTTDAVRDPQTLEILDITPCSFGGVSVITPGTNTSNQVAVLYQDVNCTEVPVAIHADQLTPTWRVYSTGSNVFQTRAGCLIGAEHVNNSYECDIPIGAGICASYQTQTNSPRRARSVASQSIIAYTMSLGAENSVAYSNNSIAIPTNFTISVTTEILPVSMTKTSVDCTMYICGDSTECSNLLLQYGSFCTQLNRALTGIAVEQDKNTQEVFAQVKQIYKTPPIKDFGGFNFSQILPDPSKPSKRSFIEDLLFNKVTLADAGFIKQYGDCLGDIAARDLICAQKFNGLTVLPPLLTDEMIAQYTSALLAGTITSGWTFGAGAALQIPFAMQMAYRFNGIGVTQNVLYENQKLIANQFNSAIGKIQDSLSSTASALGKLQDVVNQNAQALNTLVKQLSSNCGAISSVLNDILSRLDKVEAEVQIDRLITCRLQSLQTYVTQQLIRAAEIRASANLAATKMSECVLGQSKRVDFCGKGYHLMSFPQSAPHGVVFLHVTYVPAQEKNFTTAPAICHDGKAHFPREGVFVSNGTHWFVTQRNFYEPQIITTDNTFVSGNCDVVIGIVNNTVYDPLQPELDSFKEELDKYFKNHTSPDVDLGDISGINASVVNIQKEIDRLNEVAKNLNESLIDLQELGKYEQYIK

SEQ ID NO: 2359 - protein, 1211 aa, Artificial Sequence
  SARS-CoV-2/Germany/BavPat1/2020__EPI_ISL_406862 spike protein (1-1211)(F970C_G999C)
MFVFLVLLPLVSSQCVNLTTRTQLPPAYTNSFTRGVYYPDKVFRSSVLHSTQDLFLPFFSNVTWFHAIHVSGTNGTKRFDNPVLPFNDGVYFASTEKSNIIRGWIFGTTLDSKTQSLLIVNNATNVVIKVCEFQFCNDPFLGVYYHKNNKSWMESEFRVYSSANNCTFEYVSQPFLMDLEGKQGNFKNLREFVFKNIDGYFKIYSKHTPINLVRDLPQGFSALEPLVDLPIGINITRFQTLLALHRSYLTPGDSSSGWTAGAAAYYVGYLQPRTFLLKYNENGTITDAVDCALDPLSETKCTLKSFTVEKGIYQTSNFRVQPTESIVRFPNITNLCPFGEVFNATRFASVYAWNRKRISNCVADYSVLYNSASFSTFKCYGVSPTKLNDLCFTNVYADSFVIRGDEVRQIAPGQTGKIADYNYKLPDDFTGCVIAWNSNNLDSKVGGNYNYLYRLFRKSNLKPFERDISTEIYQAGSTPCNGVEGFNCYFPLQSYGFQPTNGVGYQPYRVVVLSFELLHAPATVCGPKKSTNLVKNKCVNFNFNGLTGTGVLTESNKKFLPFQQFGRDIADTTDAVRDPQTLEILDITPCSFGGVSVITPGTNTSNQVAVLYQGVNCTEVPVAIHADQLTPTWRVYSTGSNVFQTRAGCLIGAEHVNNSYECDIPIGAGICASYQTQTNSPRRARSVASQSIIAYTMSLGAENSVAYSNNSIAIPTNFTISVTTEILPVSMTKTSVDCTMYICGDSTECSNLLLQYGSFCTQLNRALTGIAVEQDKNTQEVFAQVKQIYKTPPIKDFGGFNFSQILPDPSKPSKRSFIEDLLFNKVTLADAGFIKQYGDCLGDIAARDLICAQKFNGLTVLPPLLTDEMIAQYTSALLAGTITSGWTFGAGAALQIPFAMQMAYRFNGIGVTQNVLYENQKLIANQFNSAIGKIQDSLSSTASALGKLQDVVNQNAQALNTLVKQLSSNCGAISSVLNDILSRLDKVEAEVQIDRLITCRLQSLQTYVTQQLIRAAEIRASANLAATKMSECVLGQSKRVDFCGKGYHLMSFPQSAPHGVVFLHVTYVPAQEKNFTTAPAICHDGKAHFPREGVFVSNGTHWFVTQRNFYEPQIITTDNTFVSGNCDVVIGIVNNTVYDPLQPELDSFKEELDKYFKNHTSPDVDLGDISGINASVVNIQKEIDRLNEVAKNLNESLIDLQELGKYEQYIK

SEQ ID NO: 2360 - protein, 1211 aa, Artificial Sequence
  SARS-CoV-2/Wuhan/HBCDC-HB-02/2020__EPI_ISL_412978 spike protein (1-1211)(F970C_G999C)
MFVFLVLLPLVSSQCVNLTTRTQLPPAYTNSFTRGVYYPDKVFRSSVLHSTQDLFLPFFSNVTWFHAIHVSGTNGTKRFDNPVLPFNDGVYFASTEKSNIIRGWIFGTTLDSKTQSLLIVNNATNVVIKVCEFQFCNDPFLGVYYHKNNKSWMESEFRVYSSANNCTFEYVSQPFLMDLEGKQGNFKNLREFVFKNIDGYFKIYSKHTPINLVRDLPQGFSALEPLVDLPIGINITRFQTLLALHRSYLTPGDSSSGWTAGAAAYYVGYLQPRTFLLKYNENGTITDAVDCALDPLSETKCTLKSFTVEKGIYQTSNFRVQPTESIVRFPNITNLCPFGEVFNATRFASVYAWNRKRISNCVADYSVLYNSASFSTFKCYGVSPTKLNDLCFTNVYADSFVIRGDEVRQIAPGQTGKIADYNYKLPDDFTGCVIAWNSNNLDSKVGGNYNYLYRLFRKSNLKPFERDISTEIYQAGSTPCNGVEGFNCYFPLQSYGFQPTNGVGYQPYRVVVLSFELLHAPATVCGPKKSTNLVKNKCVNFNFNGLTGTGVLTESNKKFLPFQQFGRDIADTTDAVRDPQTLEILDITPCSFGGVSVITPGTNTSNQVAVLYQDVNCTEVPVAIHADQLTPTWRVYSTGSNVFQTRAGCLIGAEHVNNSYECDIPIGAGICASYQTQTNSPRRARSVASQSIIAYTMSLGAENSVAYSNNSIAIPTNFTISVTTEILPVSMTKTSVDCTMYICGDSTECSNFLLQYGSFCTQLNRALTGIAVEQDKNTQEVFAQVKQIYKTPPIKDFGGFNFSQILPDPSKPSKRSFIEDLLFNKVTLADAGFIKQYGDCLGDIAARDLICAQKFNGLTVLPPLLTDEMIAQYTSALLAGTITSGWTFGAGAALQIPFAMQMAYRFNGIGVTQNVLYENQKLIANQFNSAIGKIQDSLSSTASALGKLQDVVNQNAQALNTLVKQLSSNCGAISSVLNDILSRLDKVEAEVQIDRLITCRLQSLQTYVTQQLIRAAEIRASANLAATKMSECVLGQSKRVDFCGKGYHLMSFPQSAPHGVVFLHVTYVPAQEKNFTTAPAICHDGKAHFPREGVFVSNGTHWFVTQRNFYEPQIITTDNTFVSGNCDVVIGIVNNTVYDPLQPELDSFKEELDKYFKNHTSPDVDLGDISGINASVVNIQKEIDRLNEVAKNLNESLIDLQELGKYEQYIK

SEQ ID NO: 2361 - protein, 1211 aa, Artificial Sequence
  SARS-CoV-2/Australia/QLD02/2020__EPI_ISL_407896 spike protein (1-1211)(F970C_G999C)
MFVFLVLLPLVSSQCVNLTTRTQLPPAYTNSFTRGVYYPDKVFRSSVLHSTQDLFLPFFSNVTWFHAIHVSGTNGTKRFDNPVLPFNDGVYFASTEKSNIIRGWIFGTTLDSKTQSLLIVNNATNVVIKVCEFQFCNDPFLGVYYHKNNKSWMESEFRVYSSANNCTFEYVSQPFLMDLEGKQGNFKNLREFVFKNIDGYFKIYSKHTPINLVRDLPQGFSALEPLVDLPIGINITRFQTLLALHRSYLTPGDSSSGWTAGAAAYYVGYLQPRTFLLKYNENGTITDAVDCALDPLSETKCTLKSFTVEKGIYQTSNFRVQPTESIVRFPNITNLCPFGEVFNATRFASVYAWNRKRISNCVADYSVLYNSASFSTFKCYGVSPTKLNDLCFTNVYADSFVIRGDEVRQIAPGQTGKIADYNYKLPDDFTGCVIAWNSNNLDSKVGGNYNYLYRLFRKSNLKPFERDISTEIYQAGSTPCNGVEGFNCYFPLQSYGFQPTNGVGYQPYRVVVLSFELLHAPATVCGPKKSTNLVKNKCVNFNFNGLTGTGVLTESNKKFLPFQQFGRDIADTTDAVRDPQTLEILDITPCSFGGVSVITPGTNTSNQVAVLYQDVNCTEVPVAIHADQLTPTWRVYSTGSNVFQTRAGCLIGAEHVNNSYECDIPIGAGICASYQTQTNSPRRARSVASQSIIAYTMSLGAENSVAYSNNSIAIPTNFTISVTTEILPVSMTKTSVDCTMYICGDSTECSNLLLQYGSFCTQLNRALTGIAVEQDKNTQEVFAQVKQIYKTPPIKDFGGFNFSQILPDPSKPSKRSFIEDLLFNKVTLADAGFIKQYGDCLGDIAARDLICAQKFNGLTVLPPLLTDEMIAQYTSALLAGTITSGWTFGAGAALQIPFAMQMAYRFNGIGVTQNVLYENQKLIANQFNSAIGKIQDSLSSTASALGKLQDVVNQNAQALNTLVKQLSSNCGAISSVLNDILSRLDKVEAEVQIDRLITCRLQSLQTYVTQQLIRAAEIRASANLAATKMSECVLGQSKRVDFCGKGYHLMSFPQSAPHGVVFLHVTYVPAQEKNFTTAPAICHDGKAHFPREGVFVSNGTHWFVTQRNFYEPQIITTDNTFVSGNCDVVIGIVNNTVYDPLQLELDSFKEELDKYFKNHTSPDVDLGDISGINASVVNIQKEIDRLNEVAKNLNESLIDLQELGKYEQYIK

SEQ ID NO: 2362 - protein, 1211 aa, Artificial Sequence
  SARS-CoV-2/India/1-31/2020__EPI_ISL_413523 spike protein (1-1211)(F970C_G999C)
MFVFLVLLPLVSSQCVNLTTRTQLPPAYTNSFTRGVYYPDKVFRSSVLHSTQDLFLPFFSNVTWFHAIHVSGTNGTKRFDNPVLPFNDGVYFASTEKSNIIRGWIFGTTLDSKTQSLLIVNNATNVVIKVCEFQFCNDPFLGVYYHKNNKSWMESEFRVYSSANNCTFEYVSQPFLMDLEGKQGNFKNLREFVFKNIDGYFKIYSKHTPINLVRDLPQGFSALEPLVDLPIGINITRFQTLLALHRSYLTPGDSSSGWTAGAAAYYVGYLQPRTFLLKYNENGTITDAVDCALDPLSETKCTLKSFTVEKGIYQTSNFRVQPTESIVRFPNITNLCPFGEVFNATRFASVYAWNRKRISNCVADYSVLYNSASFSTFKCYGVSPTKLNDLCFTNVYADSFVIRGDEVRQIAPGQTGKIADYNYKLPDDFTGCVIAWNSNNLDSKVGGNYNYLYRLFRKSNLKPFERDISTEIYQAGSTPCNGVEGFNCYFPLQSYGFQPTNGVGYQPYRVVVLSFELLHAPATVCGPKKSTNLVKNKCVNFNFNGLTGTGVLTESNKKFLPFQQFGRDIADTTDAVRDPQTLEILDITPCSFGGVSVITPGTNTSNQVAVLYQDVNCTEVPVAIHADQLTPTWRVYSTGSNVFQTRAGCLIGAEHVNNSYECDIPIGAGICASYQTQTNSPRRARSVASQSIIAYTMSLGAENSVAYSNNSIAIPTNFTISVTTEILPVSMTKTSVDCTMYICGDSTECSNLLLQYGSFCTQLNRALTGIAVEQDKNTQEVFAQVKQIYKTPPIKDFGGFNFSQILPDPSKPSKRSFIEDLLFNKVTLADAGFIKQYGDCLGDIAARDLICAQKFNGLTVLPPLLTDEMIAQYTSALLAGTITSGWTFGAGAALQIPFAMQMAYRFNGIGVTQNVLYENQKLIANQFNSVIGKIQDSLSSTASALGKLQDVVNQNAQALNTLVKQLSSNCGAISSVLNDILSRLDKVEAEVQIDRLITCRLQSLQTYVTQQLIRAAEIRASANLAATKMSECVLGQSKRVDFCGKGYHLMSFPQSAPHGVVFLHVTYVPAQEKNFTTAPAICHDGKAHFPREGVFVSNGTHWFVTQRNFYEPQIITTDNTFVSGNCDVVIGIVNNTVYDPLQPELDSFKEELDKYFKNHTSPDVDLGDISGINASVVNIQKEIDRLNEVAKNLNESLIDLQELGKYEQYIK

SEQ ID NO: 2363 - protein, 1211 aa, Artificial Sequence
  SARS-CoV-2/Guangdong/GD2020087-P0008/2020__EPI_ISL_413863 spike protein (1-1211)(F970C_G999C)
MFVFLVLLPLVSSQCVNLTTRTQLPPAYTNSFTRGVYYPDKVFRSSVLHSTQDLFLPFFSNVTWFHAIHVSGTNGTKRFDNPVLPFNDGVYFASTEKSNIIRGWIFGTTLDSKTQSLLIVNNATNVVIKVCEFQFCNDPFLGVYYHKNNKSWMESEFRVYSSANNCTFEYVSQPFLMDLEGKQGNFKNLREFVFKNIDGYFKIYSKHTPINLVRDLPQGFSALEPLVDLPIGINITRFQTLLALHRSYLTPGDSSSGWTAGAAAYYVGYLQPRTFLLKYNENGTITDAVDCALDPLSETKCTLKSFTVEKGIYQTSNFRVQPTESIVRFPNITNLCPFGEVFNATRFASVYAWNRKRISNCVADYSVLYNSASFSTFKCYGVSPTKLNDLCFTNVYADSFVIRGDEVREIAPGQTGKIADYNYKLPDDFTGCVIAWNSNNLDSKVGGNYNYLYRLFRKSNLKPFERDISTEIYQAGSTPCNGVEGFNCYFPLQSYGFQPTNGVGYQPYRVVVLSFELLHAPATVCGPKKSTNLVKNKCVNFNFNGLTGTGVLTESNKKFLPFQQFGRDIADTTDAVRDPQTLEILDITPCSFGGVSVITPGTNTSNQVAVLYQDVNCTEVPVAIHADQLTPTWRVYSTGSNVFQTRAGCLIGAEHVNNSYECDIPIGAGICASYQTQTNSPRRARSVASQSIIAYTMSLGAENSVAYSNNSIAIPTNFTISVTTEILPVSMTKTSVDCTMYICGDSTECSNLLLQYGSFCTQLNRALTGIAVEQDKNTQEVFAQVKQIYKTPPIKDFGGFNFSQILPDPSKPSKRSFIEDLLFNKVTLADAGFIKQYGDCLGDIAARDLICAQKFNGLTVLPPLLTDEMIAQYTSALLAGTITSGWTFGAGAALQIPFAMQMAYRFNGIGVTQNVLYENQKLIANQFNSAIGKIQDSLSSTASALGKLQDVVNQNAQALNTLVKQLSSNCGAISSVLNDILSRLDKVEAEVQIDRLITCRLQSLQTYVTQQLIRAAEIRASANLAATKMSECVLGQSKRVDFCGKGYHLMSFPQSAPHGVVFLHVTYVPAQEKNFTTAPAICHDGKAHFPREGVFVSNGTHWFVTQRNFYEPQIITTDNTFVSGNCDVVIGIVNNTVYDPLQPELDSFKEELDKYFKNHTSPDVDLGDISGINASVVNIQKEIDRLNEVAKNLNESLIDLQELGKYEQYIK

SEQ ID NO: 2364 - protein, 1211 aa, Artificial Sequence
  SARS-CoV-2/Sweden/01/2020__EPI_ISL_411951 spike protein (1-1211)(F970C_G999C)
MFVFLVLLPLVSSQCVNLTTRTQLPPAYTNSFTRGVYYPDKVFRSSVLHSTQDLFLPFFSNVTWFHAIHVSGTNGTKRFDNPVLPFNDGVYFASTEKSNIIRGWIFGTTLDSKTQSLLIVNNATNVVIKVCEFQFCNDPFLGVYYHKNNKSWMESEFRVYSSANNCTFEYVSQPFLMDLEGKQGNFKNLREFVFKNIDGYFKIYSKHTPINLVRDLPQGFSALEPLVDLPIGINITRFQTLLALHRSYLTPGDSSSGWTAGAAAYYVGYLQPRTFLLKYNENGTITDAVDCALDPLSETKCTLKSFTVEKGIYQTSNFRVQPTESIVRFPNITNLCPFGEVFNATRFASVYAWNRKRISNCVADYSVLYNSASFSTFKCYGVSPTKLNDLCFTNVYADSFVIRGDEVRQIAPGQTGKIADYNYKLPDDFTGCVIAWNSNNLDSKVGGNYNYLYRLFRKSNLKPFERDISTEIYQAGSTPCNGVEGFNCYFPLQSYGFQPTNGVGYQPYRVVVLSFELLHAPATVCGPKKSTNLVKNKCVNFNFNGLTGTGVLTESNKKFLPFQQFGRDIADTTDAVRDPQTLEILDITPCSFGGVSVITPGTNTSNQVAVLYQDVNCTEVPVAIHADQLTPTWRVYSTGSNVFQTRAGCLIGAEHVNNSYECDIPIGAGICASYQTQTNSPRRARSVASQSIIAYTMSLGAENSVAYSNNSIAIPTNFTISVTTEILPVSMTKTSVDCTMYICGDSTECSNLLLQYGSFCTQLNRALTGIAVEQDKNTQEVFAQVKQIYKTPPIKDCGGFNFSQILPDPSKPSKRSFIEDLLFNKVTLADAGFIKQYGDCLGDIAARDLICAQKFNGLTVLPPLLTDEMIAQYTSALLAGTITSGWTFGAGAALQIPFAMQMAYRFNGIGVTQNVLYENQKLIANQFNSAIGKIQDSLSSTASALGKLQDVVNQNAQALNTLVKQLSSNCGAISSVLNDILSRLDKVEAEVQIDRLITCRLQSLQTYVTQQLIRAAEIRASANLAATKMSECVLGQSKRVDFCGKGYHLMSFPQSAPHGVVFLHVTYVPAQEKNFTTAPAICHDGKAHFPREGVFVSNGTHWFVTQRNFYEPQIITTDNTFVSGNCDVVIGIVNNTVYDPLQPELDSFKEELDKYFKNHTSPDVDLGDISGINASVVNIQKEIDRLNEVAKNLNESLIDLQELGKYEQYIK

SEQ ID NO: 2365 - protein, 1211 aa, Artificial Sequence
  SARS-CoV-2/Tianmen/HBCDC-HB-07/2020__EPI_ISL_412983 spike protein (1-1211)(F970C_G999C)
MFVFLVLLPLVSSQCVNLTTRTQLPPAYTNSFTRGVYYPDKVFRSSVLHSTQDLFLPFFSNVTWFHAIHVSGTNGTKRFDNPVLPFNDGVYFASTEKSNIIRGWIFGTTLDSKTQSLLIVNNATNVVIKVCEFQFCNDPFLGVYYHKNNKSWMESEFRVYSSANNCTFEYVSQPFLMDLEGKQGNFKNLREFVFKNIDGYFKIYSKHTPINLVRDLPQGFSALEPLVDLPIGINITRFQTLLALHRSYLTPGDSSSGWTAGAAAYYVGYLQPRTFLLKYNENGTITDAVDCALDPLSETKCTLKSFTVEKGIYQTSNFRVQPTESIVRFPNITNLCPFGEVFNATRFASVYAWNRKRISNCVADYSVLYNSASFSTFKCYGVSPTKLNDLCFTNVYADSFVIRGDEVRQIAPGQTGKIADYNYKLPDDFTGCVIAWNSNNLDSKVGGNYNYLYRLFRKSNLKPFERDISTEIYQAGSTPCNGVEGFNCYFPLQSYGFQPTNGVGYQPYRVVVLSFELLHAPATVCGPKKSTNLVKNKCVNFNFNGLTGTGVLTESNKKFLPFQQFGRDIADTTDAVRDPQTLEILDITPCSFGGVSVITPGTNTSNQVAVLYQDLNCTEVPVAIHADQLTPTWRVYSTGSNVFQTRAGCLIGAEHVNNSYECDIPIGAGICASYQTQTNSPRRARSVASQSIIAYTMSLGAENSVAYSNNSIAIPTNFTISVTTEILPVSMTKTSVDCTMYICGDSTECSNLLLQYGSFCTQLNRALTGIAVEQDKNTQEVFAQVKQIYKTPPIKDFGGFNFSQILPDPSKPSKRSFIEDLLFNKVTLADAGFIKQYGDCLGDIAARDLICAQKFNGLTVLPPLLTDEMIAQYTSALLAGTITSGWTFGAGAALQIPFAMQMAYRFNGIGVTQNVLYENQKLIANQFNSAIGKIQDSLSSTASALGKLQDVVNQNAQALNTLVKQLSSNCGAISSVLNDILSRLDKVEAEVQIDRLITCRLQSLQTYVTQQLIRAAEIRASANLAATKMSECVLGQSKRVDFCGKGYHLMSFPQSAPHGVVFLHVTYVPAQEKNFTTAPAICHDGKAHFPREGVFVSNGTHWFVTQRNFYEPQIITTDNTFVSGNCDVVIGIVNNTVYDPLQPELDSFKEELDKYFKNHTSPDVDLGDISGINASVVNIQKEIDRLNEVAKNLNESLIDLQELGKYEQYIK

SEQ ID NO: 2366 - protein, 1211 aa, Artificial Sequence
  SARS-CoV-2/Hong Kong/case42_VM20002493/2020__EPI_ISL_414527 spike protein (1-1211)(F970C_G999C)
MFVFLVLLPLVSSQCVNLTTRTQLPPAYTNSFTRGVYYPDKVFRSSVLHSTQDLFLPFFSNVTWFHAIHVSGTNGTKRFDNPVLPFNDGVYFASTEKSNIIRGWIFGTTLDSKTQSLLIVNNATNVVIKVCEFQFCNDPFLGVYYHKNNKSWMESEFRVYSSANNCTFEYVSQPFLMDLEGKQGNFKNLREFVFKNIDGYFKIYSKHTPINLVRDLPQGFSALEPLVDLPIGINITRFQTLLALHRSYLTPGDSSSGWTAGAAAYYVGYLQPRTFLLKYNENGTITDAVDCALDPLSETKCTLKSFTVEKGIYQTSNFRVQPTESIVRFPNITNLCPFGEVFNATRFASVYAWNRKRISNCVADYSVLYNSASFSTFKCYGVSPTKLNDLCFTNVYADSFVIRGDEVRQIAPGQTGKIADYNYKLPDDFTGCVIAWNSNNLDSKVGGNYNYLYRLFRKSNLKPFERDISTEIYQAGSTPCNGVEGFNCYFPLQSYGFQPTNGVGYQPYRVVVLSFELLHAPATVCGPKKSTNLVKNKCVNFNFNGLTGTGVLTESNKKFLPFQQFGRDIADTTDAVRDPQTLEILDITPCSFGGVSVITPGTNTSNQVAVLYQDVNCTEVPVAIHADQLTPTWRVYSTGSNVFQTRAGCLIGAEHVNNSYECDIPIGAGICASYQTQTNSPRRARSVASQSIIAYTMSLGAENSVAYSNNSIAIPTNFAISVTTEILPVSMTKTSVDCTMYICGDSTECSNLLLQYGSFCTQLNRALTGIAVEQDKNTQEVFAQVKQIYKTPPIKDFGGFNFSQILPDPSKPSKRSFIEDLLFNKVTLADAGFIKQYGDCLGDIAARDLICAQKFNGLTVLPPLLTDEMIAQYTSALLAGTITSGWTFGAGAALQIPFAMQMAYRFNGIGVTQNVLYENQKLIANQFNSAIGKIQDSLSSTASALGKLQDVVNQNAQALNTLVKQLSSNCGAISSVLNDILSRLDKVEAEVQIDRLITCRLQSLQTYVTQQLIRAAEIRASANLAATKMSECVLGQSKRVDFCGKGYHLMSFPQSAPHGVVFLHVTYVPAQEKNFTTAPAICHDGKAHFPREGVFVSNGTHWFVTQRNFYEPQIITTDNTFVSGNCDVVIGIVNNTVYDPLQPELDSFKEELDKYFKNHTSPDVDLGDISGINASVVNIQKEIDRLNEVAKNLNESLIDLQELGKYEQYIK

SEQ ID NO: 2367 - protein, 1211 aa, Artificial Sequence
  SARS-CoV-2/USA/CruiseA-23/2020__EPI_ISL_414482 spike protein (1-1211)(F970C_G999C)
MFVFLVLLPLVSSQCVNLTTRTQLPPAYTNSFTRGVYYPDKVFRSSVLHSTQDLFLPFFSNVTWFHAIHVSGTNGTKRFDNPVLPFNDGVYFASTEKSNIIRGWIFGTTLDSKTQSLLIVNNATNVVIKVCEFQFCNDPFLGVYYHKNNKSWMESEFRVYSSANNCTFEYVSQPFLMDLEVKQGNFKNLREFVFKNIDGYFKIYSKHTPINLVRDLPQGFSALEPLVDLPIGINITRFQTLLALHRSYLTPGDSSSGWTAGAAAYYVGYLQPRTFLLKYNENGTITDAVDCALDPLSETKCTLKSFTVEKGIYQTSNFRVQPTESIVRFPNITNLCPFGEVFNATRFASVYAWNRKRISNCVADYSVLYNSASFSTFKCYGVSPTKLNDLCFTNVYADSFVIRGDEVRQIAPGQTGKIADYNYKLPDDFTGCVIAWNSNNLDSKVGGNYNYLYRLFRKSNLKPFERDISTEIYQAGSTPCNGVEGFNCYFPLQSYGFQPTNGVGYQPYRVVVLSFELLHAPATVCGPKKSTNLVKNKCVNFNFNGLTGTGVLTESNKKFLPFQQFGRDIADTTDAVRDPQTLEILDITPCSFGGVSVITPGTNTSNQVAVLYQDVNCTEVPVAIHADQLTPTWRVYSTGSNVFQTRAGCLIGAEHVNNSYECDIPIGAGICASYQTQTNSPRRARSVASQSIIAYTMSLGAENSVAYSNNSIAIPTNFTISVTTEILPVSMTKTSVDCTMYICGDSTECSNLLLQYGSFCTQLNRALTGIAVEQDKNTQEVFAQVKQIYKTPPIKDFGGFNFSQILPDPSKPSKRSFIEDLLFNKVTLADAGFIKQYGDCLGDIAARDLICAQKFNGLTVLPPLLTDEMIAQYTSALLAGTITSGWTFGAGAALQIPFAMQMAYRFNGIGVTQNVLYENQKLIANQFNSAIGKIQDSLSSTASALGKLQDVVNQNAQALNTLVKQLSSNCGAISSVLNDILSRLDKVEAEVQIDRLITCRLQSLQTYVTQQLIRAAEIRASANLAATKMSECVLGQSKRVDFCGKGYHLMSFPQSAPHGVVFLHVTYVPAQEKNFTTAPAICHDGKAHFPREGVFVSNGTHWFVTQRNFYEPQIITTDNTFVSGNCDVVIGIVNNTVYDPLQPELDSFKEELDKYFKNHTSPDVDLGDISGINASVVNIQKEIDRLNEVAKNLNESLIDLQELGKYEQYIK

SEQ ID NO: 2368 - protein, 1211 aa, Artificial Sequence
  SARS-CoV-2/Hong Kong/case85_VM20002868/2020__EPI_ISL_414519 spike protein (1-1211)(F970C_G999C)
MFVFLVLVPLVSSQCVNLTTRTQLPPAYTNSFTRGVYYPDKVFRSSVLHSTQDLFLPFFSNVTWFHAIHVSGTNGTKRFDNPVLPFNDGVYFASTEKSNIIRGWIFGTTLDSKTQSLLIVNNATNVVIKVCEFQFCNDPFLGVYYHKNNKSWMESEFRVYSSANNCTFEYVSQPFLMDLEGKQGNFKNLREFVFKNIDGYFKIYSKHTPINLVRDLPQGFSALEPLVDLPIGINITRFQTLLALHRSYLTPGDSSSGWTAGAAAYYVGYLQPRTFLLKYNENGTITDAVDCALDPLSETKCTLKSFTVEKGIYQTSNFRVQPTESIVRFPNITNLCPFGEVFNATRFASVYAWNRKRISNCVADYSVLYNSASFSTFKCYGVSPTKLNDLCFTNVYADSFVIRGDEVRQIAPGQTGKIADYNYKLPDDFTGCVIAWNSNNLDSKVGGNYNYLYRLFRKSNLKPFERDISTEIYQAGSTPCNGVEGFNCYFPLQSYGFQPTNGVGYQPYRVVVLSFELLHAPATVCGPKKSTNLVKNKCVNFNFNGLTGTGVLTESNKKFLPFQQFGRDIADTTDAVRDPQTLEILDITPCSFGGVSVITPGTNTSNQVAVLYQDVNCTEVPVAIHADQLTPTWRVYSTGSNVFQTRAGCLIGAEHVNNSYECDIPIGAGICASYQTQTNSPRRARSVASQSIIAYTMSLGAENSVAYSNNSIAIPTNFTISVTTEILPVSMTKTSVDCTMYICGDSTECSNLLLQYGSFCTQLNRALTGIAVEQDKNTQEVFAQVKQIYKTPPIKDFGGFNFSQILPDPSKPSKRSFIEDLLFNKVTLADAGFIKQYGDCLGDIAARDLICAQKFNGLTVLPPLLTDEMIAQYTSALLAGTITSGWTFGAGAALQIPFAMQMAYRFNGIGVTQNVLYENQKLIANQFNSAIGKIQDSLSSTASALGKLQDVVNQNAQALNTLVKQLSSNCGAISSVLNDILSRLDKVEAEVQIDRLITCRLQSLQTYVTQQLIRAAEIRASANLAATKMSECVLGQSKRVDFCGKGYHLMSFPQSAPHGVVFLHVTYVPAQEKNFTTAPAICHDGKAHFPREGVFVSNGTHWFVTQRNFYEPQIITTDNTFVSGNCDVVIGIVNNTVYDPLQPELDSFKEELDKYFKNHTSPDVDLGDISGINASVVNIQKEIDRLNEVAKNLNESLIDLQELGKYEQYIK

SEQ ID NO: 2369 - protein, 1211 aa, Artificial Sequence; identical to SEQ ID NO: 2359
  SARS-CoV-2/England/200990660/2020__EPI_ISL_414523 spike protein (1-1211)(F970C_G999C)

SEQ ID NO: 2370 - protein, 1211 aa, Artificial Sequence
  SARS-CoV-2/Australia/NSW09/2020__EPI_ISL_413595 spike protein (1-1211)(F970C_G999C)
MFVFLVLLPLVSSQCVNLTTRTQLPPAYTNSFTRGVYYPDKVFRSSVLHSTQDLFLPFFSNVTWFHAIHVSGTNGTKRFDNPVLPFNDGVYFASTEKSNIIRGWIFGTTLDSKTQSLLIVNNATNVVIKVCEFQFCNDPFLGVYYHKNNKSWMESEFRVYSSANNCTFEYVSQPFLMDLEGKQGNFKNLREFVFKNIDGYFKIYSKHTPINLVRDLPQGFSALEPLVDLPIGINITRFQTLLALHRSYLTPGDSSSGWTAGAAAYYVGYLQPRTFLLKYNENGTITDAVDCALDPLSETKCTLKSFTVEKGIYQTSNFRVQPTESIVRFPNITNLCPFGEVFNATRFASVYAWNRKRISNCVADYSVLYNSASFSTFKCYGVSPTKLNDLCFTNVYADSFVIRGDEVRQIAPGQTGKIADYNYKLPDDFTGCVIAWNSNNLDSKVGGNYNYLYRLFRKSNLKPFERDISTEIYQAGSTPCNGVEGFNCYFPLQSYGFQPTNGVGYQPYRVVVLSFELLHAPATVCGPKKSTNLVKNKCVNFNFNGLTGTGVLTESNKKFLPFQQFGRDIADTTDAVRDPQTLEILDITPCSFGGVSVITPGTNTSNQVAVLYQDVNCTEVPVAIHADQLTPTWRVYSTGSNVFQTRAGCLIGAEHVNNSYECDIPIGAGICASYQTQTNSPRRARSVASQSIIAYTMSLGAENSVAYSNNSIAIPTNFTISVTTEILPVSMTKTSVDCTMYICGDSTECSNLLLQYGSFCTQLNRALTGIAVEQDKNTQEVFAQVKQIYKTPPIKDFGGFNFSQILPDPSKPSKRSFIEDLLFNKVTLADAGFIKQYGDCLGDIAARDLICAQKFNGLTVLPPLLTDEMIAQYTSALLAGTITSGWTFGAGAALQIPFAMQMAYRFNGIGVTQNVLYENQKLIANQFNSAIGKIQDSLSFTASALGKLQDVVNQNAQALNTLVKQLSSNCGAISSVLNDILSRLDKVEAEVQIDRLITCRLQSLQTYVTQQLIRAAEIRASANLAATKMSECVLGQSKRVDFCGKGYHLMSFPQSAPHGVVFLHVTYVPAQEKNFTTAPAICHDGKAHFPREGVFVSNGTHWFVTQRNFYEPQIITTDNTFVSGNCDVVIGIVNNTVYDPLQPELDSFKEELDKYFKNHTSPDVDLGDISGINASVVNIQKEIDRLNEVAKNLNESLIDLQELGKYEQYIK

SEQ ID NO: 2371 - protein, 1211 aa, Artificial Sequence; identical to SEQ ID NO: 2351
  SARS-CoV-2/Australia/NSW10/2020__EPI_ISL_413596 spike protein (1-1211)(F970C_G999C)

SEQ ID NO: 2372 - protein, 1211 aa, Artificial Sequence
  SARS-CoV-2/Switzerland/1000477797/2020__EPI_ISL_413023 spike protein (1-1211)(F970C_G999C)
MFVFLVLLPLVSSQCVNLTTRTQLPPAYTNSFTRGVYYPDKVFRSSVLHSTQDLFLPFFSNVTWFHAIHVSGTNGTKRFDNPVLPFNDGVYFASTEKSNIIRGWIFGTTLDSKTQSLLIVNNATNVVIKVCEFQFCNDPFLGVYYHKNNKSWMESEFRVYSSANNCTFEYVSQPFLMDLEGKQGNFKNLREFVFKNIDGYFNIYSKHTPINLVRDLPQGFSALEPLVDLPIGINITRFQTLLALHRSYLTPGDSSSGWTAGAAAYYVGYLQPRTFLLKYNENGTITDAVDCALDPLSETKCTLKSFTVEKGIYQTSNFRVQPTESIVRFPNITNLCPFGEVFNATRFASVYAWNRKRISNCVADYSVLYNSASFSTFKCYGVSPTKLNDLCFTNVYADSFVIRGDEVRQIAPGQTGKIADYNYKLPDDFTGCVIAWNSNNLDSKVGGNYNYLYRLFRKSNLKPFERDISTEIYQAGSTPCNGVEGFNCYFPLQSYGFQPTNGVGYQPYRVVVLSFELLHAPATVCGPKKSTNLVKNKCVNFNFNGLTGTGVLTESNKKFLPFQQFGRDIADTTDAVRDPQTLEILDITPCSFGGVSVITPGTNTSNQVAVLYQGVNCTEVPVAIHADQLTPTWRVYSTGSNVFQTRAGCLIGAEHVNNSYECDIPIGAGICASYQTQTNSPRRARSVASQSIIAYTMSLGAENSVAYSNNSIAIPTNFTISVTTEILPVSMTKTSVDCTMYICGDSTECSNLLLQYGSFCTQLNRALTGIAVEQDKNTQEVFAQVKQIYKTPPIKDFGGFNFSQILPDPSKPSKRSFIEDLLFNKVTLADAGFIKQYGDCLGDIAARDLICAQKFNGLTVLPPLLTDEMIAQYTSALLAGTITSGWTFGAGAALQIPFAMQMAYRFNGIGVTQNVLYENQKLIANQFNSAIGKIQDSLSSTASALGKLQDVVNQNAQALNTLVKQLSSNCGAISSVLNDILSRLDKVEAEVQIDRLITCRLQSLQTYVTQQLIRAAEIRASANLAATKMSECVLGQSKRVDFCGKGYHLMSFPQSAPHGVVFLHVTYVPAQEKNFTTAPAICHDGKAHFPREGVFVSNGTHWFVTQRNFYEPQIITTDNTFVSGNCDVVIGIVNNTVYDPLQPELDSFKEELDKYFKNHTSPDVDLGDISGINASVVNIQKEIDRLNEVAKNLNESLIDLQELGKYEQYIK

SEQ ID NO: 2373 - protein, 1211 aa, Artificial Sequence
  SARS-CoV-2/Belgium/BA-02291/2020__EPI_ISL_415159 spike protein (1-1211)(F970C_G999C)
MFVFLVLLPLVSSQCVNLTTRTQLPPAYTNSFTRGVYYPDKVFRSSVLHSTQDLFLPFFSNVTWFHAIHVSGTNGTKRFDNPVLPFNDGVYFASTEKSNIIRGWIFGTTLDSKTQSLLIVNNATNVVIKVCEFQFCNDPFLGVYYHKNNKSWMESEFRVYSSANNCTFEYVSQPFLMDLEGKQGNFKNLREFVFKNIDGYFKIYSKHTPINLVRDLPQGFSALEPLVDLPIGINITRFQTLLALHRSYLTPGDSSSGWTAGAAAYYVGYLQPRTFLLKYNENGTITDAVDCALDPLSETKCTLKSFTVEKGIYQTSNFRVQPTESIVRFPNITNLCPFGEVFNATRFASVYAWNRKRISNCVADYSVLYNSASFSTFKCYGVSPTKLNDLCFTNVYADSFVIRGDEVRQIAPGQTGKIADYNYKLPDDFTGCVIAWNSNNLDSKVGGNYNYLYRLFRRSNLKPFERDISTEIYQAGSTPCNGVEGFNCYFPLQSYGFQPTNGVGYQPYRVVVLSFELLPAPATVCGPKKSTNLVKNKCVNFNFNGLTGTGVLTESNKKFLPFQQFGRDIADTTDAVRDPQTLEILDITPCSFGGVSVITPGTNTSNQVAVLYQGVNCTEVPVAIHADQLTPTWRVYSTGSNVFQTRAGCLIGAEHVNNSYECDIPIGAGICASYQTQTNSPRRARSVASQSIIAYTMSLGAENSVAYSNNSIAIPTNFTISVTTEILPVSMTKTSVDCTMYICGDSTECSNLLLQYGSFCTQLNRALTGIAVEQDKNTQEVFAQVKQIYKTPPIKDFGGFNFSQILPDPSKPSKRSFIEDLLFNKVTLADAGFIKQYGDCLGDIAARDLICAQKFNGLTVLPPLLTDEMIAQYTSALLAGTITSGWTFGAGAALQIPFAMQMAYRFNGIGVTQNVLYENQKLIANQFNSAIGKIQDSLSSAAPALGKLQDVVNQNAQALNTLVKQLSSNCGAISSVLNDILSRLDKVEAEVQIDRLITCRLQSLQTYVTQQLIRAAEIRASANLAATKMSECVLGQSKRVDFCGKGYHLMSFPQSAPHGVVFLHVTYVPAQEKNFTTAPAICHDGKAHFPREGVFVSNGTHWFVTQRNFYEPQIITTDNTFVSGNCDVVIGIVNNTVYDPLQPELDSFKEELDKYFKNHTSPDVDLGDISGINASVVNIQKEIDRLNEVAKNLNESLIDLQELGKYEQYIK

SEQ ID NO: 2374 - protein, 1211 aa, Artificial Sequence
  SARS-CoV-2/USA/WA8-UW5/2020__EPI_ISL_413486 spike protein (1-1211)(F970C_G999C)
MFVFLVLLPLVSSQCVNLTTRTQLPPAYTNSFTRGVYYPDKVFRSSVLHSTQDLFLPFFSNVTWFHAIHVSGTNGTKRFDNPVLPFNDGVYFASTEKSNIIRGWIFGTTLDSKTQSLLIVNNATNVVIKVCEFQFCNDPFLGVYYHKNNKSWMESEFRVYSSANNCTFEYVSQPFLMDLEGKQGNFKNLREFVFKNIDGYFKIYSKHTPINLVRDLPQGFSALEPLVDLPIGINITRFQTLLALHRSYLTPGDSSSGWTAGAAAYYVGYLQPRTFLLKYNENGTITDAVDCALDPLSETKCTLKSFTVEKGIYQTSNFRVQPTESIVRFPNITNLCPFGEVFNATRFASVYAWNRKRISNCVADYSVLYNSASFSTFKCYGVSPTKLNDLCFTNVYADSFVIRGDEVRQIAPGQTGKIADYNYKLPDDFTGCVIAWNSNNLDSKVGGNYNYLYRLFRKSNLKPFERDISTEIYQAGSTPCNGVEGFNCYFPLQSYGFQPTNGVGYQPYRVVVLSFELLHAPATVCGPKKSTNLVKNKCVNFNFNGLTGTGVLTESNKKFLPFQQFGRDIADTTDAVRDPQTLEILDITPCSFGGVSVITPGTNTSNQVAVLYQDVNCTEVPVAIHADQLTPTWRVYSTGSNVFQTRAGCLIGAEYVNNSYECDIPIGAGICASYQTQTNSPRRARSVASQSIIAYTMSLGAENSVAYSNNSIAIPTNFTISVTTEILPVSMTKTSVDCTMYICGDSTECSNLLLQYGSFCTQLNRALTGIAVEQDKNTQEVFAQVKQIYKTPPIKDFGGFNFSQILPDPSKPSKRSFIEDLLFNKVTLADAGFIKQYGDCLGDIAARDLICAQKFNGLTVLPPLLTDEMIAQYTSALLAGTITSGWTFGAGAALQIPFAMQMAYRFNGIGVTQNVLYENQKLIANQFNSAIGKIQDSLSSTASALGKLQDVVNQNAQALNTLVKQLSSNCGAISSVLNDILSRLDKVEAEVQIDRLITCRLQSLQTYVTQQLIRAAEIRASANLAATKMSECVLGQSKRVDFCGKGYHLMSFPQSAPHGVVFLHVTYVPAQEKNFTTAPAICHDGKAHFPREGVFVSNGTHWFVTQRNFYEPQIITTDNTFVSGNCDVVIGIVNNTVYDPLQPELDSFKEELDKYFKNHTSPDVDLGDISGINASVVNIQKEIDRLNEVAKNLNESLIDLQELGKYEQYIK

SEQ ID NO: 2375 - protein, 1211 aa, Artificial Sequence
  SARS-CoV-2/England/20102000506/2020__EPI_ISL_415147 spike protein (1-1211)(F970C_G999C)
MFVFLVLLPLVSSQCVNLTTRTQLPPAYTNSFTRGVYYPDKVFRSSVLHSTQDLFLPFFSNVTWFHAIHVSGTNGTKRFDNPVLPFNDGVYFASTEKSNIIRGWIFGTTLDSKTQSLLIVNNATNVVIKVCEFQFCNDPFLGVYYHKNNKSWMESEFRVYSSANNCTFEYVSQPFLMDLEGKQGNFKNLREFVFKNIDGYFKIYSKHTPINLVRDLPQGFSALEPLVDLPIGINITRFQTLLALHRSYLTPGDSSSGWTAGAAAYYVGYLQPRTFLLKYNENGTITDAVDCALDPLSETKCTLKSFTVEKGIYQTSNFRVQPTESIVRFPNITNLCPFGEVFNATRFASVYAWNRKRISNCVADYSVLYNSASFSTFKCYGVSPTKLNDLCFTNVYADSFVIRGDEVRQIAPGQTGKIADYNYKLPDDFTGCVIAWNSNNLDSKVGGNYNYLYRLFRKSNLKPFERDISTEIYQAGSTPCNGVEGFNCYFPLQSYGFQPTNGVGYQPYRVVVLSFELLHAPATVCGPKKSTNLVKNKCVNFNFNGLTGTGVLTESNKKFLPFQQFGRDIADTTDAVRDPQTLEILDITPCSFGGVSVITPGTNTSNQVAVLYQGVNCTEVPVAIHADQLTPTWRVYSTGSNVFQTRAGCLIGAEHVNNSYECDIPIGAGICASYQTQTNSPRRARSVASQSIIAYTMSLGAENSVAYSNNSIAIPTNFTISVTTEILPVSMTKTSVDCTMYICGDSTECSNLLLQYGSFCTQLNRALTGIAVEQDKNTQEVFAQVKQIYKTPPIKDFGGFNFSQILPDPSKPSKRSFIEDLLFNKVTLADAGFIKQYGYCLGDIAARDLICAQKFNGLTVLPPLLTDEMIAQYTSALLAGTITSGWTFGAGAALQIPFAMQMAYRFNGIGVTQNVLYENQKLIANQFNSAIGKIQDSLSSTASALGKLQDVVNQNAQALNTLVKQLSSNCGAISSVLNDILSRLDKVEAEVQIDRLITCRLQSLQTYVTQQLIRAAEIRASANLAATKMSECVLGQSKRVDFCGKGYHLMSFPQSAPHGVVFLHVTYVPAQEKNFTTAPAICHDGKAHFPREGVFVSNGTHWFVTQRNFYEPQIITTDNTFVSGNCDVVIGIVNNTVYDPLQPELDSFKEELDKYFKNHTSPDVDLGDISGINASVVNIQKEIDRLNEVAKNLNESLIDLQELGKYEQYIK

SEQ ID NO: 2376 - protein, 1211 aa, Artificial Sequence
  SARS-CoV-2/Belgium/VAG-03013/2020__EPI_ISL_415155 spike protein (1-1211)(F970C_G999C)
MFVFLVLLPLVSSQCVNLTTRTQLPPAYTNSFTRGVYYPDKVFRSSVLHSTQDLFLPFFSNVTWFHAIHVSGTNGTKRFDNPVLPFNDGVYFASTEKSNIIRGWIFGTTLDSKTQSLLIVNNATNVVIKVCEFQFCNDPFLGVYYHKNNKSWMESEFRVYSSANNCTFEYVSQPFLMDLEGKQGNFKNLREFVFKNIDGYFKIYSKHTPINLVRDLPQGFSALEPLVDLPIGINITRFQTLLALHRSYLTPGDSSSGWTAGAAAYYVGYLQPRTFLLKYNENGTITDAVDCALDPLSETKCTLKSFTVEKGIYQTSNFRVQPTESIVRFPNITNLCPFGEVFNATRFASVYAWNRKRISNCVADYSVLYNSASFSTFKCYGVSPTKLNDLCFTNVYADSFVIRGDEVRQIAPGQTGKIADYNYKLPDDFTGCVIAWNSNNLDSKVGGNYNYLYRLFRKSNLKPFERDISTEIYQAGSTPCNGVEGFNCYFPLQSYGFQPTNGVGYQPYRVVVLSFELLHAPATVCGPKKSTNLVKNKCVNFNFNGLTGTGVLTESNKKFLPFQQFGRDIADTTDAVRDPQTLEILDITPCSFGGVSVITPGTNTSNQVAVLYQGVNCTEVPVAIHADQLTPTWRVYSTGSNVFQTRAGCLIGAEHVNNSYECDIPIGAGICASYQTQTNSPRRARSVASQSIIAYTMSLGAENSVAYSNNSIAIPTNFTISVTTEILPVSMTKTSVDCTMYICGDSTECSNLLLQYGSFCTQLNRALTGIAVEQDKNTQEVFAQVKQIYKTPPIKDFGGFNFSQILPDPSKPSKRSFIEDLLFNKVTLADAGFIKQYGDCLGDIAARDLICAQKFNGLTVLPPLLTDEMIAQYTSALLAGTITSGWTFGAGAALQIPFAMQMAYRFNGIGVTQNVLYENQKLIANQFNSAIGKIQDSLSSTATALGKLQDVVNQNAQALNTLVKQLSSNCGAISSVLNDILSRLDKVEAEVQIDRLITCRLQSLQTYVTQQLIRAAEIRASANLAATKMSECVLGQSKRVDFCGKGYHLMSFPQSAPHGVVFLHVTYVPAQEKNFTTAPAICHDGKAHFPREGVFVSNGTHWFVTQRNFYEPQIITTDNTFVSGNCDVVIGIVNNTVYDPLQPELDSFKEELDKYFKNHTSPDVDLGDISGINASVVNIQKEIDRLNEVAKNLNESLIDLQELGKYEQYIK

SEQ ID NO: 2377 - protein, 1211 aa, Artificial Sequence
  SARS-CoV-2/Belgium/BC-03016/2020__EPI_ISL_415157 spike protein (1-1211)(F970C_G999C)
MFVFLVLLPLVSSQCVNLTTRTQLPPAYTNSFTRGVYYPDKVFRSSVLHSTQDLFLPFFSNVTWFHAIHVSGTNGTKRFDNPVLPFNDGVYFASTEKSNIIRGWIFGTTLDSKTQSLLIVNNATNVVIKVCEFQFCNDPFLGVYYHKNNKSWMESEFRVYSSANNCTFEYVSQPFLMDLEGKQGNFKNLREFVFKNIDGYFKIYSKHTPINLVRDLPQGFSALEPLVDLPIGINITRFQTLLALHRSYLTPGDSSSGWTAGAAAYYVGYLQPRTFLLKYNENGTITDAVDCALDPLSETKCTLKSFTVEKGIYQTSNFRVQPTESIVRFPNITNLCPFGEVFNATRFASVYAWNRKRISNCVADYSVLYNSASFSTFKCYGVSPTKLNDLCFTNVYADSFVIRGDEVRQIAPGQTGKIADYNYKLPDDFTGCVIAWNSNNLDSKVGGNYNYLYRLFRKSNLKPFERDISTEIYQAGSTPCNGVEGFNCYFPLQSYGFQPTNGVGYQPYRVVVLSFELLHAPATVCGPKKSTNLVKNKCVNFNFNGLTGTGVLTESNKKFLPFQQFGRDIADTTDAVRDPQTLEILDITPCSFGGVSVITPGTNTSNQVAVLYQGVNCTEVPVAIHADQLTPTWRVYSTGSNVFQTRAGCLIGAEHVNNSYECDIPIGAGICASYQTQTNSPRRARSVASQSIIAYTMSLGAENSVAYSNNSIAIPTNFTISVTTEILPVSMTKTSVDCTMYICGDSTECSNLLLQYGSFCTQLNRALTGIAVEQDKNTQEVFAQVKQIYKTPPIKDFGGFNFSQILPDPSKPSKRSFIEDLLFNKVTLADAGFIKQYGDCLGDIAARDLICAQKFNGLTVLPPLLTDEMIAQYTSALLAGTITSGWTFGAGAALQIPFAMQMAYRFNGIGVTQNVLYENQKLIANQFNSAIGKIQDSLSSTAPALGKLQDVVNQNAQALNTLVKQLSSNCGAISSVLNDILSRLDKVEAEVQIDRLITCRLQSLQTYVTQQLIRAAEIRASANLAATKMSECVLGQSKRVDFCGKGYHLMSFPQSAPHGVVFLHVTYVPAQEKNFTTAPAICHDGKAHFPREGVFVSNGTHWFVTQRNFYEPQIITTDNTFVSGNCDVVIGIVNNTVYDPLQPELDSFKEELDKYFKNHTSPDVDLGDISGINASVVNIQKEIDRLNEVAKNLNESLIDLQELGKYEQYIK

SEQ ID NO: 2378 - protein, 1211 aa, Artificial Sequence
  SARS-CoV-2/Germany/BavPat3/2020__EPI_ISL_414521 spike protein (1-1211)(F970C_G999C)
MFVFLVLLPLVSSQCVNLTTRTQLPPAYTNSFTRGVYYPDKVFRSSVLHSTQDLFLPFFSNVTWFHAIHVSGTNGTKRFDNPVLPFNDGVYFASTEKSNIIRGWIFGTTLDSKTQSLLIVNNATNVVIKVCEFQFCNDPFLGVYYHKNNKSWMESEFRVYSSANNCTFEYVSQPFLMDLEGKQGNFKNLREFVFKNIDGYFKIYSKHTPINLVRDLPQGFSALEPLVDLPIGINITRFQTLLALHRSYLTPGDSSSGWTAGAAAYYVGYLQPRTFLLKYNENGTITDAVDCALDPLSETKCTLKSFTVEKGIYQTSNFRVQPTESIVRFPNITNLCPFGEVFNATRFASVYAWNRKRISNCVADYSVLYNSASFSTFKCYGVSPTKLNDLCFTNVYADSFVIRGDEVRQIAPGQTGKIADYNYKLPDDFTGCVIAWNSNNLDSKVGGNYNYLYRLFRKSNLKPFERDISTEIYQAGSTPCNGVEGFNCYFPLQSYGFQPTNGVGYQPYRVVVLSFELLHAPATVCGPKKSTNLVKNKCVNFNFNGLTGTGVLTESNKKFLPFQQFGRDIADTTDAVRDPQTLEILDITPCSFGGVSVITPGTNTSNQVAVLYQDVNCTEVPVAIHADQLTPTWRVYSTGSNVFQTRAGCLIGAEHVNNSYECDIPIGAGICASYQTQTNSPRRARSVASQSIIAYTMSLGAENSVAYSNNSIAIPTNFTISVTTEILPVSMTKTSVDCTMYICGDSTECSNLLLQYGSFCTQLNRALTGIAVEQDKNTQQVFAQVKQIYKTPPIKDFGGFNFSQILPDPSKPSKRSFIEDLLFNKVTLADAGFIKQYGDCLGDIAARDLICAQKFNGLTVLPPLLTDEMIAQYTSALLAGTITSGWTFGAGAALQIPFAMQMAYRFNGIGVTQNVLYENQKLIANQFNSAIGKIQDSLSSTASALGKLQDVVNQNAQALNTLVKQLSSNCGAISSVLNDILSRLDKVEAEVQIDRLITCRLQSLQTYVTQQLIRAAEIRASANLAATKMSECVLGQSKRVDFCGKGYHLMSFPQSAPHGVVFLHVTYVPAQEKNFTTAPAICHDGKAHFPREGVFVSNGTHWFVTQRNFYEPQIITTDNTFVSGNCDVVIGIVNNTVYDPLQPELDSFKEELDKYFKNHTSPDVDLGDISGINASVVNIQKEIDRLNEVAKNLNESLIDLQELGKYEQYIK

SEQ ID NO: 2379 - protein, 1211 aa, Artificial Sequence
  SARS-CoV-2/France/HF1805/2020__EPI_ISL_414628 spike protein (1-1211)(F970C_G999C)
MFVFLVLLPLVSSQCVNLTTRTQLPPAYTNSFTRGVYYPDKVFRSSVLHSTQDLFLPFFSNVTWFHAIHVSGTNGTKRFDNPVLPFNDGVYFASTEKSNIIRGWIFGTTLDSKTQSLLIVNNATNVVIKVCEFQFCNDPFLGVYYHKNNKSWMESEFRVYSSANNCTFEYVSQPFLMDLEGKQGNFKNLREFVFKNIDGYFKIYSKHTPINLVRDLPQGFSALEPLVDLPIGINITRFQTLLALHRSYLTPGDSSSGWTAGAAAYYVGYLQPRTFLLKYNENGTITDAVDCALDPLSETKCTLKSFTVEKGIYQTSNFRVQPTESIVRFPNITNLCPFGEVFNATRFASVYAWNRKRISNCVADYSVLYNSASFSTFKCYGVSPTKLNDLCFTNVYADSFVIRGDEVRQIAPGQTGKIADYNYKLPDDFTGCVIAWNSNNLDSKVGGNYNYLYRLFRKSNLKPFERDISTEIYQAGSTPCNGVEGFNCYFPLQSYGFQPTNGVGYQPYRVVVLSFELLHAPATVCGPKKSTNLVKNKCVNFNFNGLTGTGVLTESNKKFLPFQQFGRDIADTTDAVRDPQTLEILDITPCSFGGVSVITPGTNTSNQVAVLYQGVNCTEVPVAIHADQLTPTWRVYSTGSNVFQTRAGCLIGAEHVNNSYECDIPIGAGICASYQTQTNSPRRARSVASQSIIAYTMSLGAENSVAYSNNSIAIPTNFTISVTTEILPVSMTKTSVDCTMYICGDSTECSNLLLQYGSFCTQLNRALTGIAVEQDKNTQEVFAQVKQIYKTPPIKDFGGFNFSQILPDPSKPSKRSFIEDLLFNKVTLADAGFIKQYGDCLGDIAARDLICAQKFNGLTVLPPLLTDEMIAQYTSALLAGTITSGWTFGAGAALQIPFAMQMAYRFNGIGVTQNVLYENQKLIANQFNSAIGKIQDSLSSTASALGKLQDVVNQNAQALNTLVKQLSSNCGAISSVLNDILSRLDKVEAEVQIDRLITCRLQSLQTYVTQQLIRAAEIRASANLAATKMSECVLGQSKRVDFCGKGYHLMSFPQSAPHGVVFLHVTYVPAQEKNFTTAPAICHDGKAHFPREGVFVSNGTHWFVTQRNFYEPQIITTDNTFVSGNCDVVIGVVNNTVYDPLQPELDSFKEELDKYFKNHTSPDVDLGDISGINASVVNIQKEIDRLNEVAKNLNESLIDLQELGKYEQYIK

SEQ ID NO: 2380 - protein, 1211 aa, Artificial Sequence
  SARS-CoV-2/Netherlands/ZuidHolland_9/2020__EPI_ISL_414445 spike protein (1-1211)(F970C_G999C)
MFVFLVLLPLVSSQCVNLTTRTQLPPAYTNSFTRGVYYPDKVFRSSVLHSTQDLFLPFFSNVTWFHAIHVSGTNGTKRFDNPVLPFNDGVYFASTEKSNIIRGWIFGTTLDSKTQSLLIVNNATNVVIKVCEFQFCNDPFLGVYYHKNNKSWMESEFRVYSSANNCTFEYVSQPFLMDLEGKQGNFKNLREFVFKNIDGYFKIYSKHTPINLVRDLPQGFSALEPLVDLPIGINITRFQTLLALHRSYLTPGDSSSGWTAGAAAYYVGYLQPRTFLLKYNENGTITDAVDCALDPLSETKCTLKSFTVEKGIYQTSNFRVQPTESIVRFPNITNLCPFGEVFNATRFASVYAWNRKRISNCVADYSVLYNSASFSTFKCYGVSPTKLNDLCFTNVYADSFVIRGDEVRQIAPGQTGKIADYNYKLPDDFTGCVIAWNSNNLDSKVGGNYNYLYRLFRKSNLKPFERDISTEIYQAGSTPCNGVEGFNCYFPLQSYGFQPTNGVGYQPYRVVVLSFELLHAPATVCGPKKSTNLVKNKCVNFNFNGLTGTGVLTESNKKFLPFQQFGRDIADTTDAVRDPQTLEILDITPCSFGGVSVITPGTNTSNQVAVLYQGVNCTEVPVAIHADQLTPTWRVYSTGSNVFQTRAGCLIGAEHVNNSYECDIPIGAGICASYQTQTNSPRRARSVASQSIIAYTMSLGAENSVAYSNNSIAIPTNFTISVTTEILPVSMTKTSVDCTMYICGDSTECSNLLLQYGSFCTQLNRALTGIAVEQDKNTQEVFAQVKQIYKTPPIKDFGGFNFSQILPDPSKPSKRSFIEDLLFNKVTLADAGFIKQYGDCLGDIAARDLICVQKFNGLTVLPPLLTDEMIAQYTSALLAGTITSGWTFGAGAALQIPFAMQMAYRFNGIGVTQNVLYENQKLIANQFNSAIGKIQDSLSSTASALGKLQDVVNQNAQALNTLVKQLSSNCGAISSVLNDILSRLDKVEAEVQIDRLITCRLQSLQTYVTQQLIRAAEIRASANLAATKMSECVLGQSKRVDFCGKGYHLMSFPQSAPHGVVFLHVTYVPAQEKNFTTAPAICHDGKAHFPREGVFVSNGTHWFVTQRNFYEPQIITTDNTFVSGNCDVVIGIVNNTVYDPLQPELDSFKEELDKYFKNHTSPDVDLGDISGINASVVNIQKEIDRLNEVAKNLNESLIDLQELGKYEQYIK

SEQ ID NO: 2381 - protein, 1211 aa, Artificial Sequence
  SARS-CoV-2/Finland/FIN03032020A/2020__EPI_ISL_413602 spike protein (1-1211)(F970C_G999C)
MFVFLVLLPLVSSQCVNLTTRTQLPPAYTNSFTRGVYYPDKVFRSSVLHSTQDLFLPFFSNVTWFHAIHVSGTNGTKRFDNPVLPFNDGVYFASTEKSNIIRGWIFGTTLDSKTQSLLIVNNATNVVIKVCEFQFCNDPFLGVYYHKNNKSWMESEFRVYSSANNCTFEYVSQPFLMDLEGKQGNFKNLREFVFKNIDGYFKIYSKHTPINLVRDLPQGFSALEPLVDLPIGINITRFQTLLALHRSYLTPGDSSSGWTAGAAAYYVGYLQPRTFLLKYNENGTITDAVDCALDPLSETKCTLKSFTVEKGIYQTSNFRVQPTESIVRFPNITNLCPFGEVFNATRFASVYAWNRKRISNCVADYSVLYNSASFSTFKCYGVSPTKLNDLCFTNVYADSFVIRGDEVRQIAPGQTGKIADYNYKLPDDFTGCVISWNSNNLDSKVGGNYNYLYRLFRKSNLKPFERDISTEIYQAGSTPCNGVEGFNCYFPLQSYGFQPTNGVGYQPYRVVVLSFELLHAPATVCGPKKSTNLVKNKCVNFNFNGLTGTGVLTESNKKFLPFQQFGRDIADTTDAVRDPQTLEILDITPCSFGGVSVITPGTNTSNQVAVLYQGVNCTEVPVAIHADQLTPTWRVYSTGSNVFQTRAGCLIGAEHVNNSYECDIPIGAGICASYQTQTNSPRRARSVASQSIIAYTMSLGAENSVAYSNNSIAIPTNFTISVTTEILPVSMTKTSVDCTMYICGDSTECSNLLLQYGSFCTQLNRALTGIAVEQDKNTQEVFAQVKQIYKTPPIKDFGGFNFSQILPDPSKPSKRSFIEDLLFNKVTLADAGFIKQYGDCLGDIAARDLICAQKFNGLTVLPPLLTDEMIAQYTSALLAGTITSGWTFGAGAALQIPFAMQMAYRFNGIGVTQNVLYENQKLIANQFNSAIGKIQDSLSSTASALGKLQDVVNQNAQALNTLVKQLSSNCGAISSVLNDILSRLDKVEAEVQIDRLITCRLQSLQTYVTQQLIRAAEIRASANLAATKMSECVLGQSKRVDFCGKGYHLMSFPQSAPHGVVFLHVTYVPAQEKNFTTAPAICHDGKAHFPREGVFVSNGTHWFVTQRNFYEPQIITTDNTFVSGNCDVVIGIVNNTVYDPLQPELDSFKEELDKYFKNHTSPDVDLGDISGINASVVNIQKEIDRLNEVAKNLNESLIDLQELGKYEQYIK

SEQ ID NO: 2382 - protein, 1211 aa, Artificial Sequence
  SARS-CoV-2/France/GE1977/2020__EPI_ISL_414632 spike protein (1-1211)(F970C_G999C)
MFVFLVLLPLVSSQCVNLTTRTQLPPAYTNSFTRGVYYPDKVFRSSVLHSTQDLFLPFFSNVTWFHAIHVSGTNGTKRFDNPVLPFNDGVYFASTEKSNIIRGWIFGTTLDSKTQSLLIVNNATNVVIKVCEFQFCNDPFLGVYYHKNNKSWMESEFRVYSSANNCTFEYVSQPFLMDLEGKQGNFKNLREFVFKNIDGYFKIYSKHTPINLVRDLPQGFSALEPLVDLPIGINITRFQTLLALHRSYLTPGDSSSGWTAGAAAYYVGYLQPRTFLLKYNENGTITDAVDCALDPLSETKCTLKSFTVEKGIYQTSNFRVQPTESIVRFPNITNLCPFGEVFNATRFASVYAWNRKRISNCVADYSVLYNSASFSTFKCYGVSPTKLNDLCFTNVYADSFVIRGDEVRQIAPGQTGKIADYNYKLPDDFTGCVIAWNSNNLDSKVGGNYNYLYRLFRKSNLKPFERDISTEIYQAGSTPCNGVEGFNCYFPLQSYGFQPTNGVGYQPYRVVVLSFELLHAPATVCGPKKSTNLVKNKCVNFNFNGLTGTGVLTESNKKFLPFQQFGRDIADTTDAVRDPQTLEILDITPCSFGGVSVITPGTNTSNQVAVLYQGVNCTEVPVAIHADQLTPTWRVYSTGSNVFQTRAGCLIGAEHVNNSYECDIPIGAGICASYQTQTNSPRRARSVASQSIIAYTMSLGAENSVAYSNNSIAIPTNFTISVTTEILPVSMTKTSVDCTMYICGDSTECSNLLLQYGSFCTQLNRALTGIAVEQDKNTQEVFAQVKQIYKTPPIKDFGGFNFSQILPDPSKPSKRSFIEDLLFNKVTLADAGFIKQYGDCLGDIAARDLICAQKFNGLTVLPPLLTDEMIAQYTSALLAGTITSGWTFGAGAALQIPFAMQMAYRFNGIGVTQNVLYENQKLIANQFNSAIGKIQDSLFSTASALGKLQDVVNQNAQALNTLVKQLSSNCGAISSVLNDILSRLDKVEAEVQIDRLITCRLQSLQTYVTQQLIRAAEIRASANLAATKMSECVLGQSKRVDFCGKGYHLMSFPQSAPHGVVFLHVTYVPAQEKNFTTAPAICHDGKAHFPREGVFVSNGTHWFVTQRNFYEPQIITTDNTFVSGNCDVVIGIVNNTVYDPLQPELDSFKEELDKYFKNHTSPDVDLGDISGINASVVNIQKEIDRLNEVAKNLNESLIDLQELGKYEQYIK

SEQ ID NO: 2383 - protein, 1211 aa, Artificial Sequence
  SARS-CoV-2/Finland/FIN-313/2020__EPI_ISL_414641 spike protein (1-1211)(F970C_G999C)
MFVFLVLLPLVSSQCVNLTTRTQLPPAYTNSFTRGVYYPDKVFRSSVLHSTQDLFLPFFSNVTWFHAIHVSGTNGTKRFDNPVLPFNDGVYFASTEKSNIIRGWIFGTTLDSKTQSLLIVNNATNVVIKVCEFQFCNDPFLGVYYHKNNKSWMESEFRVYSSANNCTFEYVSQPFLMDLEGKQGNFKNLREFVFKNIDGYFKIYSKHTPINLVRDLPQGFSALEPLVDLPIGINITRFKTLLALHRSYLTPGDSSSGWTAGAAAYYVGYLQPRTFLLKYNENGTITDAVDCALDPLSETKCTLKSFTVEKGIYQTSNFRVQPTESIVRFPNITNLCPFGEVFNATRFASVYAWNRKRISNCVADYSVLYNSASFSTFKCYGVSPTKLNDLCFTNVYADSFVIRGDEVRQIAPGQTGKIADYNYKLPDDFTGCVIAWNSNNLDSKVGGNYNYLYRLFRKSNLKPFERDISTEIYQAGSTPCNGVEGFNCYFPLQSYGFQPTNGVGYQPYRVVVLSFELLHAPATVCGPKKSTNLVKNKCVNFNFNGLTGTGVLTESNKKFLPFQQFGRDIADTTDAVRDPQTLEILDITPCSFGGVSVITPGTNTSNQVAVLYQGVNCTEVPVAIHADQLTPTWRVYSTGSNVFQTRAGCLIGAEHVNNSYECDIPIGAGICASYQTQTNSPRRARSVASQSIIAYTMSLGAENSVAYSNNSIAIPTNFTISVTTEILPVSMTKTSVDCTMYICGDSTECSNLLLQYGSFCTQLNRALTGIAVEQDKNTQEVFAQVKQIYKTPPIKDFGGFNFSQILPDPSKPSKRSFIEDLLFNKVTLADAGFIKQYGDCLGDIAARDLICAQKFNGLTVLPPLLTDEMIAQYTSALLAGTITSGWTFGAGAALQIPFAMQMAYRFNGIGVTQNVLYENQKLIANQFNSAIGKIQDSLSSTASALGKLQDVVNQNAQALNTLVKQLSSNCGAISSVLNDILSRLDKVEAEVQIDRLITCRLQSLQTYVTQQLIRAAEIRASANLAATKMSECVLGQSKRVDFCGKGYHLMSFPQSAPHGVVFLHVTYVPAQEKNFTTAPAICHDGKAHFPREGVFVSNGTHWFVTQRNFYEPQIITTDNTFVSGNCDVVIGIVNNTVYDPLQPELDSFKEELDKYFKNHTSPDVDLGDISGINASVVNIQKEIDRLNEVAKNLNESLIDLQELGKYEQYIK

SEQ ID NO: 2384 - protein, 1211 aa, Artificial Sequence
  SARS-CoV-2/Netherlands/ZuidHolland_2/2020__EPI_ISL_414556 spike protein (1-1211)(F970C_G999C)
MFVFLVLLPLVSSQCVNLTTRTQLPPAYTNSFTRGVYYPDKVFRSSVLHSTQDLFLPFFSNVTWFHAIHVSGTNGTKRFDNPVLPFNDGVYFASTEKSNIIRGWIFGTTLDSKTQSLLIVNNATNVVIKVCEFQFCNDPFLGVYYHKNNKSWMESEFRVYSSANNCTFEYVSQPFLMDLEGKQGNFKNLREFVFKNIDGYFKIYSKHTPINLVRDLPQGFSALEPLVDLPIGINITRFQTLLALHRSYLTPGDSSSGWTAGAAAYYVGYLQPRTFLLKYNENGTITDAVDCALDPLSETKCTLKSFTVEKGIYQTSNFRVQPTESIVRFPNITNLCPFGEVFNATRFASVYAWNRKRISNCVADYSVLYNSASFSTFKCYGVSPTKLNDLCFTNVYADSFVIRGDEVRQIAPGQTGKIADYNYKLPDDFTGCVIAWNSNNLDSKVGGNYNYLYRLFRKSNLKPFERDISTEIYQAGSTPCNGVEGFNCYFPLQSYGFQPTNGVGYQPYRVVVLSFELLHAPATVCGPKKSTNLVKNKCVNFNFNGLTGTGVLTESNKKFLPFQQFGRDIADTTDAVRDPQTLEILDITPCSFGGVSVITPGTNTSNQVAVLYQGVNCTEVPVAIHADQLTPTWRVYSTGSNVFQTRAGCLIGAEHVNNSYECDIPIGAGICASYQTQTNSPRRARSVASQSIIAYTMSLGAENSVAYSNNSIAIPTNFTISVTTEILPVSMTKTSVDCTMYICGDSTECSNLLLQYGSFCTQLNRALTGIALEQDKNTQEVFAQVKQIYKTPPIKDFGGFNFSQILPDPSKPSKRSFIEDLLFNKVTLADAGFIKQYGDCLGDIAARDLICAQKFNGLTVLPPLLTDEMIAQYTSALLAGTITSGWTFGAGAALQIPFAMQMAYRFNGIGVTQNVLYENQKLIANQFNSAIGKIQDSLSSTASALGKLQDVVNQNAQALNTLVKQLSSNCGAISSVLNDILSRLDKVEAEVQIDRLITCRLQSLQTYVTQQLIRAAEIRASANLAATKMSECVLGQSKRVDFCGKGYHLMSFPQSAPHGVVFLHVTYVPAQEKNFTTAPAICHDGKAHFPREGVFVSNGTHWFVTQRNFYEPQIITTDNTFVSGNCDVVIGIVNNTVYDPLQPELDSFKEELDKYFKNHTSPDVDLGDISGINASVVNIQKEIDRLNEVAKNLNESLIDLQELGKYEQYIK

SEQ ID NO: 2385 - protein, 1211 aa, Artificial Sequence
  SARS-CoV-2/USA/WA-UW31/2020__EPI_ISL_414618 spike protein (1-1211)(F970C_G999C)
MFVFLVLLPLVSSQCVNLTTRTQLPPAYTNSFTRGVYYPDKVFRSSVLHSTQDLFLPFFSNVTWFHAIHVSGTNGTKRFDNPVLPFNDGVYFASTEKSNIIRGWIFGTTLDSKTQSLLIVNNATNVVIKVCEFQFCNDPFLGVYYHKNNKSWMESEFRVYSSANNCTFEYVSQPFLMDLEGKQGNFKNLREFVFKNIDGYFKIYSKHTPINLVRDLPQGFSALEPLVDLPIGINITRFQTLLALHRSYLTPGDSSSGWTAGAAAYYVGYLQPRTFLLKYNENGTITDAVDCALDPLSETKCTLKSFTVEKGIYQTSNFRVQPTESIVRFPNITNLCPFGEVFNATRFASVYAWNRKRISNCVADYSVLYNSASFSTFKCYGVSPTKLNDLCFTNVYADSFVIRGDEVRQIAPGQTGKIADYNYKLPDDFTGCVIAWNSNNLDSKVGGNYNYLYRLFRKSNLKPFERDISTEIYQAGSTPCNGAEGFNCYFPLQSYGFQPTNGVGYQPYRVVVLSFELLHAPATVCGPKKSTNLVKNKCVNFNFNGLTGTGVLTESNKKFLPFQQFGRDIADTTDAVRDPQTLEILDITPCSFGGVSVITPGTNTSNQVAVLYQDVNCTEVPVAIHADQLTPTWRVYSTGSNVFQTRAGCLIGAEHVNNSYECDIPIGAGICASYQTQTNSPRRARSVASQSIIAYTMSLGAENSVAYSNNSIAIPTNFTISVTTEILPVSMTKTSVDCTMYICGDSTECSNLLLQYGSFCTQLNRALTGIAVEQDKNTQEVFAQVKQIYKTPPIKDFGGFNFSQILPDPSKPSKRSFIEDLLFNKVTLADAGFIKQYGDCLGDIAARDLICAQKFNGLTVLPPLLTDEMIAQYTSALLAGTITSGWTFGAGAALQIPFAMQMAYRFNGIGVTQNVLYENQKLIANQFNSAIGKIQDSLSSTASALGKLQDVVNQNAQALNTLVKQLSSNCGAISSVLNDILSRLDKVEAEVQIDRLITCRLQSLQTYVTQQLIRAAEIRASANLAATKMSECVLGQSKRVDFCGKGYHLMSFPQSAPHGVVFLHVTYVPAQEKNFTTAPAICHDGKAHFPREGVFVSNGTHWFVTQRNFYEPQIITTDNTFVSGNCDVVIGIVNNTVYDPLQPELDSFKEELDKYFKNHTSPDVDLGDISGINASVVNIQKEIDRLNEVAKNLNESLIDLQELGKYEQYIK

SEQ ID NO: 2386 - protein, 1211 aa, Artificial Sequence
  SARS-CoV-2/South Korea/SNU01/2020__EPI_ISL_411929 spike protein (1-1211)(F970C_G999C)
MFVFLVLLPLVSSQCVNLTTRTQLPPAYTNSFTRGVYYPDKVFRSSVLHSTQDLFLPFFSNVTWFHAIHVSGTNGTKRFDNPVLPFNDGVYFASTEKSNIIRGWIFGTTLDSKTQSLLIVNNATNVVIKVCEFQFCNDPFLGVYYHKNNKSWMESEFRVYSSANNCTFEYVSQPFLMDLEGKQGNFKNLREFVFKNIDGYFKIYSKHTPINLVRDLPQGFWALEPLVDLPIGINITRFQTLLALHRSYLTPGDSSSGWTAGAAAYYVGYLQPRTFLLKYNENGTITDAVDCALDPLSETKCTLKSFTVEKGIYQTSNFRVQPTESIVRFPNITNLCPFGEVFNATRFASVYAWNRKRISNCVADYSVLYNSASFSTFKCYGVSPTKLNDLCFTNVYADSFVIRGDEVRQIAPGQTGKIADYNYKLPDDFTGCVIAWNSNNLDSKVGGNYNYLYRLFRKSNLKPFERDISTEIYQAGSTPCNGVEGFNCYFPLQSYGFQPTNGVGYQPYRVVVLSFELLHAPATVCGPKKSTNLVKNKCVNFNFNGLTGTGVLTESNKKFLPFQQFGRDIADTTDAVRDPQTLEILDITPCSFGGVSVITPGTNTSNQVAVLYQDVNCTEVPVAIHADQLTPTWRVYSTGSNVFQTRAGCLIGAEHVNNSYECDIPIGAGICASYQTQTNSPRRARSVASQSIIAYTMSLGAENSVAYSNNSIAIPTNFTISVTTEILPVSMTKTSVDCTMYICGDSTECSNLLLQYGSFCTQLNRALTGIAVEQDKNTQEVFAQVKQIYKTPPIKDFGGFNFSQILPDPSKPSKRSFIEDLLFNKVTLADAGFIKQYGDCLGDIAARDLICAQKFNGLTVLPPLLTDEMIAQYTSALLAGTITSGWTFGAGAALQIPFAMQMAYRFNGIGVTQNVLYENQKLIANQFNSAIGKIQDSLSSTASALGKLQDVVNQNAQALNTLVKQLSSNCGAISSVLNDILSRLDKVEAEVQIDRLITCRLQSLQTYVTQQLIRAAEIRASANLAATKMSECVLGQSKRVDFCGKGYHLMSFPQSAPHGVVFLHVTYVPAQEKNFTTAPAICHDGKAHFPREGVFVSNGTHWFVTQRNFYEPQIITTDNTFVSGNCDVVIGIVNNTVYDPLQPELDSFKEELDKYFKNHTSPDVDLGDISGINASVVNIQKEIDRLNEVAKNLNESLIDLQELGKYEQYIK

SEQ ID NO: 2387 - protein, 1211 aa, Artificial Sequence
  SARS-CoV-2/China/WF0004/2020__EPI_ISL_413694 spike protein (1-1211)(F970C_G999C)
MFVFLVLLPLVSSQCVNLTTRTQLPPAYTNSFTRGVYYPDKVFRSSVLHSTQDLFLPFFSNVTWFHAIHVSGTNGTKRFDNPVLPFNDGVYFASTEKSNIIRGWIFGTTLDSKTQSLLIVNNATNVVIKVCEFQFCNDPFLGVYYHKNNKSWTESEFRVYSSANNCTFEYVSQPFLMDLEGKQGNFKNLREFVFKNIDGYFKIYSKHTPINLVRDLPQGFSALEPLVDLPIGINITRFQTLLALHRSYLTPGDSSSGWTAGAAAYYVGYLQPRTFLLKYNENGTITDAVDCALDPLSETKCTLKSFTVEKGIYQTSNFRVQPTESIVRFPNITNLCPFGEVFNATRFASVYAWNRKRISNCVADYSVLYNSASFSTFKCYGVSPTKLNDLCFTNVYADSFVIRGDEVRQIAPGQTGKIADYNYKLPDDFTGCVIAWNSNNLDSKVGGNYNYLYRLFRKSNLKPFERDISTEIYQAGSTPCNGVEGFNCYFPLQSYGFQPTNGVGYQPYRVVVLSFELLHAPATVCGPKKSTNLVKNKCVNFNFNGLTGTGVLTESNKKFLPFQQFGRDIADTTDAVRDPQTLEILDITPCSFGGVSVITPGTNTSNQVAVLYQDVNCTEVPVAIHADQLTPTWRVYSTGSNVFQTRAGCLIGAEHVNNSYECDIPIGAGICASYQTQTNSPRRARSVASQSIIAYTMSLGAENSVAYSNNSIAIPTNFTISVTTEILPVSMTKTSVDCTMYICGDSTECSNLLLQYGSFCTQLNRALTGIAVEQDKNTQEVFAQVKQIYKTPPIKDFGGFNFSQILPDPSKPSKRSFIEDLLFNKVTLADAGFIKQYGDCLGDIAARDLICAQKFNGLTVLPPLLTDEMIAQYTSALLAGTITSGWTFGAGAALQIPFAMQMAYRFNGIGVTQNVLYENQKLIANQFNSAIGKIQDSLSSTASALGKLQDVVNQNAQALNTLVKQLSSNCGAISSVLNDILSRLDKVEAEVQIDRLITCRLQSLQTYVTQQLIRAAEIRASANLAATKMSECVLGQSKRFDFCGKGYHLMSFPQSAPHGVVFLHVTYVPAQEKNFTTAPAICHDGKAHFPREGVFVSNGTHWFVTQRNFYEPQIITTDNTFVSGNCDVVIGIVNNTVYDPLQPELDSFKEELDKYFKNHTSPDVDLGDISGINASVVNIQKEIDRLNEVAKNLNESLIDLQELGKYEQYIK

SEQ ID NO: 2388 - protein, 1211 aa, Artificial Sequence
  SARS-CoV-2/China/WF0028/2020__EPI_ISL_413791 spike protein (1-1211)(F970C_G999C)
MFVFLVLLPLVSSQCVNLTTRTQLPPAYTNSFTRGVYYPDKVFRSSVLHSTQDLFLPFFSNVTWFHAIHVSGTNGTKRFDNPVLPFNDGVYFASTEKSNIIRGWIFGTTLDSKTQSLLIVNNATNVVIKVCEFQFCNDPFLGVYYHKNNKSWMESEFRVYSSANNCTFEYVSQPFLMDLEGKQGNFKNLREFVFKNIDGYFKIYSKHTPINLVRDLPQGFSALEPLVDLPIGINITRFQTLLALHRSYLTPGDSSSGWTAGAAAYYVGYLQPRTFLLKYNENGTITDAVDCALDPLSETKCTLKSFTVEKGIYQTSNFRVQPTESIVRFPNITNLCPFGEVFNATRFASVYAWNRKRISNCVADYSVLYNSASFSTFKCYGVSPTKLNDLCFTNVYADSFVIRGDEVRQIAPGQTGKIADYNYKLPDDFTGCVIAWNSNNLDSKVGGNYNYLYRLFRKSNLKPFERDISTEIYQAGSTPCNGVEGFNCYFPLQSYGFQPTNGVGYQPYRVVVLSFELLHAPATVCGPKKSTNLVKNKCVNFNFNGLTGTGVLTESNKKFLPFQQFGRDIADTTDAVRDPQTLEILDITPCSFGGVSVITPGTNTSNQVAVLYQDVNCTEVPVAIHADQLTPTWRVYSTGSNVFQTRAGCLIGAEHVNNSYECDIPIGAGICASYQTQTNSPRRARSVASQSIIAYTMSLGAENSVAYSNNSIAIPTNFTISVTTEILPVSMTKTSVDCTMYICGDSTECSNLLLQYGSFCTQLNRALTGIAVEQDKNTQEVFAQVKQIYKTPPIKDFGGFNFSQILPDPSKPSKRSFIEDLLFNKVTLADAGFIKQYGDCLGDIAARDLICAQKFNGLTVLPPLLTDEMIAQYTSALLAGTITSGWTFGAGAALQIPFAMQMAYRFNGIGVTQNVLYENQKLIANQFNSAIGKIQDSLSSTASALGKLQDVVNQNAQALNTLVKQLSSNCGAISSVLNDILSRLDKVEAEVQIDRLITCRLQSLQTYVTQQLIRAAEIRASANLAATKMSECVLGQSKRVDFCGKGYHLMSFPQSAPHGVVFLHVTYVPAQEKNFTTAPAICHDGKAHFPREGVFVSNGTHWFVTQRNFYEPQIITTDNTFVSGNCDVVIGIVNNTVYDPLQPELESFKEELDKYFKNHTSPDVDLGDISGINASVVNIQKEIDRLNEVAKNLNESLIDLQELGKYEQYIK

SEQ ID NO: 2389 - protein, 1211 aa, Artificial Sequence
  SARS-CoV-2/2019-nCoV/USA-CruiseA-18/2020__MT159716.1 spike protein (1-1211)(F970C_G999C)
MFVFLVLLPLVSSQCVNLTTRTQLPPAYTNSFTRGVYYPDKVFRSSVLHSTQDLFLPFFSNVTWFHAIHVSGTNGTKRFDNPVLPFNDGVYFASTEKSNIIRGWIFGTTLDSKTQSLLIVNNATNVVIKVCEFQFCNDPFLGVYYHKNNKSWMESELRVYSSANNCTFEYVSQPFLMDLEGKQGNFKNLREFVFKNIDGYFKIYSKHTPINLVRDLPQGFSALEPLVDLPIGINITRFQTLLALHRSYLTPGDSSSGWTAGAAAYYVGYLQPRTFLLKYNENGTITDAVDCALDPLSETKCTLKSFTVEKGIYQTSNFRVQPTESIVRFPNITNLCPFGEVFNATRFASVYAWNRKRISNCVADYSVLYNSASFSTFKCYGVSPTKLNDLCFTNVYADSFVIRGDEVRQIAPGQTGKIADYNYKLPDDFTGCVIAWNSNNLDSKVGGNYNYLYRLFRKSNLKPFERDISTEIYQAGSTPCNGVEGFNCYFPLQSYGFQPTNGVGYQPYRVVVLSFELLHAPATVCGPKKSTNLVKNKCVNFNFNGLTGTGVLTESNKKFLPFQQFGRDIADTTDAVRDPQTLEILDITPCSFGGVSVITPGTNTSNQVAVLYQDVNCTEVPVAIHADQLTPTWRVYSTGSNVFQTRAGCLIGAEHVNNSYECDIPIGAGICASYQTQTNSPRRARSVASQSIIAYTMSLGAENSVAYSNNSIAIPTNFTISVTTEILPVSMTKTSVDCTMYICGDSTECSNLLLQYGSFCTQLNRALTGIAVEQDKNTQEVFAQVKQIYKTPPIKDFGGFNFSQILPDPSKPSKRSFIEDLLFNKVTLADAGFIKQYGDCLGDIAARDLICAQKFNGLTVLPPLLTDEMIAQYTSALLAGTITSGWTFGAGAALQIPFAMQMAYRFNGIGVTQNVLYENQKLIANQFNSAIGKIQDSLSSTASALGKLQDVVNQNAQALNTLVKQLSSNCGAISSVLNDILSRLDKVEAEVQIDRLITCRLQSLQTYVTQQLIRAAEIRASANLAATKMSECVLGQSKRVDFCGKGYHLMSFPQSAPHGVVFLHVTYVPAQEKNFTTAPAICHDGKAHFPREGVFVSNGTHWFVTQRNFYEPQIITTDNTFVSGNCDVVIGIVNNTVYDPLQPELDSFKEELDKYFKNHTSPDVDLGDISGINASVVNIQKEIDRLNEVAKNLNESLIDLQELGKYEQYIK

SEQ ID NO: 2390 - protein, 1211 aa, Artificial Sequence
  SARS-CoV-2/SARS-CoV-2/Yunnan-01/human/2020/CHN__MT049951.1 spike protein (1-1211)(F970C_G999C)
MFVFLVLLPLVSSQCVNLTTRTQLPPANTNSFTRGVYYPDKVFRSSVLHSTQDLFLPFFSNVTWFHAIHVSGTNGTKRFDNPVLPFNDGVYFASTEKSNIIRGWIFGTTLDSKTQSLLIVNNATNVVIKVCEFQFCNDPFLGVYYHKNNKSWMESEFRVYSSANNCTFEYVSQPFLMDLEGKQGNFKNLREFVFKNIDGYFKIYSKHTPINLVRDLPQGFSALEPLVDLPIGINITRFQTLLALHRSYLTPGDSSSGWTAGAAAYYVGYLQPRTFLLKYNENGTITDAVDCALDPLSETKCTLKSFTVEKGIYQTSNFRVQPTESIVRFPNITNLCPFGEVFNATRFASVYAWNRKRISNCVADYSVLYNSASFSTFKCYGVSPTKLNDLCFTNVYADSFVIRGDEVRQIAPGQTGKIADYNYKLPDDFTGCVIAWNSNNLDSKVGGNYNYLYRLFRKSNLKPFERDISTEIYQAGSTPCNGVEGFNCYFPLQSYGFQPTNGVGYQPYRVVVLSFELLHAPATVCGPKKSTNLVKNKCVNFNFNGLTGTGVLTESNKKFLPFQQFGRDIADTTDAVRDPQTLEILDITPCSFGGVSVITPGTNTSNQVAVLYQDVNCTEVPVAIHADQLTPTWRVYSTGSNVFQTRAGCLIGAEHVNNSYECDIPIGAGICASYQTQTNSPRRARSVASQSIIAYTMSLGAENSVAYSNNSIAIPTNFTISVTTEILPVSMTKTSVDCTMYICGDSTECSNLLLQYGSFCTQLNRALTGIAVEQDKNTQEVFAQVKQIYKTPPIKDFGGFNFSQILPDPSKPSKRSFIEDLLFNKVTLADAGFIKQYGDCLGDIAARDLICAQKFNGLTVLPPLLTDEMIAQYTSALLAGTITSGWTFGAGAALQIPFAMQMAYRFNGIGVTQNVLYENQKLIANQFNSAIGKIQDSLSSTASALGKLQDVVNQNAQALNTLVKQLSSNCGAISSVLNDILSRLDKVEAEVQIDRLITCRLQSLQTYVTQQLIRAAEIRASANLAATKMSECVLGQSKRVDFCGKGYHLMSFPQSAPHGVVFLHVTYVPAQEKNFTTAPAICHDGKAHFPREGVFVSNGTHWFVTQRNFYEPQIITTDNTFVSGNCDVVIGIVNNTVYDPLQPELDSFKEELDKYFKNHTSPDVDLGDISGINASVVNIQKEIDRLNEVAKNLNESLIDLQELGKYEQYIK

SEQ ID NO: 2391 - protein, 1211 aa, Artificial Sequence
  SARS-CoV-2/USA/WA-UW292/2020__EPI_ISL_418077 spike protein (1-1211)(F970C_G999C)
MFVFLVLLPLVSSQCVNLTTRTQLPPAYTNSFTRGVYYPDKVFRSSVLHSTQDLFLPFFSNVTWFHAIHVSGTNGTKRFDNPVLPFNDGVYFASTEKSNIIRGWIFGTTLDSKTQSLLIVNNATNVVIKVCEFQFCNDPFLGVYYHKNNKSWMESEFRVYSSANNCTFEYVSQPFLMDLEGKQGNFKNLREFVFKNIDGYFKIYSKHTPINLVRDLPQGFSALEPLVDLPIGINITRFQTLLALHRSYLTPGDSSSGWTAGAAAYYVGYLQPRTFLLKYNENGTITDAVDCALDPLSETKCTLKSFTVEKGIYQTSNFRVQPTESIVRFPNITNLCPFGEVFNATRFASVYAWNRKRISNCVADYSVLYNSASFSTFKCYGVSPTKLNDLCFTNVYADSFVIRGDEVRQIAPGQTGKIADYNYKLPDDFTGCVIAWNSNNLDSKVGGNYNYLYRLFRKSNLKPFERDISTEIYQASSTPCNGVEGFNCYFPLQSYGFQPTNGVGYQPYRVVVLSFELLHAPATVCGPKKSTNLVKNKCVNFNFNGLTGTGVLTESNKKFLPFQQFGRDIADTTDAVRDPQTLEILDITPCSFGGVSVITPGTNTSNQVAVLYQDVNCTEVPVAIHADQLTPTWRVYSTGSNVFQTRAGCLIGAEHVNNSYECDIPIGAGICASYQTQTNSPRRARSVASQSIIAYTMSLGAENSVAYSNNSIAIPTNFTISVTTEILPVSMTKTSVDCTMYICGDSTECSNLLLQYGSFCTQLNRALTGIAVEQDKNTQEVFAQVKQIYKTPPIKDFGGFNFSQILPDPSKPSKRSFIEDLLFNKVTLADAGFIKQYGDCLGDIAARDLICAQKFNGLTVLPPLLTDEMIAQYTSALLAGTITSGWTFGAGAALQIPFAMQMAYRFNGIGVTQNVLYENQKLIANQFNSAIGKIQDSLSSTASALGKLQDVVNQNAQALNTLVKQLSSNCGAISSVLNDILSRLDKVEAEVQIDRLITCRLQSLQTYVTQQLIRAAEIRASANLAATKMSECVLGQSKRVDFCGKGYHLMSFPQSAPHGVVFLHVTYVPAQEKNFTTAPAICHDGKAHFPREGVFVSNGTHWFVTQRNFYEPQIITTDNTFVSGNCDVVIGIVNNTVYDPLQPELDSFKEELDKYFKNHTSPDVDLGDISGINASVVNIQKEIDRLNEVAKNLNESLIDLQELGKYEQYIK

SEQ ID NO: 2392 - protein, 1211 aa, Artificial Sequence
  SARS-CoV-2/Iceland/192/2020__EPI_ISL_417819 spike protein (1-1211)(F970C_G999C)
MFVFFVLLPLVSSQCVNLTTRTQLPPAYTNSFTRGVYYPDKVFRSSVLHSTQDLFLPFFSNVTWFHAIHVSGTNGTKRFDNPVLPFNDGVYFASTEKSNIIRGWIFGTTLDSKTQSLLIVNNATNVVIKVCEFQFCNDPFLGVYYHKNNKSWMESEFRVYSSANNCTFEYVSQPFLMDLEGKQGNFKNLREFVFKNIDGYFKIYSKHTPINLVRDLPQGFSALEPLVDLPIGINITRFQTLLALHRSYLTPGDSSSGWTAGAAAYYVGYLQPRTFLLKYNENGTITDAVDCALDPLSETKCTLKSFTVEKGIYQTSNFRVQPTESIVRFPNITNLCPFGEVFNATRFASVYAWNRKRISNCVADYSVLYNSASFSTFKCYGVSPTKLNDLCFTNVYADSFVIRGDEVRQIAPGQTGKIADYNYKLPDDFTGCVIAWNSNNLDSKVGGNYNYLYRLFRKSNLKPFERDISTEIYQAGSTPCNGVEGFNCYFPLQSYGFQPTNGVGYQPYRVVVLSFELLHAPATVCGPKKSTNLVKNKCVNFNFNGLTGTGVLTESNKKFLPFQQFGRDIADTTDAVRDPQTLEILDITPCSFGGVSVITPGTNTSNQVAVLYQGVNCTEVPVAIHADQLTPTWRVYSTGSNVFQTRAGCLIGAEHVNNSYECDIPIGAGICASYQTQTNSPRRARSVASQSIIAYTMSLGAENSVAYSNNSIAIPTNFTISVTTEILPVSMTKTSVDCTMYICGDSTECSNLLLQYGSFCTQLNRALTGIAVEQDKNTQEVFAQVKQIYKTPPIKDFGGFNFSQILPDPSKPSKRSFIEDLLFNKVTLADAGFIKQYGDCLGDIAARDLICAQKFNGLTVLPPLLTDEMIAQYTSALLAGTITSGWTFGAGAALQIPFAMQMAYRFNGIGVTQNVLYENQKLIANQFNSAIGKIQDSLSSTASALGKLQDVVNQNAQALNTLVKQLSSNCGAISSVLNDILSRLDKVEAEVQIDRLITCRLQSLQTYVTQQLIRAAEIRASANLAATKMSECVLGQSKRVDFCGKGYHLMSFPQSAPHGVVFLHVTYVPAQEKNFTTAPAICHDGKAHFPREGVFVSNGTHWFVTQRNFYEPQIITTDNTFVSGNCDVVIGIVNNTVYDPLQPELDSFKEELDKYFKNHTSPDVDLGDISGINASVVNIQKEIDRLNEVAKNLNESLIDLQELGKYEQYIK

SEQ ID NO: 2393 - protein, 1211 aa, Artificial Sequence
  SARS-CoV-2/Belgium/ULG-6939/2020__EPI_ISL_417020 spike protein (1-1211)(F970C_G999C)
MFVFLVLLPLVSSQCVNLTTRTQLPPAYTNSFTRGVYYPDKVFRSSVLHSTQDLFLPFFSNVTWFHAIHVSGTNGTKRFDNPVLPFNDGVYFASTEKSNIIRGWIFGTTLDSKTQSLLIVNNATNVVIKVCEFQFCNDPFLGVYYHKNNKSWMESEFRVYSSANNCTFEYVSQPFLMDLEGKQGNFKNLREFVFKNIDGYFKIYSKHTPINLVRDLPQGFSALEPLVDLPIGINITRFQTLLALHRSYLTPGDSSSGWTAGAAAYYVGYLQPRTFLLKYNENGTITDAVDCALDPLSETKCTLKSFTVEKGIYQTSNFRVQPTESIVRFPNITNLCPFGEVFNATRFASVYAWNRKRISNCVADYSVLYNSASFSTFKCYGVSPTKLNDLCFTNVYADSFVIRGDEVRQIAPGQTGKIADYNYKLPDDFTGCVIAWNSNNLDSKVGGNYNYLYRLFRKSNLKPFERDISTEIYQAGSTPCNGVEGFNCYFPLQSYGFQPTNGVGYQPYRVVVLSFELLHAPATVCGPKKSTNLVKNKCVNFNFNGLTGTGVLTESNKKFLPFQQFGRDIADTTDAVRDPQTLEILDITPCSFGGVSVITPGTNTSNQVAVLYQGVNCTEVPVAIHADQLTPTWRVYSTGSNVFQTRAGCLIGAEHVNNSYECDIPIGAGICASYQTQTNSPRRARSVASQSIIAYTMSLGAENSVVYSNNSIAIPTNFTISVTTEILPVSMTKTSVDCTMYICGDSTECSNLLLQYGSFCTQLNRALTGIAVEQDKNTQEVFAQVKQIYKTPPIKDFGGFNFSQILPDPSKPSKRSFIEDLLFNKVTLADAGFIKQYGDCLGDIAARDLICAQKFNGLTVLPPLLTDEMIAQYTSALLAGTITSGWTFGAGAALQIPFAMQMAYRFNGIGVTQNVLYENQKLIANQFNSAIGKIQDSLSSTASALGKLQDVVNQNAQALNTLVKQLSSNCGAISSVLNDILSRLDKVEAEVQIDRLITCRLQSLQTYVTQQLIRAAEIRASANLAATKMSECVLGQSKRVDFCGKGYHLMSFPQSAPHGVVFLHVTYVPAQEKNFTTAPAICHDGKAHFPREGVFVSNGTHWFVTQRNFYEPQIITTDNTFVSGNCDVVIGIVNNTVYDPLQPELDSFKEELDKYFKNHTSPDVDLGDISGINASVVNIQKEIDRLNEVAKNLNESLIDLQELGKYEQYIK

SEQ ID NO: 2394 - protein, 1211 aa, Artificial Sequence
  SARS-CoV-2/France/HF2496/2020__EPI_ISL_418231 spike protein (1-1211)(F970C_G999C)
MFVFLVLLPLVSSQCVNLTTRTQLPPAYTNSFTRGVYYPDKVFRSSVLHSTQDLFLPFFSNVTWFHAIHVSGTNGTKRFDNPVLPFNDGVYFASTEKSNIIRGWIFGTTLDSKTQSLLIVNNATNVVIKVCEFQFCNDPFLGVYYHKNNKSWMESEFRVYSSANNCTFEYVSQPFLMDLEGKQGNFKNLREFVFKNIDGYFKIYSKHTPINLVRDLPQGFSALEPLVDLPIGINITRFQTLLALHRSYLTPGDSSSGWTAGAAAYYVGYLQPRTFLLKYNENGTITDAVDCALDPLSETKCTLKSFTVEKGIYQTSNFRVQPTESIVRFPNITNLCPFGEVFNATRFASVYAWNRKRISNCVADYSVLYNSASFSTFKCYGVSPTKLNDLCFTNVYADSFVIRGDEVRQIAPGQTGKIADYNYKLPDDFTGCVIAWNSNNLDSKVGGNYNYLYRLFRKSNLKPFERDISTEIYQAGSTPCNGVEGFNCYFPLQSYGFQPTNGVGYQPYRVVVLSFELLHAPATVCGPKKSTNLVKNKCVNFNFNGLTGTGVLTESNKKFLPFQQFGRDIADTTDAVRDPQTLEILDITPCSFGGVSVITPGTNTSNQVAVLYQGVNCTEVPVAIHADQLTPTWRVYSTGSNVFQTRAGCLIGAEHVNNSYECDIPIGAGICASYQTQTNSPRRARSVASQSIIAYTMSLGAENSVAYSNNSIAIPTNFTISVTTEILPVSMTKTSVDCTMYICGDSTECSNLLLQYGSFCTQLNRALTGIAVEQDKNTQEVFAQVKQIYKTPPIKDFGGFNFSQILPDPSKPSKRSFIEDLLFNKVTLADAGFIKQYGDCLGDIVARDLICAQKFNGLTVLPPLLTDEMIAQYTSALLAGTITSGWTFGAGAALQIPFAMQMAYRFNGIGVTQNVLYENQKLIANQFNSAIGKIQDSLSSTASALGKLQDVVNQNAQALNTLVKQLSSNCGAISSVLNDILSRLDKVEAEVQIDRLITCRLQSLQTYVTQQLIRAAEIRASANLAATKMSECVLGQSKRVDFCGKGYHLMSFPQSAPHGVVFLHVTYVPAQEKNFTTAPAICHDGKAHFPREGVFVSNGTHWFVTQRNFYEPQIITTDNTFVSGNCDVVIGIVNNTVYDPLQPELDSFKEELDKYFKNHTSPDVDLGDISGINASVVNIQKEIDRLNEVAKNLNESLIDLQELGKYEQYIK

SEQ ID NO: 2395 - protein, 1211 aa, Artificial Sequence
  SARS-CoV-2/USA/WA-UW291/2020__EPI_ISL_418076 spike protein (1-1211)(F970C_G999C)
MFVFLVLLPLVSSQCVNLTTRTQLPPAYTNSFTRGVYYPDKVFRSSVLHSTQDLFLPFFSNVTWFHAIHVSGTNGTKRFDNPVLPFNDGVYFASTEKSNIIRGWIFGTTLDSKTQSLLIVNNATNVVIKVCEFQFCNDPFLGVYYHKNNKSWMESEFRVYSSANNCTFEYVSQPFLMDLEGKQGNFKNLREFVFKNIDGYFKIYSKHTPINLVRDLPQGFSALEPLVDLPIGINITRFQTLLALHRSYLTPGDSSSGWTAGAAAYYVGYLQPRTFLLKYNENGTITDAVDCALDPLSETKCTLKSFTVEKGIYQTSNFRVQPTESIVRFPNITNLCPFGEVFNATRFASVYAWNRKRISNCVADYSVLYNSASFSTFKCYGVSPTKLNDLCFTNVYADSFVIRGDEVRQIAPGQTGKIADYNYKLPDDFTGCVIAWNSNNLDSKVGGNYNYLYRLFRKSNLKPFERDISTEIYQAGSTPCNGVEGFNCYFPLQSYGFQPTNGVGYQPYRVVVLSFELLHAPATVCGPKKSTNLVKNKCVNFNFNGLTGTGVLTESNKKFLPFQQFGRDIADTTDAVRDPQTLEILDITPCSFGGVSVITPGTNTSNQVAVLYQGVNCTEVPVAIHADQLTPTWRVYSTGSNVFQTRAGCLIGAEHVNNSYECDIPIGAGICASYQTQTNSPRRARSVASQSIIAYTMSLGAENSVAYSNNSIAIPTNFTISVTTEILPVSMTKTSVDCTMYICGDSTECSNLLLQYGSFCTQLNRALTGIAVEQDKNTQEVFAQVKQIYKTPPIKDFGGFNFSQILPDPSKPSKRSFIEDLLFNKVTLADAGFIKQYGDCLGDIAARDLICAQKFNGLTVLPPLLTDEMIAQYTSALLAGTITSGWTFGAGAALQIPFAMQMAYRFNGIGVTQNVLYENQKLIANQFNSAIGKIQYSLSSTASALGKLQDVVNQNAQALNTLVKQLSSNCGAISSVLNDILSRLDKVEAEVQIDRLITCRLQSLQTYVTQQLIRAAEIRASANLAATKMSECVLGQSKRVDFCGKGYHLMSFPQSAPHGVVFLHVTYVPAQEKNFTTAPAICHDGKAHFPREGVFVSNGTHWFVTQRNFYEPQIITTDNTFVSGNCDVVIGIVNNTVYDPLQPELDSFKEELDKYFKNHTSPDVDLGDISGINASVVNIQKEIDRLNEVAKNLNESLIDLQELGKYEQYIK

SEQ ID NO: 2396 - protein, 1211 aa, Artificial Sequence; identical to SEQ ID NO: 2359
  SARS-CoV-2/Portugal/PT0034/2020__EPI_ISL_418019 spike protein (1-1211)(F970C_G999C)

SEQ ID NO: 2397 - protein, 1211 aa, Artificial Sequence
  SARS-CoV-2/Iceland/202/2020__EPI_ISL_417750 spike protein (1-1211)(F970C_G999C)
MFVFLVLLPLVSSQCVNLTTRTQLPPAYTNSFTRGVYYPDKVFRSSVLHSTQDLFLPFFSNVTWFHAIHVSGTNGTKRFDNPVLPFNDGVYFASTEKSNIIRGWIFGTTLDSKTQSLLIVNNATNVVIKVCEFQFCNDPFLGVYYHKNNKSWMESEFRVYSSANNCTFEYVSQPFLMDLEGKQGNFKNLREFVFKNIDGYFKIYSKHTPINLVRDLPQGFSALEPLVDLPIGINITRFQTLLALHRSYLTPGDSSSGWTAGAAAYYVGYLQPRTFLLKYNENGTITDAVDCALDPLSETKCTLKSFTVEKGIYQTSNFRVQPTESIVRFPNITNLCPFGEVFNATRFASVYAWNRKRISNCVADYSVLYNSASFSTFKCYGVSPTKLNDLCFTNVYADSFVIRGDEVRQIAPGQTGKIADYNYKLPDDFTGCVIAWNSNNLDSKVGGNYNYLYRLFRKSNLKPFERDISTEIYQAGSTPCNGVEGFNCYFPLQSYGFQPTNGVGYQPYRVVVLSFELLHAPATVCGPKKSTNLVKNKCVNFNFNGLTGTGVLTESNKKFLPFQQFGRDIADTTDAVRDPQTLEILDITPCSFGGVSVITPGTNTSNQVAVLYQDVNCTEVPVAIHADQLTPTWRVYSTGSNVFQTRAGCLIGAEHVNNSYECDIPIGAGICASYQTQTNSPRRARSVASQSIIAYTMSLGAENSVAYSNNSIAIPTNFTISVTTEILPVSMTKTSVDCTMYICGDSTECSNLLLQYGSFCTQLNRALTGIAVEQDKNTQEVFAQVKQIYKTPPIKDFGGFNFSQILPDPSKPSKRSFIEDLLFNKVTLADAGFIKQYGDCLGDIAARDLICAQKFNGLTVLPPLLTDEMIAQYTSALLAGTITSGWTFGAGAALQIPFAMQMAYRFNGIGVTQNVLYENQKLIANQFNSAIGKIQDSLSSTASALGKLQDVVNQNAQALNTLVKQLSSNCGAISSVLNDILSRLDKVEAEVQIDRLITCRLQSLQTYVTQQLIRAAEIRASANLAATKMSECVLGQSKRVDFCGKGYHLMSFPQSAPHGVVFLHVTYVPAQEKNFTTAPAICHDGKAHFPREGVFVSNGTHWFVTQRNFYEPQIITTDNTFVSGNCDVVIGIVNNTVYDPLQPELDSFKEELDKYFKNHTSPDVDLGDIPGINASVVNIQKEIDRLNEVAKNLNESLIDLQELGKYEQYIK

SEQ ID NO: 2398 - protein, 1211 aa, Artificial Sequence
  SARS-CoV-2/USA/WA-UW261/2020__EPI_ISL_418046 spike protein (1-1211)(F970C_G999C)
MFVFLVLLPLVSSQCVNLTTRTQLPPAYTNSFTRGVYYPDKVFRSSVLHSTQDLFLPFFSNVTWFHAIHVSGTNGTKRFDNPVLPFNDGVYFASTEKSNIIRGWIFGTTLDSKTQSLLIVNNATNVVIKVCEFQFCNDPFLGVYYHKNNKSWMESEFRVYSSANNCTFEYVSQPFLMDLEGKQGNFKNLREFVFKNIDGYFKIYSKHTPINLVRDLPQGFSALEPLVDLPIGINITRFQTLLALHRSYLTPGDSSSGWTAGAAAYYVGYLQPRTFLLKYNENGTITDAVDCALDPLSETKCTLKSFTVEKGIYQTSNFRVQPTESIVRFPNITNLCPFGEVFNATRFTSVYAWNRKRISNCVADYSVLYNSASFSTFKCYGVSPTKLNDLCFTNVYADSFVIRGDEVRQIAPGQTGKIADYNYKLPDDFTGCVIAWNSNNLDSKVGGNYNYLYRLFRKSNLKPFERDISTEIYQAGSTPCNGVEGFNCYFPLQSYGFQPTNGVGYQPYRVVVLSFELLHAPATVCGPKKSTNLVKNKCVNFNFNGLTGTGVLTESNKKFLPFQQFGRDIADTTDAVRDPQTLEILDITPCSFGGVSVITPGTNTSNQVAVLYQDVNCTEVPVAIHADQLTPTWRVYSTGSNVFQTRAGCLIGAEHVNNSYECDIPIGAGICASYQTQTNSPRRARSVASQSIIAYTMSLGAENSVAYSNNSIAIPTNFTISVTTEILPVSMTKTSVDCTMYICGDSTECSNLLLQYGSFCTQLNRALTGIAVEQDKNTQEVFAQVKQIYKTPPIKDFGGFNFSQILPDPSKPSKRSFIEDLLFNKVTLADAGFIKQYGDCLGDIAARDLICAQKFNGLTVLPPLLTDEMIAQYTSALLAGTITSGWTFGAGAALQIPFAMQMAYRFNGIGVTQNVLYENQKLIANQFNSAIGKIQDSLSSTASALGKLQDVVNQNAQALNTLVKQLSSNCGAISSVLNDILSRLDKVEAEVQIDRLITCRLQSLQTYVTQQLIRAAEIRASANLAATKMSECVLGQSKRVDFCGKGYHLMSFPQSAPHGVVFLHVTYVPAQEKNFTTAPAICHDGKAHFPREGVFVSNGTHWFVTQRNFYEPQIITTDNTFVSGNCDVVIGIVNNTVYDPLQPELDSFKEELDKYFKNHTSPDVDLGDISGINASVVNIQKEIDRLNEVAKNLNESLIDLQELGKYEQYIK

SEQ ID NO: 2399 - protein, 1211 aa, Artificial Sequence
  SARS-CoV-2/Portugal/PT0035/2020__EPI_ISL_418020 spike protein (1-1211)(F970C_G999C)
MFVFLVLLPLVSSQCVNLTTRTQLPPAYTNSFTRGVYYPDKVFRSSVLHSTQDLFLPFFSNVTWFHAIHVSGTNGTKRFDNPVLPFNDGVYFASTEKSNIIRGWIFGTTLDSKTQSLLIVNNATNVVIKVCEFQFCNDPFLGVYYHKNNKSWMESEFRVYSSANNCTFEYVSQPFLMDLEGKQGNFKNLREFVFKNIDGYFKIYSKHTPINLVRDLPQGFSALEPLVDLPIGINITRFQTLLALHRSYLTPGDSSSGWTAGAAAYYVGYLQPRTFLLKYNENGTITDAVDCALDPLSETKCTLKSFTVEKGIYQTSNFRVQPTESIVRFPNITNLCPFGEVFNATRFASVYAWNRKRISNCVADYSVLYNSASFSTFKCYGVSPTKLNDLCFTNVYADSFVIRGDEVRQIAPGQTGKIADYNYKLPDDFTGCVIAWNSNNLDSKVGGNYNYLYRLFRKSNLKPFERDISTEIYQAGSTPCNGVEGFNCYFPLQSYGFQPTNGVGYQPYRVVVLSFELLHAPATVCGPKKSTNLVKNKCVNFNFNGLTGTGVLTESNKKFLPFQQFGRDIADTTDAVRDPQTLEILDITPCSFGGVSVITPGTNTSNQVAVLYQDVNCTEVPVAIHADQLTPTWRVYSTGSNVFQTRAGCLIGAEHVNNSYECDIPIGAGICASYQTQTNSPRRARSVASQSIIAYTMSLGAENSVAYSNNSIAIPTNFTISVTTEILPVSMTKTSVDCTMYICGDSTECSNLLLQYGSFCTQLNRALTGIAVEQDKNTQEVFAQVKQIYKTPPIKDFGGFNFSQILPDPSKPSKRSFIEDLLFNKVTLADAGFIKQYGDCLGDISARDLICAQKFNGLTVLPPLLTDEMIAQYTSALLAGTITSGWTFGAGAALQIPFAMQMAYRFNGIGVTQNVLYENQKLIANQFNSAIGKIQDSLSSTASALGKLQDVVNQNAQALNTLVKQLSSNCGAISSVLNDILSRLDKVEAEVQIDRLITCRLQSLQTYVTQQLIRAAEIRASANLAATKMSECVLGQSKRVDFCGKGYHLMSFPQSAPHGVVFLHVTYVPAQEKNFTTAPAICHDGKAHFPREGVFVSNGTHWFVTQRNFYEPQIITTDNTFVSGNCDVVIGIVNNTVYDPLQPELDSFKEELDKYFKNHTSPDVDLGDISGINASVVNIQKEIDRLNEVAKNLNESLIDLQELGKYEQYIK

SEQ ID NO: 2400 - protein, 1211 aa, Artificial Sequence
  SARS-CoV-2/USA/NY-NYUMC7/2020__EPI_ISL_418192 spike protein (1-1211)(F970C_G999C)
MFVFLVLLPLVSSQCVNLTTRTQLPPAYTNSFTRGVYYPDKVFRSSVLHSTQDLFLPFFSNVTWFHAIHVSGTNGTKRFDNPVLPFNDGVYFASTEKSNIIRGWIFGTTLDSKTQSLLIVNNATNVVIKVCEFQFCNDPFLGVYHHKNNKSWMESEFRVYSSANNCTFEYVSQPFLMDLEGKQGNFKNLREFVFKNIDGYFKIYSKHTPINLVRDLPQGFSALEPLVDLPIGINITRFQTLLALHRSYLTPGDSSSGWTAGAAAYYVGYLQPRTFLLKYNENGTITDAVDCALDPLSETKCTLKSFTVEKGIYQTSNFRVQPTESIVRFPNITNLCPFGEVFNATRFASVYAWNRKRISNCVADYSVLYNSASFSTFKCYGVSPTKLNDLCFTNVYADSFVIRGDEVRQIAPGQTGKIADYNYKLPDDFTGCVIAWNSNNLDSKVGGNYNYLYRLFRKSNLKPFERDISTEIYQAGSTPCNGVEGFNCYFPLQSYGFQPTNGVGYQPYRVVVLSFELLHAPATVCGPKKSTNLVKNKCVNFNFNGLTGTGVLTESNKKFLPFQQFGRDIADTTDAVRDPQTLEILDITPCSFGGVSVITPGTNTSNQVAVLYQGVNCTEVPVAIHADQLTPTWRVYSTGSNVFQTRAGCLIGAEHVNNSYECDIPIGAGICASYQTQTNSPRRARSVASQSIIAYTMSLGAENSVAYSNNSIAIPTNFTISVTTEILPVSMTKTSVDCTMYICGDSTECSNLLLQYGSFCTQLNRALTGIAVEQDKNTQEVFAQVKQIYKTPPIKDFGGFNFSQILPDPSKPSKRSFIEDLLFNKVTLADAGFIKQYGDCLGDIAARDLICAQKFNGLTVLPPLLTDEMIAQYTSALLAGTITSGWTFGAGAALQIPFAMQMAYRFNGIGVTQNVLYENQKLIANQFNSAIGKIQDSLSSTASALGKLQDVVNQNAQALNTLVKQLSSNCGAISSVLNDILSRLDKVEAEVQIDRLITCRLQSLQTYVTQQLIRAAEIRASANLAATKMSECVLGQSKRVDFCGKGYHLMSFPQSAPHGVVFLHVTYVPAQEKNFTTAPAICHDGKAHFPREGVFVSNGTHWFVTQRNFYEPQIITTDNTFVSGNCDVVIGIVNNTVYDPLQPELDSFKEELDKYFKNHTSPDVDLGDISGINASVVNIQKEIDRLNEVAKNLNESLIDLQELGKYEQYIK

SEQ ID NO: 2401 - protein, 1211 aa, Artificial Sequence
  SARS-CoV-2/Iceland/189/2020__EPI_ISL_417709 spike protein (1-1211)(F970C_G999C)
MFVFLVLLPLVSSQCVNLTTRTQLPPAYTNSFTRGVYYPDKVFRSSVLHSTQDLFLPFFSNVTWFHAIHVSGTNGTKRFDNPVLPFNDGVYFASTEKSNIIRGWIFGTTLDSKTQSLLIVNNATNVVIKVCEFQFCNDPFLGVYYHKNNKSWMESEFRVYSSANNCTFEYVSQPFLMDLEGKQGNFKNLREFVFKNIDGYFKIYSKHTPINLVRDLPQGFSALEPLVDLPIGINITRFQTLLALHRSYLTPGDSSSGWTAGAAAYYVGYLQPRTFLLKYNENGTITDAVDCALDPLSETKCTLKSFTVEKGIYQTSNFRVQPTESIVRFPNITNLCPFGEVFNATRFASVYAWNRKRISNCVADYSVLYNSASFSTFKCYGVSPTKLNDLCFTNVYADSFVIRGDEVRQIAPGQTGKIADYNYKLPDDFTGCVIAWNSNNLDSKVGGNYNYLYRLFRKSNLKPFERDISTEIYQAGSTPCNGVEGFNCYFPLQSYGFQPTNGVGYQPYRVVVLSFELLHAPATVCGPKKSTNLVKNKCVNFNFNGLTGTGVLTESNKKFLPFQQFGRDIADTTDAVRDPQTLEILDITPCSFGGVSVITPGTNTSNQVAVLYQGVNCTEVPVAIHADQLTPTWRVYSTGSNVFQTRAGCLIGAEHVNNSYECDIPIGAGICASYQTQTNSPRRARSVASQSIIAYTMSLGAENSVAYSNNSIAIPTNFTISVTTEILPVSMTKTSVDCTMYICGDSTECSNLLLQYGSFCTQLNRALTGIAVEQDKNTQEVFAQVKQIYKTPPIKDFGGFNFSQILPDPSKPSKRSFIEDLLFNKVTLADAGFTKQYGDCLGDIAARDLICAQKFNGLTVLPPLLTDEMIAQYTSALLAGTITSGWTFGAGAALQIPFAMQMAYRFNGIGVTQNVLYENQKLIANQFNSAIGKIQDSLSSTASALGKLQDVVNQNAQALNTLVKQLSSNCGAISSVLNDILSRLDKVEAEVQIDRLITCRLQSLQTYVTQQLIRAAEIRASANLAATKMSECVLGQSKRVDFCGKGYHLMSFPQSAPHGVVFLHVTYVPAQEKNFTTAPAICHDGKAHFPREGVFVSNGTHWFVTQRNFYEPQIITTDNTFVSGNCDVVIGIVNNTVYDPLQPELDSFKEELDKYFKNHTSPDVDLGDISGINASVVNIQKEIDRLNEVAKNLNESLIDLQELGKYEQYIK

SEQ ID NO: 2402 - protein, 1211 aa, Artificial Sequence
  SARS-CoV-2/Australia/NSW56/2020__EPI_ISL_417408 spike protein (1-1211)(F970C_G999C)
MFVFLVLLPLVSSQCVNLTTRTQLPPAYTNSFTRGVYYPDKVFRSSVLHSTQDLFLPFFSNVTWFHAIHVSGTNGTKRFDNPVLPFNDGVYFASTEKSNIIRGWIFGTTLDSKTQSLLIVNNATNVVIKVCEFQFCNDPFLGVYYHKNNKSWMESEFRVYSSANNCTFEYVSQPFLMDLEGKQGNFKNLREFVFKNIDGYFKIYSKHTPINLVRDLPQGFSALEPLVDLPIGINITRFQTLLALHRSYLTPGDSSSGWTAGAAAYYVGYLQPRTFLLKYNENGTITDAVDCALDPLSETKCTLKSFTVEKGIYQTSNFRVQPTESIVRFPNITNLCPFGEVFNATRFASVYAWNRKRISNCVADYSVLYNSASFSTFKCYGVSPTKLNDLCFTNVYADSFVIRGDEVRQIAPGQTGKIADYNYKLPDDFTGCVIAWNSNNLDSKVGGNYNYLYRLFRKSNLKPFERDISTEIYQAGSTPCNGVEGFNCYFPLQSYGFQPTNGVGYQPYRVVVLSFELLHAPATVCGPKKSTNLVKNKCVNFNFNGLTGTGVLTESNKKFLPFQQFGRDIADTTDAVRDPQTLEILDITPCSFGGVSVITPGTNTSNQVAVLYQDVNCTEVPVAIHADQLTPTWRVYSTGSNVFQTRAGCLIGAEHVNNSYECDIPIGAGICASYQTQTNSPRRARSVASQSIIAYTMSLGAENSVAYSNNSIAIPTNFTISVTTEILPVSMTKTSVDCTMYICGDSTECSNLLLQYGSFCTQLNRALTGIAVEQDKNTQEVFAQVKQIYKTPPIKDFGGFNFSQILPDSSKPSKRSFIEDLLFNKVTLADAGFIKQYGDCLGDIAARDLICAQKFNGLTVLPPLLTDEMIAQYTSALLAGTITSGWTFGAGAALQIPFAMQMAYRFNGIGVTQNVLYENQKLIANQFNSAIGKIQDSLSSTASALGKLQDVVNQNAQALNTLVKQLSSNCGAISSVLNDILSRLDKVEAEVQIDRLITCRLQSLQTYVTQQLIRAAEIRASANLAATKMSECVLGQSKRVDFCGKGYHLMSFPQSAPHGVVFLHVTYVPAQEKNFTTAPAICHDGKAHFPREGVFVSNGTHWFVTQRNFYEPQIITTDNTFVSGNCDVVIGIVNNTVYDPLQPELDSFKEELDKYFKNHTSPDVDLGDISGINASVVNIQKEIDRLNEVAKNLNESLIDLQELGKYEQYIK

SEQ ID NO: 2403 - protein, 1211 aa, Artificial Sequence
  SARS-CoV-2/Iceland/280/2020__EPI_ISL_417608 spike protein (1-1211)(F970C_G999C)
MFVFLVLLPLVSSQCVNLTTRTQLPPAYTNSFTRGVYYPDKVFRSSVLHSTQDLFLPFFSNVTWFHAIHVSGTNGTKRFDNPVLPFNDGVYFASTEKSNIIRGWIFGTTLDSKTQSLLIVNNATNVVIKVCEFQFCNDPFLGVYYHKNNKSWMESEFRVYSSANNCTFEYVSQPFLMDLEGKQGNFKNLREFVFKNIDGYFKIYSKHTPINLVRDLPQGFSALEPLVDLPIGINITRFQTLLALHRSYLTPGDSSSGWTAGAAAYYVGYLQPRTFLLKYNENGTITDAVDCALDPLSETKCTLKSFTVEKGIYQTSNFRVQPTESIVRFPNITNLCPFGEVFNATRFASVYAWNRKRISNCVADYSVLYNSASFSTFKCYGVSPTKLNDLCFTNVYADSFVIRGDEVRQIAPGQTGKIADYNYKLPDDFTGCVIAWNSNNLDSKVGGNYNYLYRLFRKSNLKPFERDISTEIYQAGSTPCNGVEGFNCYFPLQSYGFQPTNGVGYQPYRVVVLSFELLHAPATVCGPKKSTNLVKNKCVNFNFNGLTGTGVLTESNKKFLPFQQFGRDIADTTDAVRDPQTLEILDITPCSFGGVSVITPGTNTSNQVAVLYQGVNCTEVPVAIHADQLTPTWRVYSTGSNVFQTRAGCLIGAEHVNNSYECDIPIGAGICASYHTQTNSPRRARSVASQSIIAYTMSLGAENSVAYSNNSIAIPTNFTISVTTEILPVSMTKTSVDCTMYICGDSTECSNLLLQYGSFCTQLNRALTGIAVEQDKNTQEVFAQVKQIYKTPPIKDFGGFNFSQILPDPSKPSKRSFIEDLLFNKVTLADAGFIKQYGDCLGDIAARDLICAQKFNGLTVLPPLLTDEMIAQYTSALLAGTITSGWTFGAGAALQIPFAMQMAYRFNGIGVTQNVLYENQKLIANQFNSAIGKIQDSLSSTASALGKLQDVVNQNAQALNTLVKQLSSNCGAISSVLNDILSRLDKVEAEVQIDRLITCRLQSLQTYVTQQLIRAAEIRASANLAATKMSECVLGQSKRVDFCGKGYHLMSFPQSAPHGVVFLHVTYVPAQEKNFTTAPAICHDGKAHFPREGVFVSNGTHWFVTQRNFYEPQIITTDNTFVSGNCDVVIGIVNNTVYDPLQPELDSFKEELDKYFKNHTSPDVDLGDISGINASVVNIQKEIDRLNEVAKNLNESLIDLQELGKYEQYIK

SEQ ID NO: 2404 - protein, 1211 aa, Artificial Sequence; identical to SEQ ID NO: 2359
  SARS-CoV-2/Iceland/247/2020__EPI_ISL_417575 spike protein (1-1211)(F970C_G999C)

SEQ ID NO: 2405 - protein, 1211 aa, Artificial Sequence
  SARS-CoV-2/Iceland/238/2020__EPI_ISL_417566 spike protein (1-1211)(F970C_G999C)
MFVFLVLLPLVSSQCVNLTTRTQLPPAYTNSFTRGVYYPDKVFRSSVLHSTQDLFLPFFSNVTWFHAIHVSGTNGTKRFDNPVLPFNDGVYFASTEKSNIIRGWIFGTTLDSKTQSLLIVNNATNVVIKVCEFQFCNDPFLGVYYHKNNKSWMESEFRVYSSANNCTFEYVSQPFLMDLEGKQGNFKNLREFVFKNIDGYFKIYSKHTPINLVRDLPQGFSALEPLVDLPIGINITRFQTLLALHRSYLTPGDSSSGWTAGAAAYYVGYLQPRTFLLKYNENGTITDAVDCALDPLSETKCTLKSFTVEKGIYQTSNFRVQPTESIVRFPNITNLCPFGEVFNATRFASVYAWNRKRISNCVADYSVLYNSASFSTFKCYGVSPTKLNDLCFTNVYADSFVIRGDEVRQIAPGQTGKIADYNYKLPDDFTGCVIAWNSNNLDSKVGGNYNYLYRLFRKSNLKPFERDISTEIYQAGSTPCNGVEGFNCYFPLQSYGFQPTNGVGYQPYRVVVLSFELLHAPATVCGPKKSTNLVKNKCVNFNFNGLTGTGVLTESNKKFLPFQQFGRDIADTTDAVRDPQTLEILDITPCSFGGVSVITPGTNTSNQVAVLYQGVNCTEVPVAIHADQLTPTWRVYSTGSNVFQTRAGCLIGAEHVNNSYECDIPIGAGICASYQTQTNSPRRARSVASQSIIAYTMSLGAENSVAYSNNSIAIPTNFTISVTTEILPVSMTKTSVDCTMYICGDSTECSNLLLQYGSFCTQLNRALTGIAVEQDKNTQEVFAQVKQIYKTPPIKDFGGFNFSQILPDPSKPSKRSFIEDLLFNKVTLADVGFIKQYGDCLGDIAARDLICAQKFNGLTVLPPLLTDEMIAQYTSALLAGTITSGWTFGAGAALQIPFAMQMAYRFNGIGVTQNVLYENQKLIANQFNSAIGKIQDSLSSTASALGKLQDVVNQNAQALNTLVKQLSSNCGAISSVLNDILSRLDKVEAEVQIDRLITCRLQSLQTYVTQQLIRAAEIRASANLAATKMSECVLGQSKRVDFCGKGYHLMSFPQSAPHGVVFLHVTYVPAQEKNFTTAPAICHDGKAHFPREGVFVSNGTHWFVTQRNFYEPQIITTDNTFVSGNCDVVIGIVNNTVYDPLQPELDSFKEELDKYFKNHTSPDVDLGDISGINASVVNIQKEIDRLNEVAKNLNESLIDLQELGKYEQYIK

SEQ ID NO: 2406 - protein, 1211 aa, Artificial Sequence
  SARS-CoV-2/Greece/16/2020__EPI_ISL_418265 spike protein (1-1211)(F970C_G999C)
MFVFLVLLPLVSSQCVNLTTRTQLPPAYTNSFTRGVYYPDKVFRSSVLHSTQDLFLPFFSNVTWFHAIHVSGTNGTKRFDNPVLPFNDGVYFASTEKSNIIRGWIFGTTLDSKTQSLLIVNNATNVVIKVCEFQFCNDPFLGVYYHKNNKSWMESEFRVYSSANNCTFEYVSQPFLMDLEGKQGNFKNLREFVFKNVDGYFKIYSKHTPINLVRDLPQGFSALEPLVDLPIGINITRFQTLLALHRSYLTPGDSSSGWTAGAAAYYVGYLQPRTFLLKYNENGTITDAVDCALDPLSETKCTLKSFTVEKGIYQTSNFRVQPTESIVRFPNITNLCPFGEVFNATRFASVYAWNRKRISNCVADYSVLYNSASFSTFKCYGVSPTKLNDLCFTNVYADSFVIRGDEVRQIAPGQTGKIADYNYKLPDDFTGCVIAWNSNNLDSKVGGNYNYLYRLFRKSNLKPFERDISTEIYQAGSTPCNGVEGFNCYFPLQSYGFQPTNGVGYQPYRVVVLSFELLHAPATVCGPKKSTNLVKNKCVNFNFNGLTGTGVLTESNKKFLPFQQFGRDIADTTDAVRDPQTLEILDITPCSFGGVSVITPGTNTSNQVAVLYQDVNCTEVPVAIHADQLTPTWRVYSTGSNVFQTRAGCLIGAEHVNNSYECDIPIGAGICASYQTQTNSPRRARSVASQSIIAYTMSLGAENSVAYSNNSIAIPTNFTISVTTEILPVSMTKTSVDCTMYICGDSTECSNLLLQYGSFCTQLNRALTGIAVEQDKNTQEVFAQVKQIYKTPPIKDFGGFNFSQILPDPSKPSKRSFIEDLLFNKVTLADAGFIKQYGDCLGDIAARDLICAQKFNGLTVLPPLLTDEMIAQYTSALLAGTITSGWTFGAGAALQIPFAMQMAYRFNGIGVTQNVLYENQKLIANQFNSAIGKIQDSLSSTASALGKLQDVVNQNAQALNTLVKQLSSNCGAISSVLNDILSRLDKVEAEVQIDRLITCRLQSLQTYVTQQLIRAAEIRASANLAATKMSECVLGQSKRVDFCGKGYHLMSFPQSAPHGVVFLHVTYVPAQEKNFTTAPAICHDGKAHFPREGVFVSNGTHWFVTQRNFYEPQIITTDNTFVSGNCDVVIGIVNNTVYDPLQPELDSFKEELDKYFKNHTSPDVDLGDISGINASVVNIQKEIDRLNEVAKNLNESLIDLQELGKYEQYIK

SEQ ID NO: 2407 - protein, 1211 aa, Artificial Sequence
  SARS-CoV-2/Iceland/319/2020__EPI_ISL_417648 spike protein (1-1211)(F970C_G999C)
MFVFLVLLPLVSSQCVNLTTRTQLPPAYTNSFTRGVYYPDKVFRSSVLHSTQDLFLPFFSNVTWFHAIHVSGTNGTKRFDNPVLPFNDGVYFASTEKSNIIRGWIFGTTLDSKTQSLLIVNNATNVVIKVCEFQFCNDPFLGVYYHKNNKSWMESEFRVYSSANNCTFEYVSQPFLIDLEGKQGNFKNLREFVFKNIDGYFKIYSKHTPINLVRDLPQGFSALEPLVDLPIGINITRFQTLLALHRSYLTPGDSSSGWTAGAAAYYVGYLQPRTFLLKYNENGTITDAVDCALDPLSETKCTLKSFTVEKGIYQTSNFRVQPTESIVRFPNITNLCPFGEVFNATRFASVYAWNRKRISNCVADYSVLYNSASFSTFKCYGVSPTKLNDLCFTNVYADSFVIRGDEVRQIAPGQTGKIADYNYKLPDDFTGCVIAWNSNNLDSKVGGNYNYLYRLFRKSNLKPFERDISTEIYQAGSTPCNGVEGFNCYFPLQSYGFQPTNGVGYQPYRVVVLSFELLHAPATVCGPKKSTNLVKNKCVNFNFNGLTGTGVLTESNKKFLPFQQFGRDIADTTDAVRDPQTLEILDITPCSFGGVSVITPGTNTSNQVAVLYQGVNCTEVPVAIHADQLTPTWRVYSTGSNVFQTRAGCLIGAEHVNNSYECDIPIGAGICASYQTQTNSPRRARSVASQSIIAYTMSLGAENSVAYSNNSIAIPTNFTISVTTEILPVSMTKTSVDCTMYICGDSTECSNLLLQYGSFCTQLNRALTGIAVEQDKNTQEVFAQVKQIYKTPPIKDFGGFNFSQILPDPSKPSKRSFIEDLLFNKVTLADAGFIKQYGDCLGDIAARDLICAQKFNGLTVLPPLLTDEMIAQYTSALLAGTITSGWTFGAGAALQIPFAMQMAYRFNGIGVTQNVLYENQKLIANQFNSAIGKIQDSLSSTASALGKLQDVVNQNAQALNTLVKQLSSNCGAISSVLNDILSRLDKVEAEVQIDRLITCRLQSLQTYVTQQLIRAAEIRASANLAATKMSECVLGQSKRVDFCGKGYHLMSFPQSAPHGVVFLHVTYVPAQEKNFTTAPAICHDGKAHFPREGVFVSNGTHWFVTQRNFYEPQIITTDNTFVSGNCDVVIGIVNNTVYDPLQPELDSFKEELDKYFKNHTSPDVDLGDISGINASVVNIQKEIDRLNEVAKNLNESLIDLQELGKYEQYIK

SEQ ID NO: 2408 - protein, 1211 aa, Artificial Sequence
  SARS-CoV-2/Congo/94/2020__EPI_ISL_417947 spike protein (1-1211)(F970C_G999C)
MFVFLVLLPLVSSQCVNLTTRTQLPPAYTNSFTRGVYYPDKVFRSSVLHSTQDLFLPFFSNVTWFHAIHVSGTNGTKRFDNPVLPFNDGVYFASTEKSNIIRGWIFGTTLDSKTQSLLIVNNATNVVIKVCEFQFCNDPFLGVYYHKNNKSWMESEFRVYSSANNCTFEYVSQPFLMDLEGKQGNFKNLREFVFKNIDGYFKIYSKHTPINLVRDLPQGFSALEPLVDLPIGINITRFQTLLALHRSYLTPGDSSSGWTAGAAAYYVGYLQPRTFLLKYNENGTITDAVDCALDPLSETKCTLKSFTVEKGIYQTSNFRVQPTESIVRFPNITNLCPFGEVFNATRFASVYAWNRKRISNCVADYSVLYNSASFSTFKCYGVSPTKLNDLCFTNVYADSFVIRGDEVRQIAPGQTGKIADYNYKLPDDFTGCVIAWNSNNLDSKVGGNYNYLYRLFRKSNLKPFERDISTEIYQAGSTPCNGVEGFNCYFPLQSYGFQPTNGVGYQPYRVVVLSFELLHAPATVCGPKKSTNLVKNKCVNFNFNGLTGTGVLTESNKKFLPFQQFGRDIADTTDAVRDPQTLEILDITPCSFGGVSVITPGTNTSNQVAVLYQGVNCTEVPVAIHADQLTPTWRVYSTGSNVFQTRAGCLIGAEHVNNSYECDIPIGAGICASYQTQTNSPRRARSVASQSIIAYTMSLGAENSVAYSNNSIAIPTNFTISVTTEILPVSMTKTSVDCTMYICGDSTECSNLLLQYGSFCTQLNRALTGIAVEQDKNTQEVFAQVKQIYKTPPIKDFGGFNFSQILPDPSKPSKRSFIEDILFNKVTLADAGFIKQYGDCLGDIAARDLICAQKFNGLTVLPPLLTDEMIAQYTSALLAGTITSGWTFGAGAALQIPFAMQMAYRFNGIGVTQNVLYENQKLIANQFNSAIGKIQDSLSSTASALGKLQDVVNQNAQALNTLVKQLSSNCGAISSVLNDILSRLDKVEAEVQIDRLITCRLQSLQTYVTQQLIRAAEIRASANLAATKMSECVLGQSKRVDFCGKGYHLMSFPQSAPHGVVFLHVTYVPAQEKNFTTAPAICHDGKAHFPREGVFVSNGTHWFVTQRNFYEPQIITTDNTFVSGNCDVVIGIVNNTVYDPLQPELDSFKEELDKYFKNHTSPDVDLGDISGINASVVNIQKEIDRLNEVAKNLNESLIDLQELGKYEQYIK

SEQ ID NO: 2409 - protein, 1211 aa, Artificial Sequence
  SARS-CoV-2/Congo/158/2020__EPI_ISL_417950 spike protein (1-1211)(F970C_G999C)
MFVFLVLLPLVSSQCVNLTTRTQLPPAYTNSFTRGVYYPDKVFRSSVLHSTQDLFLPFFSNVTWFHAIHVSGTNGTKRFDNPVLPFNDGVYFASTEKSNIIRGWIFGTTLDSKTQSLLIVNNATNVVIKVCEFQFCNDPFLGVYYHKNNKSWMESEFRVYSSANNCTFEYVSQPFLMDLEGKQGNFKNLREFVFKNIDGYFKIYSKHTPINLVRDLPQGFSALEPLVDLPIGINITRFQTLLALHRSYLTPGDSSSGWTAGAAAYYVGYLQPRTFLLKYNENGTITDAVDCALDPLSETKCTLKSFTVEKGIYQTSNFRVQPTESIVRFPNITNLCPFGEVFNATRFASVYAWNRKRISNCVADYSVLYNSASFSTFKCYGVSPTKLNDLCFTNVYADSFVIRGDEVRQIAPGQTGKIADYNYKLPDDFTGCVIAWNSNNLDSKVGGNYNYLYRLFRKSNLKPFERDISTEIYQAGSTPCNGVEGFNCYFPLQSYGFQPTNGVGYQPYRVVVLSFELLHAPATVCGPKKSTNLVKNKCVNFNFNGLTGTGVLTESNKKFLPFQQFGRDIADTTDAVRDPQTLEILDITPCSFGGVSVITPGTNTSNQVAVLYQDVNCTEVPVAIHADQLTPTWRVYSTGSNVFQTRAGCLIGAEHVNNSYECDIPIGAGICASYQTQTNSPRRARSVASQSIIAYTMSLGAENSVAYSNNSIAIPTNFTISVTTEILPVSMTKTSVDCTMYICGDSTECSNLLLQYGSFCTQLNRALTGIAVEQDKNTQEVFAQVKQIYKTPPIKDFGGFNFSQILPDPSKPSKRSFIEDLLFNKVTLADAGFIKQYGDCLGDIAARDLICAQKFNGLTVLPPLLTDEMIAQYTSALLAGTITSGWTFGAGAALQIPFAMQMAYRFNGIGVTQNVLYENQKLIANQFNSAIGKIQDSLSSTASALGKLQDVVNQNAQALNTLVKQLSSNCGAISSVLNDILSRLDKVEAEVQIDRLITCRLQSLQTYVTQQLIRAAEIRASANLAATKMSECVLGQSKRVDFCGKGYHLMSFPQSAPHGVVFLHVTYVPAQEKNFTTAPAICHDGKAHFPREGVFVSNGTHWFVTQRNFYEPQIITTDNTFLSGNCDVVIGIVNNTVYDPLQPELDSFKEELDKYFKNHTSPDVDLGDISGINASVVNIQKEIDRLNEVAKNLNESLIDLQELGKYEQYIK

SEQ ID NO: 2410 - protein, 1211 aa, Artificial Sequence
  SARS-CoV-2/USA/UT-00034/2020__EPI_ISL_417977 spike protein (1-1211)(F970C_G999C)
MFVFLVLLPLVSSQCVNLTTRTQLPPAYTNSFTRGVYYPDKVFRSSVLHSTQDLFLPFFSNVTWFHAIHVSGTNGTKRFDNPVLPFNDGVYFASTEKSNIIRGWIFGTTLDSKTQSLLIVNNATNVVIKVCEFQFCNDPFLGVYYYKNNKSWMESEFRVYSSANNCTFEYVSQPFLMDLEGKQGNFKNLREFVFKNIDGYFKIYSKHTPINLVRDLPQGFSALEPLVDLPIGINITRFQTLLALHRSYLTPGDSSSGWTAGAAAYYVGYLQPRTFLLKYNENGTITDAVDCALDPLSETKCTLKSFTVEKGIYQTSNFRVQPTESIVRFPNITNLCPFGEVFNATRFASVYAWNRKRISNCVADYSVLYNSASFSTFKCYGVSPTKLNDLCFTNVYADSFVIRGDEVRQIAPGQTGKIADYNYKLPDDFTGCVIAWNSNNLDSKVGGNYNYLYRLFRKSNLKPFERDISTEIYQAGSTPCNGVEGFNCYFPLQSYGFQPTNGVGYQPYRVVVLSFELLHAPATVCGPKKSTNLVKNKCVNFNFNGLTGTGVLTESNKKFLPFQQFGRDIADTTDAVRDPQTLEILDITPCSFGGVSVITPGTNTSNQVAVLYQGVNCTEVPVAIHADQLTPTWRVYSTGSNVFQTRAGCLIGAEHVNNSYECDIPIGAGICASYQTQTNSPRRARSVASQSIIAYTMSLGAENSVAYSNNSIAIPTNFTISVTTEILPVSMTKTSVDCTMYICGDSTECSNLLLQYGSFCTQLNRALTGIAVEQDKNTQEVFAQVKQIYKTPPIKDFGGFNFSQILPDPSKPSKRSFIEDLLFNKVTLADAGFIKQYGDCLGDIAARDLICAQKFNGLTVLPPLLTDEMIAQYTSALLAGTITSGWTFGAGAALQIPFAMQMAYRFNGIGVTQNVLYENQKLIANQFNSAIGKIQDSLSSTASALGKLQDVVNQNAQALNTLVKQLSSNCGAISSVLNDILSRLDKVEAEVQIDRLITCRLQSLQTYVTQQLIRAAEIRASANLAATKMSECVLGQSKRVDFCGKGYHLMSFPQSAPHGVVFLHVTYVPAQEKNFTTAPAICHDGKAHFPREGVFVSNGTHWFVTQRNFYEPQIITTDNTFVSGNCDVVIGIVNNTVYDPLQPELDSFKEELDKYFKNHTSPDVDLGDISGINASVVNIQKEIDRLNEVAKNLNESLIDLQELGKYEQYIK

SEQ ID NO: 2411 - protein, 1211 aa, Artificial Sequence
  SARS-CoV-2/USA/UT-00033/2020__EPI_ISL_417976 spike protein (1-1211)(F970C_G999C)
MFVFLVLLPLVSSQCVNLTTRTQLPPAYTNSFTRGVYYPDKVFRSSVLHSTQDLFLPFFSNVTWFHAIHVSGTNGTKRFDNPVLPFNDGVYFASTEKSNIIRGWIFGTTLDSKTQSLLIVNNATNVVIKVCEFQFCNDPFLGVYYHKNNKSWMESEFRVYSSANNCTFEYVSQPFLMDLEGKQGNFKNLREFVFKNIDGYFKIYSKHTPINLVRDLPQGFSALEPLVDLPIGINITRFQTLLALHRSYLTPGDSSSGLTAGAAAYYVGYLQPRTFLLKYNENGTITDAVDCALDPLSETKCTLKSFTVEKGIYQTSNFRVQPTESIVRFPNITNLCPFGEVFNATRFASVYAWNRKRISNCVADYSVLYNSASFSTFKCYGVSPTKLNDLCFTNVYADSFVIRGDEVRQIAPGQTGKIADYNYKLPDDFTGCVIAWNSNNLDSKVGGNYNYLYRLFRKSNLKPFERDISTEIYQAGSTPCNGVEGFNCYFPLQSYGFQPTNGVGYQPYRVVVLSFELLHAPATVCGPKKSTNLVKNKCVNFNFNGLTGTGVLTESNKKFLPFQQFGRDIADTTDAVRDPQTLEILDITPCSFGGVSVITPGTNTSNQVAVLYQGVNCTEVPVAIHADQLTPTWRVYSTGSNVFQTRAGCLIGAEHVNNSYECDIPIGAGICASYQTQTNSPRRARSVASQSIIAYTMSLGAENSVAYSNNSIAIPTNFTISVTTEILPVSMTKTSVDCTMYICGDSTECSNLLLQYGSFCTQLNRALTGIAVEQDKNTQEVFAQVKQIYKTPPIKDFGGFNFSQILPDPSKPSKRSFIEDLLFNKVTLADAGFIKQYGDCLGDIAARDLICAQKFNGLTVLPPLLTDEMIAQYTSALLAGTITSGWTFGAGAALQIPFAMQMAYRFNGIGVTQNVLYENQKLIANQFNSAIGKIQDSLSSTASALGKLQDVVNQNAQALNTLVKQLSSNCGAISSVLNDILSRLDKVEAEVQIDRLITCRLQSLQTYVTQQLIRAAEIRASANLAATKMSECVLGQSKRVDFCGKGYHLMSFPQSAPHGVVFLHVTYVPAQEKNFTTAPAICHDGKAHFPREGVFVSNGTHWFVTQRNFYEPQIITTDNTFVSGNCDVVIGIVNNTVYDPLQPELDSFKEELDKYFKNHTSPDVDLGDISGINASVVNIQKEIDRLNEVAKNLNESLIDLQELGKYEQYIK

SEQ ID NO: 2412 - protein, 1211 aa, Artificial Sequence
  SARS-CoV-2/USA/WI-13/2020__EPI_ISL_417516 spike protein (1-1211)(F970C_G999C)
MFVFLVLLPLVSSQCVNLTTRTQLPPAYTNSFTRGVYYPDKVFRSSVLHSTQDLFLPFFSNVTWFHAIHVSGTNGTKRFDNPVLPFNDGVYFASTEKSNIIRGWIFGTTLDSKTQSLLIVNNATNVVIKVCEFQFCNDPFLGVYYHKNNKSWMESEFRVYSSANNCTFEYVSQPFLMDLEGKQGNFKNLREFVFKNIDGYFKIYSKHTPINLVRDLPQGFSALEPLVDLPIGINITRFQTLLALHRSYLTPGDSSSGWTAGAAAYYVGYLQPRTFLLKYNENGTITDAVDCALDPLSETKCTLKSFTVEKGIYQTSNFRVLPTESIVRFPNITNLCPFGEVFNATRFASVYAWNRKRISNCVADYSVLYNSASFSTFKCYGVSPTKLNDLCFTNVYADSFVIRGDEVRQIAPGQTGKIADYNYKLPDDFTGCVIAWNSNNLDSKVGGNYNYLYRLFRKSNLKPFERDISTEIYQAGSTPCNGVEGFNCYFPLQSYGFQPTNGVGYQPYRVVVLSFELLHAPATVCGPKKSTNLVKNKCVNFNFNGLTGTGVLTESNKKFLPFQQFGRDIADTTDAVRDPQTLEILDITPCSFGGVSVITPGTNTSNQVAVLYQGVNCTEVPVAIHADQLTPTWRVYSTGSNVFQTRAGCLIGAEHVNNSYECDIPIGAGICASYQTQTNSPRRARSVASQSIIAYTMSLGAENSVAYSNNSIAIPTNFTISVTTEILPVSMTKTSVDCTMYICGDSTECSNLLLQYGSFCTQLNRALTGIAVEQDKNTQEVFAQVKQIYKTPPIKDFGGFNFSQILPDPSKPSKRSFIEDLLFNKVTLADAGFIKQYGDCLGDIAARDLICAQKFNGLTVLPPLLTDEMIAQYTSALLAGTITSGWTFGAGAALQIPFAMQMAYRFNGIGVTQNVLYENQKLIANQFNSAIGKIQDSLSSTASALGKLQDVVNQNAQALNTLVKQLSSNCGAISSVLNDILSRLDKVEAEVQIDRLITCRLQSLQTYVTQQLIRAAEIRASANLAATKMSECVLGQSKRVDFCGKGYHLMSFPQSAPHGVVFLHVTYVPAQEKNFTTAPAICHDGKAHFPREGVFVSNGTHWFVTQRNFYEPQIITTDNTFVSGNCDVVIGIVNNTVYDPLQPELDSFKEELDKYFKNHTSPDVDLGDISGINASVVNIQKEIDRLNEVAKNLNESLIDLQELGKYEQYIK

SEQ ID NO: 2413 - protein, 1210 aa, Artificial Sequence
  SARS-CoV-2/India/1-27/2020__EPI_ISL_413522 spike protein (1-1210)(F969C_G998C)
MFVFLVLLPLVSSQCVNLTTRTQLPPAYTNSFTRGVYYPDKVFRSSVLHSTQDLFLPFFSNVTWFHAIHVSGTNGTKRFDNPVLPFNDGVYFASTEKSNIIRGWIFGTTLDSKTQSLLIVNNATNVVIKVCEFQFCNDPFLGVYHKNNKSWMESEFRVYSSANNCTFEYVSQPFLMDLEGKQGNFKNLREFVFKNIDGYFKIYSKHTPINLVRDLPQGFSALEPLVDLPIGINITRFQTLLALHRSYLTPGDSSSGWTAGAAAYYVGYLQPRTFLLKYNENGTITDAVDCALDPLSETKCTLKSFTVEKGIYQTSNFRVQPTESIVRFPNITNLCPFGEVFNATRFASVYAWNRKRISNCVADYSVLYNSASFSTFKCYGVSPTKLNDLCFTNVYADSFVIRGDEVIQIAPGQTGKIADYNYKLPDDFTGCVIAWNSNNLDSKVGGNYNYLYRLFRKSNLKPFERDISTEIYQAGSTPCNGVEGFNCYFPLQSYGFQPTNGVGYQPYRVVVLSFELLHAPATVCGPKKSTNLVKNKCVNFNFNGLTGTGVLTESNKKFLPFQQFGRDIADTTDAVRDPQTLEILDITPCSFGGVSVITPGTNTSNQVAVLYQDVNCTEVPVAIHADQLTPTWRVYSTGSNVFQTRAGCLIGAEHVNNSYECDIPIGAGICASYQTQTNSPRRARSVASQSIIAYTMSLGAENSVAYSNNSIAIPTNFTISVTTEILPVSMTKTSVDCTMYICGDSTECSNLLLQYGSFCTQLNRALTGIAVEQDKNTQEVFAQVKQIYKTPPIKDFGGFNFSQILPDPSKPSKRSFIEDLLFNKVTLADAGFIKQYGDCLGDIAARDLICAQKFNGLTVLPPLLTDEMIAQYTSALLAGTITSGWTFGAGAALQIPFAMQMAYRFNGIGVTQNVLYENQKLIANQFNSAIGKIQDSLSSTASALGKLQDVVNQNAQALNTLVKQLSSNCGAISSVLNDILSRLDKVEAEVQIDRLITCRLQSLQTYVTQQLIRAAEIRASANLAATKMSECVLGQSKRVDFCGKGYHLMSFPQSAPHGVVFLHVTYVPAQEKNFTTAPAICHDGKAHFPREGVFVSNGTHWFVTQRNFYEPQIITTDNTFVSGNCDVVIGIVNNTVYDPLQPELDSFKEELDKYFKNHTSPDVDLGDISGINASVVNIQKEIDRLNEVAKNLNESLIDLQELGKYEQYIK

SEQ ID NO: 2414 - protein, 1205 aa, Artificial Sequence
  SARS-CoV-2/pangolin/Guangxi/P4L/2017__EPI_ISL_410538 spike protein (1-1205)(F964C_G993C)
MFVFLFVLPLVSSQCVNLTTRTGIPPGYTNSSTRGVYYPDKVFRSSILHLTQDLFLPFFSNVTWFNTINYQGGFKKFDNPVLPFNDGVYFASTEKSNIIRGWIFGTTLDARTQSLLIVNNATNVVIKVCEFQFCTDPFLGVYYHNNNKTWVENEFRVYSSANNCTFEYISQPFLMDLEGKQGNFKNLREFVFKNVDGYFKIYSKHTPIDLVRDLPRGFAALEPLVDLPIGINITRFQTLLALHRSYLTPGNLESGWTTGAAAYYVGYLQQRTFLLSYNQNGTITDAVDCSLDPLSETKCTLKSLTVEKGIYQTSNFRVQPTISIVRFPNITNLCPFGEVFNASKFASVYAWNRKRISNCVADYSVLYNSTSFSTFKCYGVSPTKLNDLCFTNVYADSFVVKGDEVRQIAPGQTGVIADYNYKLPDDFTGCVIAWNSVKQDALTGGNYGYLYRLFRKSKLKPFERDISTEIYQAGSTPCNGQVGLNCYYPLERYGFHPTTGVNYQPFRVVVLSFELLNGPATVCGPKLSTTLVKDKCVNFNFNGLTGTGVLTTSKKQFLPFQQFGRDISDTTDAVRDPQTLEILDITPCSFGGVSVITPGTNTSNQVAVLYQDVNCTEVPMAIHAEQLTPAWRVYSAGANVFQTRAGCLVGAEHVNNSYECDIPVGAGICASYHSMSSLRSVNQRSIIAYTMSLGAENSVAYSNNSIAIPTNFTISVTTEILPVSMTKTSVDCTMYICGDSIECSNLLLQYGSFCTQLNRALTGIAVEQDKNTQEVFAQVKQIYKTPPIKDFGGFNFSQILPDPSKPSKRSFIEDLLFNKVTLADAGFIKQYGDCLGDIAARDLICAQKFNGLTVLPPLLTDEMIAQYTSALLAGTITSGWTFGAGAALQIPFAMQMAYRFNGIGVTQNVLYENQKLIANQFNSAIGKIQDSLSSTASALGKLQDVVNQNAQALNTLVKQLSSNCGAISSVLNDILSRLDKVEAEVQIDRLITCRLQSLQTYVTQQLIRAAEIRASANLAATKMSECVLGQSKRVDFCGKGYHLMSFPQSAPHGVVFLHVTYVPAQEKNFTTAPAICHEGKAHFPREGVFVSNGTHWFITQRNFYEPQIITTDNTFVSGSCDVVIGIVNNTVYDPLQPELDSFKEELDKYFKNHTSPDVDLGDISGINASVVNIQKEIDRLNEVAKNLNESPIDLQELGKYEQYIK

SEQ ID NO: 2415 - protein, 1205 aa, Artificial Sequence
  SARS-CoV-2/pangolin/Guangxi/P5L/2017__EPI_ISL_410540 spike protein (1-1205)(F964C_G993C)
MFVFLFVLPLVSSQCVNLTTRTGIPPGYTNSSTRGVYYPDKVFRSSILHLTQDLFLPFFSNVTWFNTINYQGGFKKFDNPVLPFNDGVYFASTEKSNIIRGWIFGTTLDARTQSLLIVNNATNVVIKVCEFQFCTDPFLGVYYHNNNKTWVENEFRVYSSANNCTFEYISQPFLMDLEGKQGNFKNLREFVFKNVDGYFKIYSKHTPIDLVRDLPRGFAALEPLVDLPIGINITRFQTLLALHRSYLTPGKLESGWTTGAAAYYVGYLQQRTFLLSYNQNGTITDAVDCSLDPLSETKCTLKSLTVEKGIYQTSNFRVQPTISIVRFPNITNLCPFGEVFNASKFASVYAWNRKRISNCVADYSVLYNSTSFSTFKCYGVSPTKLNDLCFTNVYADSFVVKGDEVRQIAPGQTGVIADYNYKLPDDFTGCVIAWNSVKQDALTGGNYGYLYRLFRKSKLKPFERDISTEIYQAGSTPCNGQVGLNCYYPLERYGFHPTTGVNYQPFRVVVLSFELLNGPATVCGPKLSTTLVKDKCVNFNFNGLTGTGVLTTSKKQFLPFQQFGRDISDTTDAVRDPQTLEILDITPCSFGGVSVITPGTNTSNQVAVLYQDVNCTEVPMAIHAEQLTPAWRVYSAGANVFQTRAGCLVGAEHVNNSYECDIPVGAGICASYHSMSSFRSVNQRSIIAYTMSLGAENSVAYSNNSIAIPTNFTISVTTEILPVSMTKTSVDCTMYICGDSIECSNLLLQYGSFCTQLNRALTGIAVEQDKNTQEVFAQVKQIYKTPPIKDFGGFNFSQILPDPSKPSKRSFIEDLLFNKVTLADAGFIKQYGDCLGDIAARDLICAQKFNGLTVLPPLLTDEMIAQYTSALLAGTITSGWTFGAGAALQIPFAMQMAYRFNGIGVTQNVLYENQKLIANQFNSAIGKIQDSLSSTASALGKLQDVVNQNAQALNTLVKQLSSNCGAISSVLNDILSRLDKVEAEVQIDRLITCRLQSLQTYVTQQLIRAAEIRASANLAATKMSECVLGQSKRVDFCGKGYHLMSFPQSAPHGVVFLHVTYVPAQEKNFTTAPAICHEGKAHFPREGVFVSNGTHWFITQRNFYEPQIITTDNTFVSGSCDVVIGIVNNTVYDPLQPELDSFKEELDKYFKNHTSPDVDLGDISGINASVVNIQKEIDRLNEVAKNLNESLIDLQELGKYEQYIK

SEQ ID NO: 2416 - protein, 1205 aa, Artificial Sequence
  SARS-CoV-2/pangolin/Guangxi/P5E/2017__EPI_ISL_410541 spike protein (1-1205)(F964C_G993C)
MFVFLFVLPLVSSQCVNLTTRTGIPPGYTNSSTRGVYYPDKVFRSSILHLTQDLFLPFFSNVTWFNTITYQGGSKKFDNPVLPFNDGVYFASTEKSNIIRGWIFGTTLDARTQSLLIVNNATNVVIKVCEFQFCTDPFLGVYYHNNNKTWVENEFRVYSSANNCTFEYISQPFLMDLEGKQGNFKNLREFVFKNVDGYFKIYSKHTPIDLVRDLPRGFAALEPLVDLPIGINITRFQTLLALHRSYLTPGKLESGWTTGAAAYYVGYLQQRTFLLSYNQNGTITDAVDCSLDPLSETKCTLKSLTVEKGIYQTSNFRVQPTISIVRFPNITNLCPFGEVFNASKFASVYAWNRKRISNCVADYSVLYNSTSFSTFKCYGVSPTKLNDLCFTNVYADSFVVKGDEVRQIAPGQTGVIADYNYKLPDDFTGCVIAWNSVKQDALTGDNYGYLYRLFRKSKLKPFERDISTEIYQAGSTPCNGQVGLNCYYPLERYGFHPTTGVNYQPFRVVVLSFELLNGPATVCGPKLSTTLVKDKCVNFNFNGLTGTGVLTTSKKQFLPFQQFGRDISDTTDAVRDPQTLEILDITPCSFGGVSVITPGTNTSNQVAVLYQDVNCTEVPMAIHAEQLTPAWRVYSAGANVFQTRAGCLVGAEHVNNSYECDIPVGAGICASYHSMSSFRSVNQRSIIAYTMSLGAENSVAYSNNSIAIPTNFTISVTTEILPVSMTKTSVDCTMYICGDSIECSNLLLQYGSFCTQLNRALTGIAVEQDKNTQEVFAQVKQIYKTPPIKDFGGFNFSQILPDPSKPSKRSFIEDLLFNKVTLADAGFIKQYGDCLGDIAARDLICAQKFNGLTVLPPLLTDEMIAQYTSALLAGTITSGWTFGAGAALQIPFAMQMAYRFNGIGVTQNVLYENQKLIANQFNSAIGKIQDSLSSTASALGKLQDVVNQNAQALNTLVKQLSSNCGAISSVLNDILSRLDKVEAEVQIDRLITCRLQSLQTYVTQQLIRAAEIRASANLAATKMSECVLGQSKRVDFCGKGYHLMSFPQSAPHGVVFLHVTYVPAQEKNFTTAPAICHEGKAHFPREGVFVSNGTHWFITQRNFYEPQIITTDNTFVSGSCDVVIGIVNNTVYDPLQPELDSFKEELDKYFKNHTSPDVDLGDISGINASVVNIQKEIDRLNEVAKNLNESLIDLQELGKYEQYIK

SEQ ID NO: 2417 - protein, 1203 aa, Artificial Sequence
  SARS-CoV-2/pangolin/Guangxi/P1E/2017__EPI_ISL_410539 spike protein (1-1203)(F962C_G991C)
MFVFLFVLPLVSSQCVNLTTRTGIQPGYTNSSTRGVYYPDKVFRSSILHLTQDLFLPFFSNVTWFNTINYQGGFKKFDNPVLPFNDGVYFASTEKSNIIRGWIFGTTLDARTQSLLIVNNATNVVIKVCEFQFCTDPFLGVYYHNNNKTWVENEFRVYSSANNCTFEYISQPFLMDLEGKQGNFKNLREFVFKNVDGYFKIYSKHTPIDLVRDLPRGFAALEPLVDLPIGINITRFQTLLALHRSYLTPGKLESGWTTGAAAYYVGYLQQRTFLLSYNQNGTITDAVDCSLDPLSETKCTLKSLTVEKGIYQTSNFRVQPTISIVRFPNITNLCPFGEVFNASKFASVYAWNRKRISNCVADYSVLYNSTSFSTFKCYGVSPTKLNDLCFTNVYADSFVVKGDEVRQIAPGQTGVIADYNYKLPDDFTGCVIAWNSVKQDALTGGNYLYRLFRKSKLKPFERDISTEIYQAGSTPCNGQVGLNCYYPLERYGFHPTTGVNYQPFRVVVLSFELLNGPATVCGPKLSTTLVKDKCVNFNFNGLTGTGVLTTSKKQFLPFQQFGRDISDTTDAVRDPQTLEILDITPCSFGGVSVITPGTNTSNQVAVLYQDVNCTEVPMAIHAEQLTPAWRVYSAGANVFQTRAGCLVGAEHVNNSYECDIPVGAGICASYHSMSSLRSVNQRSIIAYTMSLGAENSVAYSNNSIAIPTNFTISVTTEILPVSMTKTSVDCTMYICGDSIECSNLLLQYGSFCTQLNRALTGIAVEQDKNTQEVFAQVKQIYKTPPIKDFGGFNFSQILPDPSKPSKRSFIEDLLFNKVTLADAGFIKQYGDCLGDIAARDLICAQKFNGLTVLPPLLTDEMIAQYTSALLAGTITSGWTFGAGAALQIPFAMQMAYRFNGIGVTQNVLYENQKLIANQFNSAIGKIQDSLSSTASALGKLQDVVNQNAQALNTLVKQLSSNCGAISSVLNDILSRLDKVEAEVQIDRLITCRLQSLQTYVTQQLIRAAEIRASANLAATKMSECVLGQSKRVDFCGKGYHLMSFPQSAPHGVVFLHVTYVPAQEKNFTTAPAICHEGKAHFPREGVFVSNGTHWFITQRNFYEPQIITTDNTFVSGSCDVVIGIVNNTVYDPLQPELDSFKEELDKYFKNHTSPDVDLGDISGINASVVNIQKEIDRLNEVAKNLNESLIDLQELGKYEQYIK

SEQ ID NO: 2418 - protein, 1211 aa, Artificial Sequence
  SARS-CoV-2/Wuhan/WIV05/2019__EPI_ISL_402128 spike protein (1-1211)(A972C_R995C)
MFVFLVLLPLVSSQCVNLTTRTQLPPAYTNSFTRGVYYPDKVFRSSVLHSTQDLFLPFFSNVTWFHAIHVSGTNGTKRFDNPVLPFNDGVYFASTEKSNIIRGWIFGTTLDSKTQSLLIVNNATNVVIKVCEFQFCNDPFLGVYYHKNNKSWMESEFRVYSSANNCTFEYVSQPFLMDLEGKQGNFKNLREFVFKNIDGYFKIYSKHTPINLVRDLPQGFSALEPLVDLPIGINITRFQTLLALHRSYLTPGDSSSGWTAGAAAYYVGYLQPRTFLLKYNENGTITDAVDCALDPLSETKCTLKSFTVEKGIYQTSNFRVQPTESIVRFPNITNLCPFGEVFNATRFASVYAWNRKRISNCVADYSVLYNSASFSTFKCYGVSPTKLNDLCFTNVYADSFVIRGDEVRQIAPGQTGKIADYNYKLPDDFTGCVIAWNSNNLDSKVGGNYNYLYRLFRKSNLKPFERDISTEIYQAGSTPCNGVEGFNCYFPLQSYGFQPTNGVGYQPYRVVVLSFELLHAPATVCGPKKSTNLVKNKCVNFNFNGLTGTGVLTESNKKFLPFQQFGRDIADTTDAVRDPQTLEILDITPCSFGGVSVITPGTNTSNQVAVLYQDVNCTEVPVAIHADQLTPTWRVYSTGSNVFQTRAGCLIGAEHVNNSYECDIPIGAGICASYQTQTNSPRRARSVASQSIIAYTMSLGAENSVAYSNNSIAIPTNFTISVTTEILPVSMTKTSVDCTMYICGDSTECSNLLLQYGSFCTQLNRALTGIAVEQDKNTQEVFAQVKQIYKTPPIKDFGGFNFSQILPDPSKPSKRSFIEDLLFNKVTLADAGFIKQYGDCLGDIAARDLICAQKFNGLTVLPPLLTDEMIAQYTSALLAGTITSGWTFGAGAALQIPFAMQMAYRFNGIGVTQNVLYENQKLIANQFNSAIGKIQDSLSSTASALGKLQDVVNQNAQALNTLVKQLSSNFGCISSVLNDILSRLDKVEAEVQIDCLITGRLQSLQTYVTQQLIRAAEIRASANLAATKMSECVLGQSKRVDFCGKGYHLMSFPQSAPHGVVFLHVTYVPAQEKNFTTAPAICHDGKAHFPREGVFVSNGTHWFVTQRNFYEPQIITTDNTFVSGNCDVVIGIVNNTVYDPLQPELDSFKEELDKYFKNHTSPDVDLGDISGINASVVNIQKEIDRLNEVAKNLNESLIDLQELGKYEQYIK

SEQ ID NO: 2419 - protein, 1207 aa, Artificial Sequence
  SARS-CoV-2/bat/Yunnan/RaTG13/2013__EPI_ISL_402131 spike protein (1-1207)(A968C_R991C)
MFVFLVLLPLVSSQCVNLTTRTQLPPAYTNSSTRGVYYPDKVFRSSVLHLTQDLFLPFFSNVTWFHAIHVSGTNGIKRFDNPVLPFNDGVYFASTEKSNIIRGWIFGTTLDSKTQSLLIVNNATNVVIKVCEFQFCNDPFLGVYYHKNNKSWMESEFRVYSSANNCTFEYVSQPFLMDLEGKQGNFKNLREFVFKNIDGYFKIYSKHTPINLVRDLPPGFSALEPLVDLPIGINITRFQTLLALHRSYLTPGDSSSGWTAGAAAYYVGYLQPRTFLLKYNENGTITDAVDCALDPLSETKCTLKSFTVEKGIYQTSNFRVQPTDSIVRFPNITNLCPFGEVFNATTFASVYAWNRKRISNCVADYSVLYNSTSFSTFKCYGVSPTKLNDLCFTNVYADSFVITGDEVRQIAPGQTGKIADYNYKLPDDFTGCVIAWNSKHIDAKEGGNFNYLYRLFRKANLKPFERDISTEIYQAGSKPCNGQTGLNCYYPLYRYGFYPTDGVGHQPYRVVVLSFELLNAPATVCGPKKSTNLVKNKCVNFNFNGLTGTGVLTESNKKFLPFQQFGRDIADTTDAVRDPQTLEILDITPCSFGGVSVITPGTNASNQVAVLYQDVNCTEVPVAIHADQLTPTWRVYSTGSNVFQTRAGCLIGAEHVNNSYECDIPIGAGICASYQTQTNSRSVASQSIIAYTMSLGAENSVAYSNNSIAIPTNFTISVTTEILPVSMTKTSVDCTMYICGDSTECSNLLLQYGSFCTQLNRALTGIAVEQDKNTQEVFAQVKQIYKTPPIKDFGGFNFSQILPDPSKPSKRSFIEDLLFNKVTLADAGFIKQYGDCLGDIAARDLICAQKFNGLTVLPPLLTDEMIAQYTSALLAGTITSGWTFGAGAALQIPFAMQMAYRFNGIGVTQNVLYENQKLIANQFNSAIGKIQDSLSSTASALGKLQDVVNQNAQALNTLVKQLSSNFGCISSVLNDILSRLDKVEAEVQIDCLITGRLQSLQTYVTQQLIRAAEIRASANLAATKMSECVLGQSKRVDFCGKGYHLMSFPQSAPHGVVFLHVTYVPAQEKNFTTAPAICHDGKAHFPREGVFVSNGTHWFVTQRNFYEPQIITTDNTFVSGSCDVVIGIVNNTVYDPLQPELDSFKEELDKYFKNHTSPDVDLGDISGINASVVNIQKEIDRLNEVAKNLNESLIDLQELGKYEQYIK

SEQ ID NO: 2420 - protein, 1211 aa, Artificial Sequence
  SARS-CoV-2/Wuhan/HBCDC-HB-01/2019__EPI_ISL_402132 spike protein (1-1211)(A972C_R995C)
MFVFLVLLPLVSSQCVNLTTRTQLPPAYTNSITRGVYYPDKVFRSSVLHSTQDLFLPFFSNVTWFHAIHVSGTNGTKRFDNPVLPFNDGVYFASTEKSNIIRGWIFGTTLDSKTQSLLIVNNATNVVIKVCEFQFCNDPFLGVYYHKNNKSWMESEFRVYSSANNCTFEYVSQPFLMDLEGKQGNFKNLREFVFKNIDGYFKIYSKHTPINLVRDLPQGFSALEPLVDLPIGINITRFQTLLALHRSYLTPGDSSSGWTAGAAAYYVGYLQPRTFLLKYNENGTITDAVDCALDPLSETKCTLKSFTVEKGIYQTSNFRVQPTESIVRFPNITNLCPFGEVFNATRFASVYAWNRKRISNCVADYSVLYNSASFSTFKCYGVSPTKLNDLCFTNVYADSFVIRGDEVRQIAPGQTGKIADYNYKLPDDFTGCVIAWNSNNLDSKVGGNYNYLYRLFRKSNLKPFERDISTEIYQAGSTPCNGVEGFNCYFPLQSYGFQPTNGVGYQPYRVVVLSFELLHAPATVCGPKKSTNLVKNKCVNFNFNGLTGTGVLTESNKKFLPFQQFGRDIADTTDAVRDPQTLEILDITPCSFGGVSVITPGTNTSNQVAVLYQDVNCTEVPVAIHADQLTPTWRVYSTGSNVFQTRAGCLIGAEHVNNSYECDIPIGAGICASYQTQTNSPRRARSVASQSIIAYTMSLGAENSVAYSNNSIAIPTNFTISVTTEILPVSMTKTSVDCTMYICGDSTECSNLLLQYGSFCTQLNRALTGIAVEQDKNTQEVFAQVKQIYKTPPIKDFGGFNFSQILPDPSKPSKRSFIEDLLFNKVTLADAGFIKQYGDCLGDIAARDLICAQKFNGLTVLPPLLTDEMIAQYTSALLAGTITSGWTFGAGAALQIPFAMQMAYRFNGIGVTQNVLYENQKLIANQFNSAIGKIQDSLSSTASALGKLQDVVNQNAQALNTLVKQLSSNFGCISSVLNDILSRLDKVEAEVQIDCLITGRLQSLQTYVTQQLIRAAEIRASANLAATKMSECVLGQSKRVDFCGKGYHLMSFPQSAPHGVVFLHVTYVPAQEKNFTTAPAICHDGKAHFPREGVFVSNGTHWFVTQRNFYEPQIITTDNTFVSGNCDVVIGIVNNTVYDPLQPELDSFKEELDKYFKNHTSPDVDLGDISGINASVVNIQKEIDRLNEVAKNLNESLIDLQELGKYEQYIK

SEQ ID NO: 2421 - protein, 1211 aa, Artificial Sequence
  SARS-CoV-2/Guangdong/20SF028/2020__EPI_ISL_403936 spike protein (1-1211)(A972C_R995C)
MFVFLVLLPLVSSQCVNLTTRTQLPPAYTNSFTRGVYYPDKVFRSSVLYSTQDLFLPFFSNVTWFHAIHVSGTNGTKRFDNPVLPFNDGVYFASTEKSNIIRGWIFGTTLDSKTQSLLIVNNATNVVIKVCEFQFCNDPFLGVYYHKNNKSWMESEFRVYSSANNCTFEYVSQPFLMDLEGKQGNFKNLREFVFKNIDGYFKIYSKHTPINLVRDLPQGFSALEPLVDLPIGINITRFQTLLALHRSYLTPGDSSSGWTAGAAAYYVGYLQPRTFLLKYNENGTITDAVDCALDPLSETKCTLKSFTVEKGIYQTSNFRVQPTESIVRFPNITNLCPFGEVFNATRFASVYAWNRKRISNCVADYSVLYNSASFSTFKCYGVSPTKLNDLCFTNVYADSFVIRGDEVRQIAPGQTGKIADYNYKLPDDFTGCVIAWNSNNLDSKVGGNYNYLYRLFRKSNLKPFERDISTEIYQAGSTPCNGVEGFNCYFPLQSYGFQPTNGVGYQPYRVVVLSFELLHAPATVCGPKKSTNLVKNKCVNFNFNGLTGTGVLTESNKKFLPFQQFGRDIADTTDAVRDPQTLEILDITPCSFGGVSVITPGTNTSNQVAVLYQDVNCTEVPVAIHADQLTPTWRVYSTGSNVFQTRAGCLIGAEHVNNSYECDIPIGAGICASYQTQTNSPRRARSVASQSIIAYTMSLGAENSVAYSNNSIAIPTNFTISVTTEILPVSMTKTSVDCTMYICGDSTECSNLLLQYGSFCTQLNRALTGIAVEQDKNTQEVFAQVKQIYKTPPIKDFGGFNFSQILPDPSKPSKRSFIEDLLFNKVTLADAGFIKQYGDCLGDIAARDLICAQKFNGLTVLPPLLTDEMIAQYTSALLAGTITSGWTFGAGAALQIPFAMQMAYRFNGIGVTQNVLYENQKLIANQFNSAIGKIQDSLSSTASALGKLQDVVNQNAQALNTLVKQLSSNFGCISSVLNDILSRLDKVEAEVQIDCLITGRLQSLQTYVTQQLIRAAEIRASANLAATKMSECVLGQSKRVDFCGKGYHLMSFPQSAPHGVVFLHVTYVPAQEKNFTTAPAICHDGKAHFPREGVFVSNGTHWFVTQRNFYEPQIITTDNTFVSGNCDVVIGIVNNTVYDPLQPELDSFKEELDKYFKNHTSPDVDLGDISGINASVVNIQKEIDRLNEVAKNLNESLIDLQELGKYEQYIK

SEQ ID NO: 2422 - protein, 1211 aa, Artificial Sequence
  SARS-CoV-2/Shenzhen/SZTH-001/2020__EPI_ISL_406592 spike protein (1-1211)(A972C_R995C)
MFVFLVLLPLVSSQCVNLTTRTQLPPAYTNSFTRGVYYPDKVFRSSVLHSTQDLFLPFFSNVTWFHAIHVSGTNGTKRFDNPVLPFNDGVYFASTEKSNIIRGWIFGTTLDSKTQSLLIVNNATNVVIKVCEFQFCNDPFLGVYYHKNNKSWMESEFRVYSSANNCTFEYVSQPFLMDLEGKQGNFKNLREFVFKNIDGYFKIYSKHTPINLVRDLPQGFSALEPLVDLPIGINITRFQTLLALHRSYLTPGDSSSGWTAGAAAYYVGYLQPRTFLLKYNENGTITDAVDCALDPLSETKCTLKSFTVEKGIYQTSNFRVQPTESIVRFPNITNLCPFGEVFNATRFASVYAWNRKRISNCVADYSVLYNSASFSTFKCYGVSPTKLNDLCFTNVYADSFVIRGDEVRQIAPGQTGKIADYNYKLPDDFTGCVIAWNSNNLDSKVGGNYNYLYRLFRKSNLKPFERDISTEIYQAGSTPCNGVEGFNCYFPLQSYGFQPTNGVGYQPYRVVVLSFELLHAPATVCGPKKSTNLVKNKCVNFNFNGLTGTGVLTESNKKFLPFQQFGRDIADTTDAVRDPQTLEILDITPCSFGGVSVITPGTNTSNQVAVLYQDVNCTEVPVAIHADQLTPTWRVYSTGSNVFQTRAGCLIGAEHVNNSYECDIPIGAGICASYQTQTNSPRRARSVASQSIIAYTMSLGAENSVAYSNNSIAIPTNFTISVTTEILPVSMTKTSVDCTMYICGDSTECSNLLLQYGSFCTQLNRALTGIAVEQDKNTQEVFAQVKQIYKTPPIKDFGGFNFSQILPDPSKPSKRSFIEDLLFNKVTLADAGFIKQYGDCLGDIAARDLICAQKFNGLTVLPPLLTDEMIAQYTSALLAGTITSGWTFGAGAALQIPFAMQMAYRFNGIGVTQNVLYENQKLIANQFNSAIGKIQDSLSSTASALGKLQDVVNQNAQALNTLVKQLSSNFGCISSVLNDILSRLDKVEAEVQIDCLITGRLQSLQTYVTQQLIRAAEIRASANLAATKMSECVLGQSKRVDFCGKGYHLMSFPQSAPHGVVFLHVTYVPAQEKNFTTAPAICHDGKAHFPREGVFVSNGTHWFVTQRNFYEPQIITTDNTFVSGNCDVLIGIVNNTVYDPLQPELDSFKEELDKYFKNHTSPDVDLGDISGINASVVNIQKEIDRLNEVAKNLNESLIDLQELGKYEQYIK

SEQ ID NO: 2423 - protein, 1211 aa, Artificial Sequence
  SARS-CoV-2/Shenzhen/SZTH-004/2020__EPI_ISL_406595 spike protein (1-1211)(A972C_R995C)
MFVFLVLLPLVSSQCVNLTTRTQLPPAYTNSFTRGVYYPDKVFRSSVLHSTQDLFLPFFSNVTWFHAIHVSGTNGTKRFDNPVLPFNDGVYFASTEKSNIIRGWIFGTTLDSKTQSLLIVNNATNVVIKVCEFQFCNDPFLGVYYHKNNKSWMESEFRVYSSANNCTFEYVSQPFLMDLEGKQGNFKNLREFVFKNIDGYFKIYSKHTPINLVRDLPQGFSALEPLVDLPIGINITRFQTLLALHRSYLTPGDSSSGWTAGAAAYYVGYLQPRTFLLKYNENGTITDAVDCALDPLSETKCTLKSFTVEKGIYQTSNFRVQPTESIVRFPNITNLCPFGEVFNATRFASVYAWDRKRISNCVAYYSVLYNSASFSTFKCYGVSPTKLNDLCFTNVYADSFVIRGDEVRQIAPGQTGKIADYNYKLPDDFTGCVIAWNSNNLDSKVGGNYNYLYRLFRKSNLKPFERDISTEIYQAGSTPCNGVEGFNCYFPLQSYGFQPTNGVGYQPYRVVVLSFELLHAPATVCGPKKSTNLVKNKCVNFNFNGLTGTGVLTESNKKFLPFQQFGRDIADTTDAVRDPQTLEILDITPCSFGGVSVITPGTNTSNQVAVLYQDVNCTEVPVAIHADQLTPTWRVYSTGSNVFQTRAGCLIGAEHVNNSYECDIPIGAGICASYQTQTNSPRRARSVASQSIIAYTMSLGAENSVAYSNNSIAIPTNFTISVTTEILPVSMTKTSVDCTMYICGDSTECSNLLLQYGSFCTQLNRALTGIAVEQDKNTQEVFAQVKQIYKTPPIKDFGGFNFSQILPDPSKPSKRSFIEDLLFNKVTLADAGFIKQYGDCLGDIAARDLICAQKFNGLTVLPPLLTDEMIAQYTSALLAGTITSGWTFGAGAALQIPFAMQMAYRFNGIGVTQNVLYENQKLIANQFNSAIGKIQDSLSSTASALGKLQDVVNQNAQALNTLVKQLSSNFGCISSVLNDILSRLDKVEAEVQIDCLITGRLQSLQTYVTQQLIRAAEIRASANLAATKMSECVLGQSKRVDFCGKGYHLMSFPQSAPHGVVFLHVTYVPAQEKNFTTAPAICHDGKAHFPREGVFVSNGTHWFVTQRNFYEPQIITTDNTFVSGNCDVVIGIVNNTVYDPLQPELDSFKEELDKYFKNHTSPDVDLGDISGINASVVNIQKEIDRLNEVAKNLNESLIDLQELGKYEQYIK

SEQ ID NO: 2424 - protein, 1211 aa, Artificial Sequence
  SARS-CoV-2/France/IDF0372/2020__EPI_ISL_406596 spike protein (1-1211)(A972C_R995C)
MFVFLVLLPLVSSQCVNLTTRTQLPPAYTNSFTRGVYYPDKVFRSSVLHSTQDLFLPFFSNVTWFHAIHVSGTNGTKRFDNPVLPFNDGVYFASTEKSNIIRGWIFGTTLDSKTQSLLIVNNATNVVIKVCEFQFCNDPFLGVYYHKNNKSWMESEFRVYSSANNCTFEYVSQPFLMDLEGKQGNFKNLREFVFKNIDGYFKIYSKHTPINLVRDLPQGFSALEPLVDLPIGINITRFQTLLALHRSYLTPGDSSSGWTAGAAAYYVGYLQPRTFLLKYNENGTITDAVDCALDPLSETKCTLKSFTVEKGIYQTSNFRVQPTESIVRFPNITNLCPFGEVFNATRFASVYAWNRKRISNCVADYSFLYNSASFSTFKCYGVSPTKLNDLCFTNVYADSFVIRGDEVRQIAPGQTGKIADYNYKLPDDFTGCVIAWNSNNLDSKVGGNYNYLYRLFRKSNLKPFERDISTEIYQAGSTPCNGVEGFNCYFPLQSYGFQPTNGVGYQPYRVVVLSFELLHAPATVCGPKKSTNLVKNKCVNFNFNGLTGTGVLTESNKKFLPFQQFGRDIADTTDAVRDPQTLEILDITPCSFGGVSVITPGTNTSNQVAVLYQDVNCTEVPVAIHADQLTPTWRVYSTGSNVFQTRAGCLIGAEHVNNSYECDIPIGAGICASYQTQTNSPRRARSVASQSIIAYTMSLGAENSVAYSNNSIAIPTNFTISVTTEILPVSMTKTSVDCTMYICGDSTECSNLLLQYGSFCTQLNRALTGIAVEQDKNTQEVFAQVKQIYKTPPIKDFGGFNFSQILPDPSKPSKRSFIEDLLFNKVTLADAGFIKQYGDCLGDIAARDLICAQKFNGLTVLPPLLTDEMIAQYTSALLAGTITSGWTFGAGAALQIPFAMQMAYRFNGIGVTQNVLYENQKLIANQFNSAIGKIQDSLSSTASALGKLQDVVNQNAQALNTLVKQLSSNFGCISSVLNDILSRLDKVEAEVQIDCLITGRLQSLQTYVTQQLIRAAEIRASANLAATKMSECVLGQSKRVDFCGKGYHLMSFPQSAPHGVVFLHVTYVPAQEKNFTTAPAICHDGKAHFPREGVFVSNGTHWFVTQRNFYEPQIITTDNTFVSGNCDVVIGIVNNTVYDPLQPELDSFKEELDKYFKNHTSPDVDLGDISGINASVVNIQKEIDRLNEVAKNLNESLIDLQELGKYEQYIK

SEQ ID NO: 2425 - protein, 1211 aa, Artificial Sequence
  SARS-CoV-2/Australia/VIC01/2020__EPI_ISL_406844 spike protein (1-1211)(A972C_R995C)
MFVFLVLLPLVSSQCVNLTTRTQLPPAYTNSFTRGVYYPDKVFRSSVLHSTQDLFLPFFSNVTWFHAIHVSGTNGTKRFDNPVLPFNDGVYFASTEKSNIIRGWIFGTTLDSKTQSLLIVNNATNVVIKVCEFQFCNDPFLGVYYHKNNKSWMESEFRVYSSANNCTFEYVSQPFLMDLEGKQGNFKNLREFVFKNIDGYFKIYSKHTPINLVRDLPQGFSALEPLVDLPIGINITRFQTLLALHRRYLTPGDSSSGWTAGAAAYYVGYLQPRTFLLKYNENGTITDAVDCALDPLSETKCTLKSFTVEKGIYQTSNFRVQPTESIVRFPNITNLCPFGEVFNATRFASVYAWNRKRISNCVADYSVLYNSASFSTFKCYGVSPTKLNDLCFTNVYADSFVIRGDEVRQIAPGQTGKIADYNYKLPDDFTGCVIAWNSNNLDSKVGGNYNYLYRLFRKSNLKPFERDISTEIYQAGSTPCNGVEGFNCYFPLQSYGFQPTNGVGYQPYRVVVLSFELLHAPATVCGPKKSTNLVKNKCVNFNFNGLTGTGVLTESNKKFLPFQQFGRDIADTTDAVRDPQTLEILDITPCSFGGVSVITPGTNTSNQVAVLYQDVNCTEVPVAIHADQLTPTWRVYSTGSNVFQTRAGCLIGAEHVNNSYECDIPIGAGICASYQTQTNSPRRARSVASQSIIAYTMSLGAENSVAYSNNSIAIPTNFTISVTTEILPVSMTKTSVDCTMYICGDSTECSNLLLQYGSFCTQLNRALTGIAVEQDKNTQEVFAQVKQIYKTPPIKDFGGFNFSQILPDPSKPSKRSFIEDLLFNKVTLADAGFIKQYGDCLGDIAARDLICAQKFNGLTVLPPLLTDEMIAQYTSALLAGTITSGWTFGAGAALQIPFAMQMAYRFNGIGVTQNVLYENQKLIANQFNSAIGKIQDSLSSTASALGKLQDVVNQNAQALNTLVKQLSSNFGCISSVLNDILSRLDKVEAEVQIDCLITGRLQSLQTYVTQQLIRAAEIRASANLAATKMSECVLGQSKRVDFCGKGYHLMSFPQSAPHGVVFLHVTYVPAQEKNFTTAPAICHDGKAHFPREGVFVSNGTHWFVTQRNFYEPQIITTDNTFVSGNCDVVIGIVNNTVYDPLQPELDSFKEELDKYFKNHTSPDVDLGDISGINASVVNIQKEIDRLNEVAKNLNESLIDLQELGKYEQYIK

SEQ ID NO: 2426 - protein, 1211 aa, Artificial Sequence
  SARS-CoV-2/Germany/BavPat1/2020__EPI_ISL_406862 spike protein (1-1211)(A972C_R995C)
MFVFLVLLPLVSSQCVNLTTRTQLPPAYTNSFTRGVYYPDKVFRSSVLHSTQDLFLPFFSNVTWFHAIHVSGTNGTKRFDNPVLPFNDGVYFASTEKSNIIRGWIFGTTLDSKTQSLLIVNNATNVVIKVCEFQFCNDPFLGVYYHKNNKSWMESEFRVYSSANNCTFEYVSQPFLMDLEGKQGNFKNLREFVFKNIDGYFKIYSKHTPINLVRDLPQGFSALEPLVDLPIGINITRFQTLLALHRSYLTPGDSSSGWTAGAAAYYVGYLQPRTFLLKYNENGTITDAVDCALDPLSETKCTLKSFTVEKGIYQTSNFRVQPTESIVRFPNITNLCPFGEVFNATRFASVYAWNRKRISNCVADYSVLYNSASFSTFKCYGVSPTKLNDLCFTNVYADSFVIRGDEVRQIAPGQTGKIADYNYKLPDDFTGCVIAWNSNNLDSKVGGNYNYLYRLFRKSNLKPFERDISTEIYQAGSTPCNGVEGFNCYFPLQSYGFQPTNGVGYQPYRVVVLSFELLHAPATVCGPKKSTNLVKNKCVNFNFNGLTGTGVLTESNKKFLPFQQFGRDIADTTDAVRDPQTLEILDITPCSFGGVSVITPGTNTSNQVAVLYQGVNCTEVPVAIHADQLTPTWRVYSTGSNVFQTRAGCLIGAEHVNNSYECDIPIGAGICASYQTQTNSPRRARSVASQSIIAYTMSLGAENSVAYSNNSIAIPTNFTISVTTEILPVSMTKTSVDCTMYICGDSTECSNLLLQYGSFCTQLNRALTGIAVEQDKNTQEVFAQVKQIYKTPPIKDFGGFNFSQILPDPSKPSKRSFIEDLLFNKVTLADAGFIKQYGDCLGDIAARDLICAQKFNGLTVLPPLLTDEMIAQYTSALLAGTITSGWTFGAGAALQIPFAMQMAYRFNGIGVTQNVLYENQKLIANQFNSAIGKIQDSLSSTASALGKLQDVVNQNAQALNTLVKQLSSNFGCISSVLNDILSRLDKVEAEVQIDCLITGRLQSLQTYVTQQLIRAAEIRASANLAATKMSECVLGQSKRVDFCGKGYHLMSFPQSAPHGVVFLHVTYVPAQEKNFTTAPAICHDGKAHFPREGVFVSNGTHWFVTQRNFYEPQIITTDNTFVSGNCDVVIGIVNNTVYDPLQPELDSFKEELDKYFKNHTSPDVDLGDISGINASVVNIQKEIDRLNEVAKNLNESLIDLQELGKYEQYIK

SEQ ID NO: 2427 - protein, 1211 aa, Artificial Sequence
  SARS-CoV-2/Wuhan/HBCDC-HB-02/2020__EPI_ISL_412978 spike protein (1-1211)(A972C_R995C)
MFVFLVLLPLVSSQCVNLTTRTQLPPAYTNSFTRGVYYPDKVFRSSVLHSTQDLFLPFFSNVTWFHAIHVSGTNGTKRFDNPVLPFNDGVYFASTEKSNIIRGWIFGTTLDSKTQSLLIVNNATNVVIKVCEFQFCNDPFLGVYYHKNNKSWMESEFRVYSSANNCTFEYVSQPFLMDLEGKQGNFKNLREFVFKNIDGYFKIYSKHTPINLVRDLPQGFSALEPLVDLPIGINITRFQTLLALHRSYLTPGDSSSGWTAGAAAYYVGYLQPRTFLLKYNENGTITDAVDCALDPLSETKCTLKSFTVEKGIYQTSNFRVQPTESIVRFPNITNLCPFGEVFNATRFASVYAWNRKRISNCVADYSVLYNSASFSTFKCYGVSPTKLNDLCFTNVYADSFVIRGDEVRQIAPGQTGKIADYNYKLPDDFTGCVIAWNSNNLDSKVGGNYNYLYRLFRKSNLKPFERDISTEIYQAGSTPCNGVEGFNCYFPLQSYGFQPTNGVGYQPYRVVVLSFELLHAPATVCGPKKSTNLVKNKCVNFNFNGLTGTGVLTESNKKFLPFQQFGRDIADTTDAVRDPQTLEILDITPCSFGGVSVITPGTNTSNQVAVLYQDVNCTEVPVAIHADQLTPTWRVYSTGSNVFQTRAGCLIGAEHVNNSYECDIPIGAGICASYQTQTNSPRRARSVASQSIIAYTMSLGAENSVAYSNNSIAIPTNFTISVTTEILPVSMTKTSVDCTMYICGDSTECSNFLLQYGSFCTQLNRALTGIAVEQDKNTQEVFAQVKQIYKTPPIKDFGGFNFSQILPDPSKPSKRSFIEDLLFNKVTLADAGFIKQYGDCLGDIAARDLICAQKFNGLTVLPPLLTDEMIAQYTSALLAGTITSGWTFGAGAALQIPFAMQMAYRFNGIGVTQNVLYENQKLIANQFNSAIGKIQDSLSSTASALGKLQDVVNQNAQALNTLVKQLSSNFGCISSVLNDILSRLDKVEAEVQIDCLITGRLQSLQTYVTQQLIRAAEIRASANLAATKMSECVLGQSKRVDFCGKGYHLMSFPQSAPHGVVFLHVTYVPAQEKNFTTAPAICHDGKAHFPREGVFVSNGTHWFVTQRNFYEPQIITTDNTFVSGNCDVVIGIVNNTVYDPLQPELDSFKEELDKYFKNHTSPDVDLGDISGINASVVNIQKEIDRLNEVAKNLNESLIDLQELGKYEQYIK

SEQ ID NO: 2428 - protein, 1211 aa, Artificial Sequence
  SARS-CoV-2/Australia/QLD02/2020__EPI_ISL_407896 spike protein (1-1211)(A972C_R995C)
MFVFLVLLPLVSSQCVNLTTRTQLPPAYTNSFTRGVYYPDKVFRSSVLHSTQDLFLPFFSNVTWFHAIHVSGTNGTKRFDNPVLPFNDGVYFASTEKSNIIRGWIFGTTLDSKTQSLLIVNNATNVVIKVCEFQFCNDPFLGVYYHKNNKSWMESEFRVYSSANNCTFEYVSQPFLMDLEGKQGNFKNLREFVFKNIDGYFKIYSKHTPINLVRDLPQGFSALEPLVDLPIGINITRFQTLLALHRSYLTPGDSSSGWTAGAAAYYVGYLQPRTFLLKYNENGTITDAVDCALDPLSETKCTLKSFTVEKGIYQTSNFRVQPTESIVRFPNITNLCPFGEVFNATRFASVYAWNRKRISNCVADYSVLYNSASFSTFKCYGVSPTKLNDLCFTNVYADSFVIRGDEVRQIAPGQTGKIADYNYKLPDDFTGCVIAWNSNNLDSKVGGNYNYLYRLFRKSNLKPFERDISTEIYQAGSTPCNGVEGFNCYFPLQSYGFQPTNGVGYQPYRVVVLSFELLHAPATVCGPKKSTNLVKNKCVNFNFNGLTGTGVLTESNKKFLPFQQFGRDIADTTDAVRDPQTLEILDITPCSFGGVSVITPGTNTSNQVAVLYQDVNCTEVPVAIHADQLTPTWRVYSTGSNVFQTRAGCLIGAEHVNNSYECDIPIGAGICASYQTQTNSPRRARSVASQSIIAYTMSLGAENSVAYSNNSIAIPTNFTISVTTEILPVSMTKTSVDCTMYICGDSTECSNLLLQYGSFCTQLNRALTGIAVEQDKNTQEVFAQVKQIYKTPPIKDFGGFNFSQILPDPSKPSKRSFIEDLLFNKVTLADAGFIKQYGDCLGDIAARDLICAQKFNGLTVLPPLLTDEMIAQYTSALLAGTITSGWTFGAGAALQIPFAMQMAYRFNGIGVTQNVLYENQKLIANQFNSAIGKIQDSLSSTASALGKLQDVVNQNAQALNTLVKQLSSNFGCISSVLNDILSRLDKVEAEVQIDCLITGRLQSLQTYVTQQLIRAAEIRASANLAATKMSECVLGQSKRVDFCGKGYHLMSFPQSAPHGVVFLHVTYVPAQEKNFTTAPAICHDGKAHFPREGVFVSNGTHWFVTQRNFYEPQIITTDNTFVSGNCDVVIGIVNNTVYDPLQLELDSFKEELDKYFKNHTSPDVDLGDISGINASVVNIQKEIDRLNEVAKNLNESLIDLQELGKYEQYIK

SEQ ID NO: 2429 - protein, 1211 aa, Artificial Sequence
  SARS-CoV-2/India/1-31/2020__EPI_ISL_413523 spike protein (1-1211)(A972C_R995C)
MFVFLVLLPLVSSQCVNLTTRTQLPPAYTNSFTRGVYYPDKVFRSSVLHSTQDLFLPFFSNVTWFHAIHVSGTNGTKRFDNPVLPFNDGVYFASTEKSNIIRGWIFGTTLDSKTQSLLIVNNATNVVIKVCEFQFCNDPFLGVYYHKNNKSWMESEFRVYSSANNCTFEYVSQPFLMDLEGKQGNFKNLREFVFKNIDGYFKIYSKHTPINLVRDLPQGFSALEPLVDLPIGINITRFQTLLALHRSYLTPGDSSSGWTAGAAAYYVGYLQPRTFLLKYNENGTITDAVDCALDPLSETKCTLKSFTVEKGIYQTSNFRVQPTESIVRFPNITNLCPFGEVFNATRFASVYAWNRKRISNCVADYSVLYNSASFSTFKCYGVSPTKLNDLCFTNVYADSFVIRGDEVRQIAPGQTGKIADYNYKLPDDFTGCVIAWNSNNLDSKVGGNYNYLYRLFRKSNLKPFERDISTEIYQAGSTPCNGVEGFNCYFPLQSYGFQPTNGVGYQPYRVVVLSFELLHAPATVCGPKKSTNLVKNKCVNFNFNGLTGTGVLTESNKKFLPFQQFGRDIADTTDAVRDPQTLEILDITPCSFGGVSVITPGTNTSNQVAVLYQDVNCTEVPVAIHADQLTPTWRVYSTGSNVFQTRAGCLIGAEHVNNSYECDIPIGAGICASYQTQTNSPRRARSVASQSIIAYTMSLGAENSVAYSNNSIAIPTNFTISVTTEILPVSMTKTSVDCTMYICGDSTECSNLLLQYGSFCTQLNRALTGIAVEQDKNTQEVFAQVKQIYKTPPIKDFGGFNFSQILPDPSKPSKRSFIEDLLFNKVTLADAGFIKQYGDCLGDIAARDLICAQKFNGLTVLPPLLTDEMIAQYTSALLAGTITSGWTFGAGAALQIPFAMQMAYRFNGIGVTQNVLYENQKLIANQFNSVIGKIQDSLSSTASALGKLQDVVNQNAQALNTLVKQLSSNFGCISSVLNDILSRLDKVEAEVQIDCLITGRLQSLQTYVTQQLIRAAEIRASANLAATKMSECVLGQSKRVDFCGKGYHLMSFPQSAPHGVVFLHVTYVPAQEKNFTTAPAICHDGKAHFPREGVFVSNGTHWFVTQRNFYEPQIITTDNTFVSGNCDVVIGIVNNTVYDPLQPELDSFKEELDKYFKNHTSPDVDLGDISGINASVVNIQKEIDRLNEVAKNLNESLIDLQELGKYEQYIK

SEQ ID NO: 2430 - protein, 1211 aa, Artificial Sequence
  SARS-CoV-2/Guangdong/GD2020087-P0008/2020__EPI_ISL_413863 spike protein (1-1211)(A972C_R995C)
MFVFLVLLPLVSSQCVNLTTRTQLPPAYTNSFTRGVYYPDKVFRSSVLHSTQDLFLPFFSNVTWFHAIHVSGTNGTKRFDNPVLPFNDGVYFASTEKSNIIRGWIFGTTLDSKTQSLLIVNNATNVVIKVCEFQFCNDPFLGVYYHKNNKSWMESEFRVYSSANNCTFEYVSQPFLMDLEGKQGNFKNLREFVFKNIDGYFKIYSKHTPINLVRDLPQGFSALEPLVDLPIGINITRFQTLLALHRSYLTPGDSSSGWTAGAAAYYVGYLQPRTFLLKYNENGTITDAVDCALDPLSETKCTLKSFTVEKGIYQTSNFRVQPTESIVRFPNITNLCPFGEVFNATRFASVYAWNRKRISNCVADYSVLYNSASFSTFKCYGVSPTKLNDLCFTNVYADSFVIRGDEVREIAPGQTGKIADYNYKLPDDFTGCVIAWNSNNLDSKVGGNYNYLYRLFRKSNLKPFERDISTEIYQAGSTPCNGVEGFNCYFPLQSYGFQPTNGVGYQPYRVVVLSFELLHAPATVCGPKKSTNLVKNKCVNFNFNGLTGTGVLTESNKKFLPFQQFGRDIADTTDAVRDPQTLEILDITPCSFGGVSVITPGTNTSNQVAVLYQDVNCTEVPVAIHADQLTPTWRVYSTGSNVFQTRAGCLIGAEHVNNSYECDIPIGAGICASYQTQTNSPRRARSVASQSIIAYTMSLGAENSVAYSNNSIAIPTNFTISVTTEILPVSMTKTSVDCTMYICGDSTECSNLLLQYGSFCTQLNRALTGIAVEQDKNTQEVFAQVKQIYKTPPIKDFGGFNFSQILPDPSKPSKRSFIEDLLFNKVTLADAGFIKQYGDCLGDIAARDLICAQKFNGLTVLPPLLTDEMIAQYTSALLAGTITSGWTFGAGAALQIPFAMQMAYRFNGIGVTQNVLYENQKLIANQFNSAIGKIQDSLSSTASALGKLQDVVNQNAQALNTLVKQLSSNFGCISSVLNDILSRLDKVEAEVQIDCLITGRLQSLQTYVTQQLIRAAEIRASANLAATKMSECVLGQSKRVDFCGKGYHLMSFPQSAPHGVVFLHVTYVPAQEKNFTTAPAICHDGKAHFPREGVFVSNGTHWFVTQRNFYEPQIITTDNTFVSGNCDVVIGIVNNTVYDPLQPELDSFKEELDKYFKNHTSPDVDLGDISGINASVVNIQKEIDRLNEVAKNLNESLIDLQELGKYEQYIK

SEQ ID NO: 2431 - protein, 1211 aa, Artificial Sequence
  SARS-CoV-2/Sweden/01/2020__EPI_ISL_411951 spike protein (1-1211)(A972C_R995C)
MFVFLVLLPLVSSQCVNLTTRTQLPPAYTNSFTRGVYYPDKVFRSSVLHSTQDLFLPFFSNVTWFHAIHVSGTNGTKRFDNPVLPFNDGVYFASTEKSNIIRGWIFGTTLDSKTQSLLIVNNATNVVIKVCEFQFCNDPFLGVYYHKNNKSWMESEFRVYSSANNCTFEYVSQPFLMDLEGKQGNFKNLREFVFKNIDGYFKIYSKHTPINLVRDLPQGFSALEPLVDLPIGINITRFQTLLALHRSYLTPGDSSSGWTAGAAAYYVGYLQPRTFLLKYNENGTITDAVDCALDPLSETKCTLKSFTVEKGIYQTSNFRVQPTESIVRFPNITNLCPFGEVFNATRFASVYAWNRKRISNCVADYSVLYNSASFSTFKCYGVSPTKLNDLCFTNVYADSFVIRGDEVRQIAPGQTGKIADYNYKLPDDFTGCVIAWNSNNLDSKVGGNYNYLYRLFRKSNLKPFERDISTEIYQAGSTPCNGVEGFNCYFPLQSYGFQPTNGVGYQPYRVVVLSFELLHAPATVCGPKKSTNLVKNKCVNFNFNGLTGTGVLTESNKKFLPFQQFGRDIADTTDAVRDPQTLEILDITPCSFGGVSVITPGTNTSNQVAVLYQDVNCTEVPVAIHADQLTPTWRVYSTGSNVFQTRAGCLIGAEHVNNSYECDIPIGAGICASYQTQTNSPRRARSVASQSIIAYTMSLGAENSVAYSNNSIAIPTNFTISVTTEILPVSMTKTSVDCTMYICGDSTECSNLLLQYGSFCTQLNRALTGIAVEQDKNTQEVFAQVKQIYKTPPIKDCGGFNFSQILPDPSKPSKRSFIEDLLFNKVTLADAGFIKQYGDCLGDIAARDLICAQKFNGLTVLPPLLTDEMIAQYTSALLAGTITSGWTFGAGAALQIPFAMQMAYRFNGIGVTQNVLYENQKLIANQFNSAIGKIQDSLSSTASALGKLQDVVNQNAQALNTLVKQLSSNFGCISSVLNDILSRLDKVEAEVQIDCLITGRLQSLQTYVTQQLIRAAEIRASANLAATKMSECVLGQSKRVDFCGKGYHLMSFPQSAPHGVVFLHVTYVPAQEKNFTTAPAICHDGKAHFPREGVFVSNGTHWFVTQRNFYEPQIITTDNTFVSGNCDVVIGIVNNTVYDPLQPELDSFKEELDKYFKNHTSPDVDLGDISGINASVVNIQKEIDRLNEVAKNLNESLIDLQELGKYEQYIK

SEQ ID NO: 2432 - protein, 1211 aa, Artificial Sequence
  SARS-CoV-2/Tianmen/HBCDC-HB-07/2020__EPI_ISL_412983 spike protein (1-1211)(A972C_R995C)
MFVFLVLLPLVSSQCVNLTTRTQLPPAYTNSFTRGVYYPDKVFRSSVLHSTQDLFLPFFSNVTWFHAIHVSGTNGTKRFDNPVLPFNDGVYFASTEKSNIIRGWIFGTTLDSKTQSLLIVNNATNVVIKVCEFQFCNDPFLGVYYHKNNKSWMESEFRVYSSANNCTFEYVSQPFLMDLEGKQGNFKNLREFVFKNIDGYFKIYSKHTPINLVRDLPQGFSALEPLVDLPIGINITRFQTLLALHRSYLTPGDSSSGWTAGAAAYYVGYLQPRTFLLKYNENGTITDAVDCALDPLSETKCTLKSFTVEKGIYQTSNFRVQPTESIVRFPNITNLCPFGEVFNATRFASVYAWNRKRISNCVADYSVLYNSASFSTFKCYGVSPTKLNDLCFTNVYADSFVIRGDEVRQIAPGQTGKIADYNYKLPDDFTGCVIAWNSNNLDSKVGGNYNYLYRLFRKSNLKPFERDISTEIYQAGSTPCNGVEGFNCYFPLQSYGFQPTNGVGYQPYRVVVLSFELLHAPATVCGPKKSTNLVKNKCVNFNFNGLTGTGVLTESNKKFLPFQQFGRDIADTTDAVRDPQTLEILDITPCSFGGVSVITPGTNTSNQVAVLYQDLNCTEVPVAIHADQLTPTWRVYSTGSNVFQTRAGCLIGAEHVNNSYECDIPIGAGICASYQTQTNSPRRARSVASQSIIAYTMSLGAENSVAYSNNSIAIPTNFTISVTTEILPVSMTKTSVDCTMYICGDSTECSNLLLQYGSFCTQLNRALTGIAVEQDKNTQEVFAQVKQIYKTPPIKDFGGFNFSQILPDPSKPSKRSFIEDLLFNKVTLADAGFIKQYGDCLGDIAARDLICAQKFNGLTVLPPLLTDEMIAQYTSALLAGTITSGWTFGAGAALQIPFAMQMAYRFNGIGVTQNVLYENQKLIANQFNSAIGKIQDSLSSTASALGKLQDVVNQNAQALNTLVKQLSSNFGCISSVLNDILSRLDKVEAEVQIDCLITGRLQSLQTYVTQQLIRAAEIRASANLAATKMSECVLGQSKRVDFCGKGYHLMSFPQSAPHGVVFLHVTYVPAQEKNFTTAPAICHDGKAHFPREGVFVSNGTHWFVTQRNFYEPQIITTDNTFVSGNCDVVIGIVNNTVYDPLQPELDSFKEELDKYFKNHTSPDVDLGDISGINASVVNIQKEIDRLNEVAKNLNESLIDLQELGKYEQYIK

SEQ ID NO: 2433 - protein, 1211 aa, Artificial Sequence
  SARS-CoV-2/Hong Kong/case42_VM20002493/2020__EPI_ISL_414527 spike protein (1-1211)(A972C_R995C)
MFVFLVLLPLVSSQCVNLTTRTQLPPAYTNSFTRGVYYPDKVFRSSVLHSTQDLFLPFFSNVTWFHAIHVSGTNGTKRFDNPVLPFNDGVYFASTEKSNIIRGWIFGTTLDSKTQSLLIVNNATNVVIKVCEFQFCNDPFLGVYYHKNNKSWMESEFRVYSSANNCTFEYVSQPFLMDLEGKQGNFKNLREFVFKNIDGYFKIYSKHTPINLVRDLPQGFSALEPLVDLPIGINITRFQTLLALHRSYLTPGDSSSGWTAGAAAYYVGYLQPRTFLLKYNENGTITDAVDCALDPLSETKCTLKSFTVEKGIYQTSNFRVQPTESIVRFPNITNLCPFGEVFNATRFASVYAWNRKRISNCVADYSVLYNSASFSTFKCYGVSPTKLNDLCFTNVYADSFVIRGDEVRQIAPGQTGKIADYNYKLPDDFTGCVIAWNSNNLDSKVGGNYNYLYRLFRKSNLKPFERDISTEIYQAGSTPCNGVEGFNCYFPLQSYGFQPTNGVGYQPYRVVVLSFELLHAPATVCGPKKSTNLVKNKCVNFNFNGLTGTGVLTESNKKFLPFQQFGRDIADTTDAVRDPQTLEILDITPCSFGGVSVITPGTNTSNQVAVLYQDVNCTEVPVAIHADQLTPTWRVYSTGSNVFQTRAGCLIGAEHVNNSYECDIPIGAGICASYQTQTNSPRRARSVASQSIIAYTMSLGAENSVAYSNNSIAIPTNFAISVTTEILPVSMTKTSVDCTMYICGDSTECSNLLLQYGSFCTQLNRALTGIAVEQDKNTQEVFAQVKQIYKTPPIKDFGGFNFSQILPDPSKPSKRSFIEDLLFNKVTLADAGFIKQYGDCLGDIAARDLICAQKFNGLTVLPPLLTDEMIAQYTSALLAGTITSGWTFGAGAALQIPFAMQMAYRFNGIGVTQNVLYENQKLIANQFNSAIGKIQDSLSSTASALGKLQDVVNQNAQALNTLVKQLSSNFGCISSVLNDILSRLDKVEAEVQIDCLITGRLQSLQTYVTQQLIRAAEIRASANLAATKMSECVLGQSKRVDFCGKGYHLMSFPQSAPHGVVFLHVTYVPAQEKNFTTAPAICHDGKAHFPREGVFVSNGTHWFVTQRNFYEPQIITTDNTFVSGNCDVVIGIVNNTVYDPLQPELDSFKEELDKYFKNHTSPDVDLGDISGINASVVNIQKEIDRLNEVAKNLNESLIDLQELGKYEQYIK

SEQ ID NO: 2434 - protein, 1211 aa, Artificial Sequence
  SARS-CoV-2/USA/CruiseA-23/2020__EPI_ISL_414482 spike protein (1-1211)(A972C_R995C)
MFVFLVLLPLVSSQCVNLTTRTQLPPAYTNSFTRGVYYPDKVFRSSVLHSTQDLFLPFFSNVTWFHAIHVSGTNGTKRFDNPVLPFNDGVYFASTEKSNIIRGWIFGTTLDSKTQSLLIVNNATNVVIKVCEFQFCNDPFLGVYYHKNNKSWMESEFRVYSSANNCTFEYVSQPFLMDLEVKQGNFKNLREFVFKNIDGYFKIYSKHTPINLVRDLPQGFSALEPLVDLPIGINITRFQTLLALHRSYLTPGDSSSGWTAGAAAYYVGYLQPRTFLLKYNENGTITDAVDCALDPLSETKCTLKSFTVEKGIYQTSNFRVQPTESIVRFPNITNLCPFGEVFNATRFASVYAWNRKRISNCVADYSVLYNSASFSTFKCYGVSPTKLNDLCFTNVYADSFVIRGDEVRQIAPGQTGKIADYNYKLPDDFTGCVIAWNSNNLDSKVGGNYNYLYRLFRKSNLKPFERDISTEIYQAGSTPCNGVEGFNCYFPLQSYGFQPTNGVGYQPYRVVVLSFELLHAPATVCGPKKSTNLVKNKCVNFNFNGLTGTGVLTESNKKFLPFQQFGRDIADTTDAVRDPQTLEILDITPCSFGGVSVITPGTNTSNQVAVLYQDVNCTEVPVAIHADQLTPTWRVYSTGSNVFQTRAGCLIGAEHVNNSYECDIPIGAGICASYQTQTNSPRRARSVASQSIIAYTMSLGAENSVAYSNNSIAIPTNFTISVTTEILPVSMTKTSVDCTMYICGDSTECSNLLLQYGSFCTQLNRALTGIAVEQDKNTQEVFAQVKQIYKTPPIKDFGGFNFSQILPDPSKPSKRSFIEDLLFNKVTLADAGFIKQYGDCLGDIAARDLICAQKFNGLTVLPPLLTDEMIAQYTSALLAGTITSGWTFGAGAALQIPFAMQMAYRFNGIGVTQNVLYENQKLIANQFNSAIGKIQDSLSSTASALGKLQDVVNQNAQALNTLVKQLSSNFGCISSVLNDILSRLDKVEAEVQIDCLITGRLQSLQTYVTQQLIRAAEIRASANLAATKMSECVLGQSKRVDFCGKGYHLMSFPQSAPHGVVFLHVTYVPAQEKNFTTAPAICHDGKAHFPREGVFVSNGTHWFVTQRNFYEPQIITTDNTFVSGNCDVVIGIVNNTVYDPLQPELDSFKEELDKYFKNHTSPDVDLGDISGINASVVNIQKEIDRLNEVAKNLNESLIDLQELGKYEQYIK

SEQ ID NO: 2435 - protein, 1211 aa, Artificial Sequence
  SARS-CoV-2/Hong Kong/case85_VM20002868/2020__EPI_ISL_414519 spike protein (1-1211)(A972C_R995C)
MFVFLVLVPLVSSQCVNLTTRTQLPPAYTNSFTRGVYYPDKVFRSSVLHSTQDLFLPFFSNVTWFHAIHVSGTNGTKRFDNPVLPFNDGVYFASTEKSNIIRGWIFGTTLDSKTQSLLIVNNATNVVIKVCEFQFCNDPFLGVYYHKNNKSWMESEFRVYSSANNCTFEYVSQPFLMDLEGKQGNFKNLREFVFKNIDGYFKIYSKHTPINLVRDLPQGFSALEPLVDLPIGINITRFQTLLALHRSYLTPGDSSSGWTAGAAAYYVGYLQPRTFLLKYNENGTITDAVDCALDPLSETKCTLKSFTVEKGIYQTSNFRVQPTESIVRFPNITNLCPFGEVFNATRFASVYAWNRKRISNCVADYSVLYNSASFSTFKCYGVSPTKLNDLCFTNVYADSFVIRGDEVRQIAPGQTGKIADYNYKLPDDFTGCVIAWNSNNLDSKVGGNYNYLYRLFRKSNLKPFERDISTEIYQAGSTPCNGVEGFNCYFPLQSYGFQPTNGVGYQPYRVVVLSFELLHAPATVCGPKKSTNLVKNKCVNFNFNGLTGTGVLTESNKKFLPFQQFGRDIADTTDAVRDPQTLEILDITPCSFGGVSVITPGTNTSNQVAVLYQDVNCTEVPVAIHADQLTPTWRVYSTGSNVFQTRAGCLIGAEHVNNSYECDIPIGAGICASYQTQTNSPRRARSVASQSIIAYTMSLGAENSVAYSNNSIAIPTNFTISVTTEILPVSMTKTSVDCTMYICGDSTECSNLLLQYGSFCTQLNRALTGIAVEQDKNTQEVFAQVKQIYKTPPIKDFGGFNFSQILPDPSKPSKRSFIEDLLFNKVTLADAGFIKQYGDCLGDIAARDLICAQKFNGLTVLPPLLTDEMIAQYTSALLAGTITSGWTFGAGAALQIPFAMQMAYRFNGIGVTQNVLYENQKLIANQFNSAIGKIQDSLSSTASALGKLQDVVNQNAQALNTLVKQLSSNFGCISSVLNDILSRLDKVEAEVQIDCLITGRLQSLQTYVTQQLIRAAEIRASANLAATKMSECVLGQSKRVDFCGKGYHLMSFPQSAPHGVVFLHVTYVPAQEKNFTTAPAICHDGKAHFPREGVFVSNGTHWFVTQRNFYEPQIITTDNTFVSGNCDVVIGIVNNTVYDPLQPELDSFKEELDKYFKNHTSPDVDLGDISGINASVVNIQKEIDRLNEVAKNLNESLIDLQELGKYEQYIK

SEQ ID NO: 2436 - protein, 1211 aa, Artificial Sequence; identical to SEQ ID NO: 2426
  SARS-CoV-2/England/200990660/2020__EPI_ISL_414523 spike protein (1-1211)(A972C_R995C)

SEQ ID NO: 2437 - protein, 1211 aa, Artificial Sequence
  SARS-CoV-2/Australia/NSW09/2020__EPI_ISL_413595 spike protein (1-1211)(A972C_R995C)
MFVFLVLLPLVSSQCVNLTTRTQLPPAYTNSFTRGVYYPDKVFRSSVLHSTQDLFLPFFSNVTWFHAIHVSGTNGTKRFDNPVLPFNDGVYFASTEKSNIIRGWIFGTTLDSKTQSLLIVNNATNVVIKVCEFQFCNDPFLGVYYHKNNKSWMESEFRVYSSANNCTFEYVSQPFLMDLEGKQGNFKNLREFVFKNIDGYFKIYSKHTPINLVRDLPQGFSALEPLVDLPIGINITRFQTLLALHRSYLTPGDSSSGWTAGAAAYYVGYLQPRTFLLKYNENGTITDAVDCALDPLSETKCTLKSFTVEKGIYQTSNFRVQPTESIVRFPNITNLCPFGEVFNATRFASVYAWNRKRISNCVADYSVLYNSASFSTFKCYGVSPTKLNDLCFTNVYADSFVIRGDEVRQIAPGQTGKIADYNYKLPDDFTGCVIAWNSNNLDSKVGGNYNYLYRLFRKSNLKPFERDISTEIYQAGSTPCNGVEGFNCYFPLQSYGFQPTNGVGYQPYRVVVLSFELLHAPATVCGPKKSTNLVKNKCVNFNFNGLTGTGVLTESNKKFLPFQQFGRDIADTTDAVRDPQTLEILDITPCSFGGVSVITPGTNTSNQVAVLYQDVNCTEVPVAIHADQLTPTWRVYSTGSNVFQTRAGCLIGAEHVNNSYECDIPIGAGICASYQTQTNSPRRARSVASQSIIAYTMSLGAENSVAYSNNSIAIPTNFTISVTTEILPVSMTKTSVDCTMYICGDSTECSNLLLQYGSFCTQLNRALTGIAVEQDKNTQEVFAQVKQIYKTPPIKDFGGFNFSQILPDPSKPSKRSFIEDLLFNKVTLADAGFIKQYGDCLGDIAARDLICAQKFNGLTVLPPLLTDEMIAQYTSALLAGTITSGWTFGAGAALQIPFAMQMAYRFNGIGVTQNVLYENQKLIANQFNSAIGKIQDSLSFTASALGKLQDVVNQNAQALNTLVKQLSSNFGCISSVLNDILSRLDKVEAEVQIDCLITGRLQSLQTYVTQQLIRAAEIRASANLAATKMSECVLGQSKRVDFCGKGYHLMSFPQSAPHGVVFLHVTYVPAQEKNFTTAPAICHDGKAHFPREGVFVSNGTHWFVTQRNFYEPQIITTDNTFVSGNCDVVIGIVNNTVYDPLQPELDSFKEELDKYFKNHTSPDVDLGDISGINASVVNIQKEIDRLNEVAKNLNESLIDLQELGKYEQYIK

SEQ ID NO: 2438 - protein, 1211 aa, Artificial Sequence; identical to SEQ ID NO: 2418
  SARS-CoV-2/Australia/NSW10/2020__EPI_ISL_413596 spike protein (1-1211)(A972C_R995C)

SEQ ID NO: 2439 - protein, 1211 aa, Artificial Sequence
  SARS-CoV-2/Switzerland/1000477797/2020__EPI_ISL_413023 spike protein (1-1211)(A972C_R995C)
MFVFLVLLPLVSSQCVNLTTRTQLPPAYTNSFTRGVYYPDKVFRSSVLHSTQDLFLPFFSNVTWFHAIHVSGTNGTKRFDNPVLPFNDGVYFASTEKSNIIRGWIFGTTLDSKTQSLLIVNNATNVVIKVCEFQFCNDPFLGVYYHKNNKSWMESEFRVYSSANNCTFEYVSQPFLMDLEGKQGNFKNLREFVFKNIDGYFNIYSKHTPINLVRDLPQGFSALEPLVDLPIGINITRFQTLLALHRSYLTPGDSSSGWTAGAAAYYVGYLQPRTFLLKYNENGTITDAVDCALDPLSETKCTLKSFTVEKGIYQTSNFRVQPTESIVRFPNITNLCPFGEVFNATRFASVYAWNRKRISNCVADYSVLYNSASFSTFKCYGVSPTKLNDLCFTNVYADSFVIRGDEVRQIAPGQTGKIADYNYKLPDDFTGCVIAWNSNNLDSKVGGNYNYLYRLFRKSNLKPFERDISTEIYQAGSTPCNGVEGFNCYFPLQSYGFQPTNGVGYQPYRVVVLSFELLHAPATVCGPKKSTNLVKNKCVNFNFNGLTGTGVLTESNKKFLPFQQFGRDIADTTDAVRDPQTLEILDITPCSFGGVSVITPGTNTSNQVAVLYQGVNCTEVPVAIHADQLTPTWRVYSTGSNVFQTRAGCLIGAEHVNNSYECDIPIGAGICASYQTQTNSPRRARSVASQSIIAYTMSLGAENSVAYSNNSIAIPTNFTISVTTEILPVSMTKTSVDCTMYICGDSTECSNLLLQYGSFCTQLNRALTGIAVEQDKNTQEVFAQVKQIYKTPPIKDFGGFNFSQILPDPSKPSKRSFIEDLLFNKVTLADAGFIKQYGDCLGDIAARDLICAQKFNGLTVLPPLLTDEMIAQYTSALLAGTITSGWTFGAGAALQIPFAMQMAYRFNGIGVTQNVLYENQKLIANQFNSAIGKIQDSLSSTASALGKLQDVVNQNAQALNTLVKQLSSNFGCISSVLNDILSRLDKVEAEVQIDCLITGRLQSLQTYVTQQLIRAAEIRASANLAATKMSECVLGQSKRVDFCGKGYHLMSFPQSAPHGVVFLHVTYVPAQEKNFTTAPAICHDGKAHFPREGVFVSNGTHWFVTQRNFYEPQIITTDNTFVSGNCDVVIGIVNNTVYDPLQPELDSFKEELDKYFKNHTSPDVDLGDISGINASVVNIQKEIDRLNEVAKNLNESLIDLQELGKYEQYIK

SEQ ID NO: 2440 - protein, 1211 aa, Artificial Sequence
  SARS-CoV-2/Belgium/BA-02291/2020__EPI_ISL_415159 spike protein (1-1211)(A972C_R995C)
MFVFLVLLPLVSSQCVNLTTRTQLPPAYTNSFTRGVYYPDKVFRSSVLHSTQDLFLPFFSNVTWFHAIHVSGTNGTKRFDNPVLPFNDGVYFASTEKSNIIRGWIFGTTLDSKTQSLLIVNNATNVVIKVCEFQFCNDPFLGVYYHKNNKSWMESEFRVYSSANNCTFEYVSQPFLMDLEGKQGNFKNLREFVFKNIDGYFKIYSKHTPINLVRDLPQGFSALEPLVDLPIGINITRFQTLLALHRSYLTPGDSSSGWTAGAAAYYVGYLQPRTFLLKYNENGTITDAVDCALDPLSETKCTLKSFTVEKGIYQTSNFRVQPTESIVRFPNITNLCPFGEVFNATRFASVYAWNRKRISNCVADYSVLYNSASFSTFKCYGVSPTKLNDLCFTNVYADSFVIRGDEVRQIAPGQTGKIADYNYKLPDDFTGCVIAWNSNNLDSKVGGNYNYLYRLFRRSNLKPFERDISTEIYQAGSTPCNGVEGFNCYFPLQSYGFQPTNGVGYQPYRVVVLSFELLPAPATVCGPKKSTNLVKNKCVNFNFNGLTGTGVLTESNKKFLPFQQFGRDIADTTDAVRDPQTLEILDITPCSFGGVSVITPGTNTSNQVAVLYQGVNCTEVPVAIHADQLTPTWRVYSTGSNVFQTRAGCLIGAEHVNNSYECDIPIGAGICASYQTQTNSPRRARSVASQSIIAYTMSLGAENSVAYSNNSIAIPTNFTISVTTEILPVSMTKTSVDCTMYICGDSTECSNLLLQYGSFCTQLNRALTGIAVEQDKNTQEVFAQVKQIYKTPPIKDFGGFNFSQILPDPSKPSKRSFIEDLLFNKVTLADAGFIKQYGDCLGDIAARDLICAQKFNGLTVLPPLLTDEMIAQYTSALLAGTITSGWTFGAGAALQIPFAMQMAYRFNGIGVTQNVLYENQKLIANQFNSAIGKIQDSLSSAAPALGKLQDVVNQNAQALNTLVKQLSSNFGCISSVLNDILSRLDKVEAEVQIDCLITGRLQSLQTYVTQQLIRAAEIRASANLAATKMSECVLGQSKRVDFCGKGYHLMSFPQSAPHGVVFLHVTYVPAQEKNFTTAPAICHDGKAHFPREGVFVSNGTHWFVTQRNFYEPQIITTDNTFVSGNCDVVIGIVNNTVYDPLQPELDSFKEELDKYFKNHTSPDVDLGDISGINASVVNIQKEIDRLNEVAKNLNESLIDLQELGKYEQYIK

SEQ ID NO: 2441 - protein, 1211 aa, Artificial Sequence
  SARS-CoV-2/USA/WA8-UW5/2020__EPI_ISL_413486 spike protein (1-1211)(A972C_R995C)
MFVFLVLLPLVSSQCVNLTTRTQLPPAYTNSFTRGVYYPDKVFRSSVLHSTQDLFLPFFSNVTWFHAIHVSGTNGTKRFDNPVLPFNDGVYFASTEKSNIIRGWIFGTTLDSKTQSLLIVNNATNVVIKVCEFQFCNDPFLGVYYHKNNKSWMESEFRVYSSANNCTFEYVSQPFLMDLEGKQGNFKNLREFVFKNIDGYFKIYSKHTPINLVRDLPQGFSALEPLVDLPIGINITRFQTLLALHRSYLTPGDSSSGWTAGAAAYYVGYLQPRTFLLKYNENGTITDAVDCALDPLSETKCTLKSFTVEKGIYQTSNFRVQPTESIVRFPNITNLCPFGEVFNATRFASVYAWNRKRISNCVADYSVLYNSASFSTFKCYGVSPTKLNDLCFTNVYADSFVIRGDEVRQIAPGQTGKIADYNYKLPDDFTGCVIAWNSNNLDSKVGGNYNYLYRLFRKSNLKPFERDISTEIYQAGSTPCNGVEGFNCYFPLQSYGFQPTNGVGYQPYRVVVLSFELLHAPATVCGPKKSTNLVKNKCVNFNFNGLTGTGVLTESNKKFLPFQQFGRDIADTTDAVRDPQTLEILDITPCSFGGVSVITPGTNTSNQVAVLYQDVNCTEVPVAIHADQLTPTWRVYSTGSNVFQTRAGCLIGAEYVNNSYECDIPIGAGICASYQTQTNSPRRARSVASQSIIAYTMSLGAENSVAYSNNSIAIPTNFTISVTTEILPVSMTKTSVDCTMYICGDSTECSNLLLQYGSFCTQLNRALTGIAVEQDKNTQEVFAQVKQIYKTPPIKDFGGFNFSQILPDPSKPSKRSFIEDLLFNKVTLADAGFIKQYGDCLGDIAARDLICAQKFNGLTVLPPLLTDEMIAQYTSALLAGTITSGWTFGAGAALQIPFAMQMAYRFNGIGVTQNVLYENQKLIANQFNSAIGKIQDSLSSTASALGKLQDVVNQNAQALNTLVKQLSSNFGCISSVLNDILSRLDKVEAEVQIDCLITGRLQSLQTYVTQQLIRAAEIRASANLAATKMSECVLGQSKRVDFCGKGYHLMSFPQSAPHGVVFLHVTYVPAQEKNFTTAPAICHDGKAHFPREGVFVSNGTHWFVTQRNFYEPQIITTDNTFVSGNCDVVIGIVNNTVYDPLQPELDSFKEELDKYFKNHTSPDVDLGDISGINASVVNIQKEIDRLNEVAKNLNESLIDLQELGKYEQYIK

SEQ ID NO: 2442 - protein, 1211 aa, Artificial Sequence
  SARS-CoV-2/England/20102000506/2020__EPI_ISL_415147 spike protein (1-1211)(A972C_R995C)
MFVFLVLLPLVSSQCVNLTTRTQLPPAYTNSFTRGVYYPDKVFRSSVLHSTQDLFLPFFSNVTWFHAIHVSGTNGTKRFDNPVLPFNDGVYFASTEKSNIIRGWIFGTTLDSKTQSLLIVNNATNVVIKVCEFQFCNDPFLGVYYHKNNKSWMESEFRVYSSANNCTFEYVSQPFLMDLEGKQGNFKNLREFVFKNIDGYFKIYSKHTPINLVRDLPQGFSALEPLVDLPIGINITRFQTLLALHRSYLTPGDSSSGWTAGAAAYYVGYLQPRTFLLKYNENGTITDAVDCALDPLSETKCTLKSFTVEKGIYQTSNFRVQPTESIVRFPNITNLCPFGEVFNATRFASVYAWNRKRISNCVADYSVLYNSASFSTFKCYGVSPTKLNDLCFTNVYADSFVIRGDEVRQIAPGQTGKIADYNYKLPDDFTGCVIAWNSNNLDSKVGGNYNYLYRLFRKSNLKPFERDISTEIYQAGSTPCNGVEGFNCYFPLQSYGFQPTNGVGYQPYRVVVLSFELLHAPATVCGPKKSTNLVKNKCVNFNFNGLTGTGVLTESNKKFLPFQQFGRDIADTTDAVRDPQTLEILDITPCSFGGVSVITPGTNTSNQVAVLYQGVNCTEVPVAIHADQLTPTWRVYSTGSNVFQTRAGCLIGAEHVNNSYECDIPIGAGICASYQTQTNSPRRARSVASQSIIAYTMSLGAENSVAYSNNSIAIPTNFTISVTTEILPVSMTKTSVDCTMYICGDSTECSNLLLQYGSFCTQLNRALTGIAVEQDKNTQEVFAQVKQIYKTPPIKDFGGFNFSQILPDPSKPSKRSFIEDLLFNKVTLADAGFIKQYGYCLGDIAARDLICAQKFNGLTVLPPLLTDEMIAQYTSALLAGTITSGWTFGAGAALQIPFAMQMAYRFNGIGVTQNVLYENQKLIANQFNSAIGKIQDSLSSTASALGKLQDVVNQNAQALNTLVKQLSSNFGCISSVLNDILSRLDKVEAEVQIDCLITGRLQSLQTYVTQQLIRAAEIRASANLAATKMSECVLGQSKRVDFCGKGYHLMSFPQSAPHGVVFLHVTYVPAQEKNFTTAPAICHDGKAHFPREGVFVSNGTHWFVTQRNFYEPQIITTDNTFVSGNCDVVIGIVNNTVYDPLQPELDSFKEELDKYFKNHTSPDVDLGDISGINASVVNIQKEIDRLNEVAKNLNESLIDLQELGKYEQYIK

SEQ ID NO: 2443 - protein, 1211 aa, Artificial Sequence
  SARS-CoV-2/Belgium/VAG-03013/2020__EPI_ISL_415155 spike protein (1-1211)(A972C_R995C)
MFVFLVLLPLVSSQCVNLTTRTQLPPAYTNSFTRGVYYPDKVFRSSVLHSTQDLFLPFFSNVTWFHAIHVSGTNGTKRFDNPVLPFNDGVYFASTEKSNIIRGWIFGTTLDSKTQSLLIVNNATNVVIKVCEFQFCNDPFLGVYYHKNNKSWMESEFRVYSSANNCTFEYVSQPFLMDLEGKQGNFKNLREFVFKNIDGYFKIYSKHTPINLVRDLPQGFSALEPLVDLPIGINITRFQTLLALHRSYLTPGDSSSGWTAGAAAYYVGYLQPRTFLLKYNENGTITDAVDCALDPLSETKCTLKSFTVEKGIYQTSNFRVQPTESIVRFPNITNLCPFGEVFNATRFASVYAWNRKRISNCVADYSVLYNSASFSTFKCYGVSPTKLNDLCFTNVYADSFVIRGDEVRQIAPGQTGKIADYNYKLPDDFTGCVIAWNSNNLDSKVGGNYNYLYRLFRKSNLKPFERDISTEIYQAGSTPCNGVEGFNCYFPLQSYGFQPTNGVGYQPYRVVVLSFELLHAPATVCGPKKSTNLVKNKCVNFNFNGLTGTGVLTESNKKFLPFQQFGRDIADTTDAVRDPQTLEILDITPCSFGGVSVITPGTNTSNQVAVLYQGVNCTEVPVAIHADQLTPTWRVYSTGSNVFQTRAGCLIGAEHVNNSYECDIPIGAGICASYQTQTNSPRRARSVASQSIIAYTMSLGAENSVAYSNNSIAIPTNFTISVTTEILPVSMTKTSVDCTMYICGDSTECSNLLLQYGSFCTQLNRALTGIAVEQDKNTQEVFAQVKQIYKTPPIKDFGGFNFSQILPDPSKPSKRSFIEDLLFNKVTLADAGFIKQYGDCLGDIAARDLICAQKFNGLTVLPPLLTDEMIAQYTSALLAGTITSGWTFGAGAALQIPFAMQMAYRFNGIGVTQNVLYENQKLIANQFNSAIGKIQDSLSSTATALGKLQDVVNQNAQALNTLVKQLSSNFGCISSVLNDILSRLDKVEAEVQIDCLITGRLQSLQTYVTQQLIRAAEIRASANLAATKMSECVLGQSKRVDFCGKGYHLMSFPQSAPHGVVFLHVTYVPAQEKNFTTAPAICHDGKAHFPREGVFVSNGTHWFVTQRNFYEPQIITTDNTFVSGNCDVVIGIVNNTVYDPLQPELDSFKEELDKYFKNHTSPDVDLGDISGINASVVNIQKEIDRLNEVAKNLNESLIDLQELGKYEQYIK

SEQ ID NO: 2444 - protein, 1211 aa, Artificial Sequence
  SARS-CoV-2/Belgium/BC-03016/2020__EPI_ISL_415157 spike protein (1-1211)(A972C_R995C)
MFVFLVLLPLVSSQCVNLTTRTQLPPAYTNSFTRGVYYPDKVFRSSVLHSTQDLFLPFFSNVTWFHAIHVSGTNGTKRFDNPVLPFNDGVYFASTEKSNIIRGWIFGTTLDSKTQSLLIVNNATNVVIKVCEFQFCNDPFLGVYYHKNNKSWMESEFRVYSSANNCTFEYVSQPFLMDLEGKQGNFKNLREFVFKNIDGYFKIYSKHTPINLVRDLPQGFSALEPLVDLPIGINITRFQTLLALHRSYLTPGDSSSGWTAGAAAYYVGYLQPRTFLLKYNENGTITDAVDCALDPLSETKCTLKSFTVEKGIYQTSNFRVQPTESIVRFPNITNLCPFGEVFNATRFASVYAWNRKRISNCVADYSVLYNSASFSTFKCYGVSPTKLNDLCFTNVYADSFVIRGDEVRQIAPGQTGKIADYNYKLPDDFTGCVIAWNSNNLDSKVGGNYNYLYRLFRKSNLKPFERDISTEIYQAGSTPCNGVEGFNCYFPLQSYGFQPTNGVGYQPYRVVVLSFELLHAPATVCGPKKSTNLVKNKCVNFNFNGLTGTGVLTESNKKFLPFQQFGRDIADTTDAVRDPQTLEILDITPCSFGGVSVITPGTNTSNQVAVLYQGVNCTEVPVAIHADQLTPTWRVYSTGSNVFQTRAGCLIGAEHVNNSYECDIPIGAGICASYQTQTNSPRRARSVASQSIIAYTMSLGAENSVAYSNNSIAIPTNFTISVTTEILPVSMTKTSVDCTMYICGDSTECSNLLLQYGSFCTQLNRALTGIAVEQDKNTQEVFAQVKQIYKTPPIKDFGGFNFSQILPDPSKPSKRSFIEDLLFNKVTLADAGFIKQYGDCLGDIAARDLICAQKFNGLTVLPPLLTDEMIAQYTSALLAGTITSGWTFGAGAALQIPFAMQMAYRFNGIGVTQNVLYENQKLIANQFNSAIGKIQDSLSSTAPALGKLQDVVNQNAQALNTLVKQLSSNFGCISSVLNDILSRLDKVEAEVQIDCLITGRLQSLQTYVTQQLIRAAEIRASANLAATKMSECVLGQSKRVDFCGKGYHLMSFPQSAPHGVVFLHVTYVPAQEKNFTTAPAICHDGKAHFPREGVFVSNGTHWFVTQRNFYEPQIITTDNTFVSGNCDVVIGIVNNTVYDPLQPELDSFKEELDKYFKNHTSPDVDLGDISGINASVVNIQKEIDRLNEVAKNLNESLIDLQELGKYEQYIK

SEQ ID NO: 2445 - protein, 1211 aa, Artificial Sequence
  SARS-CoV-2/Germany/BavPat3/2020__EPI_ISL_414521 spike protein (1-1211)(A972C_R995C)
MFVFLVLLPLVSSQCVNLTTRTQLPPAYTNSFTRGVYYPDKVFRSSVLHSTQDLFLPFFSNVTWFHAIHVSGTNGTKRFDNPVLPFNDGVYFASTEKSNIIRGWIFGTTLDSKTQSLLIVNNATNVVIKVCEFQFCNDPFLGVYYHKNNKSWMESEFRVYSSANNCTFEYVSQPFLMDLEGKQGNFKNLREFVFKNIDGYFKIYSKHTPINLVRDLPQGFSALEPLVDLPIGINITRFQTLLALHRSYLTPGDSSSGWTAGAAAYYVGYLQPRTFLLKYNENGTITDAVDCALDPLSETKCTLKSFTVEKGIYQTSNFRVQPTESIVRFPNITNLCPFGEVFNATRFASVYAWNRKRISNCVADYSVLYNSASFSTFKCYGVSPTKLNDLCFTNVYADSFVIRGDEVRQIAPGQTGKIADYNYKLPDDFTGCVIAWNSNNLDSKVGGNYNYLYRLFRKSNLKPFERDISTEIYQAGSTPCNGVEGFNCYFPLQSYGFQPTNGVGYQPYRVVVLSFELLHAPATVCGPKKSTNLVKNKCVNFNFNGLTGTGVLTESNKKFLPFQQFGRDIADTTDAVRDPQTLEILDITPCSFGGVSVITPGTNTSNQVAVLYQDVNCTEVPVAIHADQLTPTWRVYSTGSNVFQTRAGCLIGAEHVNNSYECDIPIGAGICASYQTQTNSPRRARSVASQSIIAYTMSLGAENSVAYSNNSIAIPTNFTISVTTEILPVSMTKTSVDCTMYICGDSTECSNLLLQYGSFCTQLNRALTGIAVEQDKNTQQVFAQVKQIYKTPPIKDFGGFNFSQILPDPSKPSKRSFIEDLLFNKVTLADAGFIKQYGDCLGDIAARDLICAQKFNGLTVLPPLLTDEMIAQYTSALLAGTITSGWTFGAGAALQIPFAMQMAYRFNGIGVTQNVLYENQKLIANQFNSAIGKIQDSLSSTASALGKLQDVVNQNAQALNTLVKQLSSNFGCISSVLNDILSRLDKVEAEVQIDCLITGRLQSLQTYVTQQLIRAAEIRASANLAATKMSECVLGQSKRVDFCGKGYHLMSFPQSAPHGVVFLHVTYVPAQEKNFTTAPAICHDGKAHFPREGVFVSNGTHWFVTQRNFYEPQIITTDNTFVSGNCDVVIGIVNNTVYDPLQPELDSFKEELDKYFKNHTSPDVDLGDISGINASVVNIQKEIDRLNEVAKNLNESLIDLQELGKYEQYIK

SEQ ID NO: 2446 - protein, 1211 aa, Artificial Sequence
  SARS-CoV-2/France/HF1805/2020__EPI_ISL_414628 spike protein (1-1211)(A972C_R995C)
MFVFLVLLPLVSSQCVNLTTRTQLPPAYTNSFTRGVYYPDKVFRSSVLHSTQDLFLPFFSNVTWFHAIHVSGTNGTKRFDNPVLPFNDGVYFASTEKSNIIRGWIFGTTLDSKTQSLLIVNNATNVVIKVCEFQFCNDPFLGVYYHKNNKSWMESEFRVYSSANNCTFEYVSQPFLMDLEGKQGNFKNLREFVFKNIDGYFKIYSKHTPINLVRDLPQGFSALEPLVDLPIGINITRFQTLLALHRSYLTPGDSSSGWTAGAAAYYVGYLQPRTFLLKYNENGTITDAVDCALDPLSETKCTLKSFTVEKGIYQTSNFRVQPTESIVRFPNITNLCPFGEVFNATRFASVYAWNRKRISNCVADYSVLYNSASFSTFKCYGVSPTKLNDLCFTNVYADSFVIRGDEVRQIAPGQTGKIADYNYKLPDDFTGCVIAWNSNNLDSKVGGNYNYLYRLFRKSNLKPFERDISTEIYQAGSTPCNGVEGFNCYFPLQSYGFQPTNGVGYQPYRVVVLSFELLHAPATVCGPKKSTNLVKNKCVNFNFNGLTGTGVLTESNKKFLPFQQFGRDIADTTDAVRDPQTLEILDITPCSFGGVSVITPGTNTSNQVAVLYQGVNCTEVPVAIHADQLTPTWRVYSTGSNVFQTRAGCLIGAEHVNNSYECDIPIGAGICASYQTQTNSPRRARSVASQSIIAYTMSLGAENSVAYSNNSIAIPTNFTISVTTEILPVSMTKTSVDCTMYICGDSTECSNLLLQYGSFCTQLNRALTGIAVEQDKNTQEVFAQVKQIYKTPPIKDFGGFNFSQILPDPSKPSKRSFIEDLLFNKVTLADAGFIKQYGDCLGDIAARDLICAQKFNGLTVLPPLLTDEMIAQYTSALLAGTITSGWTFGAGAALQIPFAMQMAYRFNGIGVTQNVLYENQKLIANQFNSAIGKIQDSLSSTASALGKLQDVVNQNAQALNTLVKQLSSNFGCISSVLNDILSRLDKVEAEVQIDCLITGRLQSLQTYVTQQLIRAAEIRASANLAATKMSECVLGQSKRVDFCGKGYHLMSFPQSAPHGVVFLHVTYVPAQEKNFTTAPAICHDGKAHFPREGVFVSNGTHWFVTQRNFYEPQIITTDNTFVSGNCDVVIGVVNNTVYDPLQPELDSFKEELDKYFKNHTSPDVDLGDISGINASVVNIQKEIDRLNEVAKNLNESLIDLQELGKYEQYIK

SEQ ID NO: 2447 - protein, 1211 aa, Artificial Sequence
  SARS-CoV-2/Netherlands/ZuidHolland_9/2020__EPI_ISL_414445 spike protein (1-1211)(A972C_R995C)
MFVFLVLLPLVSSQCVNLTTRTQLPPAYTNSFTRGVYYPDKVFRSSVLHSTQDLFLPFFSNVTWFHAIHVSGTNGTKRFDNPVLPFNDGVYFASTEKSNIIRGWIFGTTLDSKTQSLLIVNNATNVVIKVCEFQFCNDPFLGVYYHKNNKSWMESEFRVYSSANNCTFEYVSQPFLMDLEGKQGNFKNLREFVFKNIDGYFKIYSKHTPINLVRDLPQGFSALEPLVDLPIGINITRFQTLLALHRSYLTPGDSSSGWTAGAAAYYVGYLQPRTFLLKYNENGTITDAVDCALDPLSETKCTLKSFTVEKGIYQTSNFRVQPTESIVRFPNITNLCPFGEVFNATRFASVYAWNRKRISNCVADYSVLYNSASFSTFKCYGVSPTKLNDLCFTNVYADSFVIRGDEVRQIAPGQTGKIADYNYKLPDDFTGCVIAWNSNNLDSKVGGNYNYLYRLFRKSNLKPFERDISTEIYQAGSTPCNGVEGFNCYFPLQSYGFQPTNGVGYQPYRVVVLSFELLHAPATVCGPKKSTNLVKNKCVNFNFNGLTGTGVLTESNKKFLPFQQFGRDIADTTDAVRDPQTLEILDITPCSFGGVSVITPGTNTSNQVAVLYQGVNCTEVPVAIHADQLTPTWRVYSTGSNVFQTRAGCLIGAEHVNNSYECDIPIGAGICASYQTQTNSPRRARSVASQSIIAYTMSLGAENSVAYSNNSIAIPTNFTISVTTEILPVSMTKTSVDCTMYICGDSTECSNLLLQYGSFCTQLNRALTGIAVEQDKNTQEVFAQVKQIYKTPPIKDFGGFNFSQILPDPSKPSKRSFIEDLLFNKVTLADAGFIKQYGDCLGDIAARDLICVQKFNGLTVLPPLLTDEMIAQYTSALLAGTITSGWTFGAGAALQIPFAMQMAYRFNGIGVTQNVLYENQKLIANQFNSAIGKIQDSLSSTASALGKLQDVVNQNAQALNTLVKQLSSNFGCISSVLNDILSRLDKVEAEVQIDCLITGRLQSLQTYVTQQLIRAAEIRASANLAATKMSECVLGQSKRVDFCGKGYHLMSFPQSAPHGVVFLHVTYVPAQEKNFTTAPAICHDGKAHFPREGVFVSNGTHWFVTQRNFYEPQIITTDNTFVSGNCDVVIGIVNNTVYDPLQPELDSFKEELDKYFKNHTSPDVDLGDISGINASVVNIQKEIDRLNEVAKNLNESLIDLQELGKYEQYIK

SEQ ID NO: 2448 - protein, 1211 aa, Artificial Sequence
  SARS-CoV-2/Finland/FIN03032020A/2020__EPI_ISL_413602 spike protein (1-1211)(A972C_R995C)
MFVFLVLLPLVSSQCVNLTTRTQLPPAYTNSFTRGVYYPDKVFRSSVLHSTQDLFLPFFSNVTWFHAIHVSGTNGTKRFDNPVLPFNDGVYFASTEKSNIIRGWIFGTTLDSKTQSLLIVNNATNVVIKVCEFQFCNDPFLGVYYHKNNKSWMESEFRVYSSANNCTFEYVSQPFLMDLEGKQGNFKNLREFVFKNIDGYFKIYSKHTPINLVRDLPQGFSALEPLVDLPIGINITRFQTLLALHRSYLTPGDSSSGWTAGAAAYYVGYLQPRTFLLKYNENGTITDAVDCALDPLSETKCTLKSFTVEKGIYQTSNFRVQPTESIVRFPNITNLCPFGEVFNATRFASVYAWNRKRISNCVADYSVLYNSASFSTFKCYGVSPTKLNDLCFTNVYADSFVIRGDEVRQIAPGQTGKIADYNYKLPDDFTGCVISWNSNNLDSKVGGNYNYLYRLFRKSNLKPFERDISTEIYQAGSTPCNGVEGFNCYFPLQSYGFQPTNGVGYQPYRVVVLSFELLHAPATVCGPKKSTNLVKNKCVNFNFNGLTGTGVLTESNKKFLPFQQFGRDIADTTDAVRDPQTLEILDITPCSFGGVSVITPGTNTSNQVAVLYQGVNCTEVPVAIHADQLTPTWRVYSTGSNVFQTRAGCLIGAEHVNNSYECDIPIGAGICASYQTQTNSPRRARSVASQSIIAYTMSLGAENSVAYSNNSIAIPTNFTISVTTEILPVSMTKTSVDCTMYICGDSTECSNLLLQYGSFCTQLNRALTGIAVEQDKNTQEVFAQVKQIYKTPPIKDFGGFNFSQILPDPSKPSKRSFIEDLLFNKVTLADAGFIKQYGDCLGDIAARDLICAQKFNGLTVLPPLLTDEMIAQYTSALLAGTITSGWTFGAGAALQIPFAMQMAYRFNGIGVTQNVLYENQKLIANQFNSAIGKIQDSLSSTASALGKLQDVVNQNAQALNTLVKQLSSNFGCISSVLNDILSRLDKVEAEVQIDCLITGRLQSLQTYVTQQLIRAAEIRASANLAATKMSECVLGQSKRVDFCGKGYHLMSFPQSAPHGVVFLHVTYVPAQEKNFTTAPAICHDGKAHFPREGVFVSNGTHWFVTQRNFYEPQIITTDNTFVSGNCDVVIGIVNNTVYDPLQPELDSFKEELDKYFKNHTSPDVDLGDISGINASVVNIQKEIDRLNEVAKNLNESLIDLQELGKYEQYIK

SEQ ID NO: 2449 - protein, 1211 aa, Artificial Sequence
  SARS-CoV-2/France/GE1977/2020__EPI_ISL_414632 spike protein (1-1211)(A972C_R995C)
MFVFLVLLPLVSSQCVNLTTRTQLPPAYTNSFTRGVYYPDKVFRSSVLHSTQDLFLPFFSNVTWFHAIHVSGTNGTKRFDNPVLPFNDGVYFASTEKSNIIRGWIFGTTLDSKTQSLLIVNNATNVVIKVCEFQFCNDPFLGVYYHKNNKSWMESEFRVYSSANNCTFEYVSQPFLMDLEGKQGNFKNLREFVFKNIDGYFKIYSKHTPINLVRDLPQGFSALEPLVDLPIGINITRFQTLLALHRSYLTPGDSSSGWTAGAAAYYVGYLQPRTFLLKYNENGTITDAVDCALDPLSETKCTLKSFTVEKGIYQTSNFRVQPTESIVRFPNITNLCPFGEVFNATRFASVYAWNRKRISNCVADYSVLYNSASFSTFKCYGVSPTKLNDLCFTNVYADSFVIRGDEVRQIAPGQTGKIADYNYKLPDDFTGCVIAWNSNNLDSKVGGNYNYLYRLFRKSNLKPFERDISTEIYQAGSTPCNGVEGFNCYFPLQSYGFQPTNGVGYQPYRVVVLSFELLHAPATVCGPKKSTNLVKNKCVNFNFNGLTGTGVLTESNKKFLPFQQFGRDIADTTDAVRDPQTLEILDITPCSFGGVSVITPGTNTSNQVAVLYQGVNCTEVPVAIHADQLTPTWRVYSTGSNVFQTRAGCLIGAEHVNNSYECDIPIGAGICASYQTQTNSPRRARSVASQSIIAYTMSLGAENSVAYSNNSIAIPTNFTISVTTEILPVSMTKTSVDCTMYICGDSTECSNLLLQYGSFCTQLNRALTGIAVEQDKNTQEVFAQVKQIYKTPPIKDFGGFNFSQILPDPSKPSKRSFIEDLLFNKVTLADAGFIKQYGDCLGDIAARDLICAQKFNGLTVLPPLLTDEMIAQYTSALLAGTITSGWTFGAGAALQIPFAMQMAYRFNGIGVTQNVLYENQKLIANQFNSAIGKIQDSLFSTASALGKLQDVVNQNAQALNTLVKQLSSNFGCISSVLNDILSRLDKVEAEVQIDCLITGRLQSLQTYVTQQLIRAAEIRASANLAATKMSECVLGQSKRVDFCGKGYHLMSFPQSAPHGVVFLHVTYVPAQEKNFTTAPAICHDGKAHFPREGVFVSNGTHWFVTQRNFYEPQIITTDNTFVSGNCDVVIGIVNNTVYDPLQPELDSFKEELDKYFKNHTSPDVDLGDISGINASVVNIQKEIDRLNEVAKNLNESLIDLQELGKYEQYIK

SEQ ID NO: 2450 - protein, 1211 aa, Artificial Sequence
  SARS-CoV-2/Finland/FIN-313/2020__EPI_ISL_414641 spike protein (1-1211)(A972C_R995C)
MFVFLVLLPLVSSQCVNLTTRTQLPPAYTNSFTRGVYYPDKVFRSSVLHSTQDLFLPFFSNVTWFHAIHVSGTNGTKRFDNPVLPFNDGVYFASTEKSNIIRGWIFGTTLDSKTQSLLIVNNATNVVIKVCEFQFCNDPFLGVYYHKNNKSWMESEFRVYSSANNCTFEYVSQPFLMDLEGKQGNFKNLREFVFKNIDGYFKIYSKHTPINLVRDLPQGFSALEPLVDLPIGINITRFKTLLALHRSYLTPGDSSSGWTAGAAAYYVGYLQPRTFLLKYNENGTITDAVDCALDPLSETKCTLKSFTVEKGIYQTSNFRVQPTESIVRFPNITNLCPFGEVFNATRFASVYAWNRKRISNCVADYSVLYNSASFSTFKCYGVSPTKLNDLCFTNVYADSFVIRGDEVRQIAPGQTGKIADYNYKLPDDFTGCVIAWNSNNLDSKVGGNYNYLYRLFRKSNLKPFERDISTEIYQAGSTPCNGVEGFNCYFPLQSYGFQPTNGVGYQPYRVVVLSFELLHAPATVCGPKKSTNLVKNKCVNFNFNGLTGTGVLTESNKKFLPFQQFGRDIADTTDAVRDPQTLEILDITPCSFGGVSVITPGTNTSNQVAVLYQGVNCTEVPVAIHADQLTPTWRVYSTGSNVFQTRAGCLIGAEHVNNSYECDIPIGAGICASYQTQTNSPRRARSVASQSIIAYTMSLGAENSVAYSNNSIAIPTNFTISVTTEILPVSMTKTSVDCTMYICGDSTECSNLLLQYGSFCTQLNRALTGIAVEQDKNTQEVFAQVKQIYKTPPIKDFGGFNFSQILPDPSKPSKRSFIEDLLFNKVTLADAGFIKQYGDCLGDIAARDLICAQKFNGLTVLPPLLTDEMIAQYTSALLAGTITSGWTFGAGAALQIPFAMQMAYRFNGIGVTQNVLYENQKLIANQFNSAIGKIQDSLSSTASALGKLQDVVNQNAQALNTLVKQLSSNFGCISSVLNDILSRLDKVEAEVQIDCLITGRLQSLQTYVTQQLIRAAEIRASANLAATKMSECVLGQSKRVDFCGKGYHLMSFPQSAPHGVVFLHVTYVPAQEKNFTTAPAICHDGKAHFPREGVFVSNGTHWFVTQRNFYEPQIITTDNTFVSGNCDVVIGIVNNTVYDPLQPELDSFKEELDKYFKNHTSPDVDLGDISGINASVVNIQKEIDRLNEVAKNLNESLIDLQELGKYEQYIK

SEQ ID NO: 2451 - protein, 1211 aa, Artificial Sequence
  SARS-CoV-2/Netherlands/ZuidHolland_2/2020__EPI_ISL_414556 spike protein (1-1211)(A972C_R995C)
MFVFLVLLPLVSSQCVNLTTRTQLPPAYTNSFTRGVYYPDKVFRSSVLHSTQDLFLPFFSNVTWFHAIHVSGTNGTKRFDNPVLPFNDGVYFASTEKSNIIRGWIFGTTLDSKTQSLLIVNNATNVVIKVCEFQFCNDPFLGVYYHKNNKSWMESEFRVYSSANNCTFEYVSQPFLMDLEGKQGNFKNLREFVFKNIDGYFKIYSKHTPINLVRDLPQGFSALEPLVDLPIGINITRFQTLLALHRSYLTPGDSSSGWTAGAAAYYVGYLQPRTFLLKYNENGTITDAVDCALDPLSETKCTLKSFTVEKGIYQTSNFRVQPTESIVRFPNITNLCPFGEVFNATRFASVYAWNRKRISNCVADYSVLYNSASFSTFKCYGVSPTKLNDLCFTNVYADSFVIRGDEVRQIAPGQTGKIADYNYKLPDDFTGCVIAWNSNNLDSKVGGNYNYLYRLFRKSNLKPFERDISTEIYQAGSTPCNGVEGFNCYFPLQSYGFQPTNGVGYQPYRVVVLSFELLHAPATVCGPKKSTNLVKNKCVNFNFNGLTGTGVLTESNKKFLPFQQFGRDIADTTDAVRDPQTLEILDITPCSFGGVSVITPGTNTSNQVAVLYQGVNCTEVPVAIHADQLTPTWRVYSTGSNVFQTRAGCLIGAEHVNNSYECDIPIGAGICASYQTQTNSPRRARSVASQSIIAYTMSLGAENSVAYSNNSIAIPTNFTISVTTEILPVSMTKTSVDCTMYICGDSTECSNLLLQYGSFCTQLNRALTGIALEQDKNTQEVFAQVKQIYKTPPIKDFGGFNFSQILPDPSKPSKRSFIEDLLFNKVTLADAGFIKQYGDCLGDIAARDLICAQKFNGLTVLPPLLTDEMIAQYTSALLAGTITSGWTFGAGAALQIPFAMQMAYRFNGIGVTQNVLYENQKLIANQFNSAIGKIQDSLSSTASALGKLQDVVNQNAQALNTLVKQLSSNFGCISSVLNDILSRLDKVEAEVQIDCLITGRLQSLQTYVTQQLIRAAEIRASANLAATKMSECVLGQSKRVDFCGKGYHLMSFPQSAPHGVVFLHVTYVPAQEKNFTTAPAICHDGKAHFPREGVFVSNGTHWFVTQRNFYEPQIITTDNTFVSGNCDVVIGIVNNTVYDPLQPELDSFKEELDKYFKNHTSPDVDLGDISGINASVVNIQKEIDRLNEVAKNLNESLIDLQELGKYEQYIK

SEQ ID NO: 2452 - protein, 1211 aa, Artificial Sequence
  SARS-CoV-2/USA/WA-UW31/2020__EPI_ISL_414618 spike protein (1-1211)(A972C_R995C)
MFVFLVLLPLVSSQCVNLTTRTQLPPAYTNSFTRGVYYPDKVFRSSVLHSTQDLFLPFFSNVTWFHAIHVSGTNGTKRFDNPVLPFNDGVYFASTEKSNIIRGWIFGTTLDSKTQSLLIVNNATNVVIKVCEFQFCNDPFLGVYYHKNNKSWMESEFRVYSSANNCTFEYVSQPFLMDLEGKQGNFKNLREFVFKNIDGYFKIYSKHTPINLVRDLPQGFSALEPLVDLPIGINITRFQTLLALHRSYLTPGDSSSGWTAGAAAYYVGYLQPRTFLLKYNENGTITDAVDCALDPLSETKCTLKSFTVEKGIYQTSNFRVQPTESIVRFPNITNLCPFGEVFNATRFASVYAWNRKRISNCVADYSVLYNSASFSTFKCYGVSPTKLNDLCFTNVYADSFVIRGDEVRQIAPGQTGKIADYNYKLPDDFTGCVIAWNSNNLDSKVGGNYNYLYRLFRKSNLKPFERDISTEIYQAGSTPCNGAEGFNCYFPLQSYGFQPTNGVGYQPYRVVVLSFELLHAPATVCGPKKSTNLVKNKCVNFNFNGLTGTGVLTESNKKFLPFQQFGRDIADTTDAVRDPQTLEILDITPCSFGGVSVITPGTNTSNQVAVLYQDVNCTEVPVAIHADQLTPTWRVYSTGSNVFQTRAGCLIGAEHVNNSYECDIPIGAGICASYQTQTNSPRRARSVASQSIIAYTMSLGAENSVAYSNNSIAIPTNFTISVTTEILPVSMTKTSVDCTMYICGDSTECSNLLLQYGSFCTQLNRALTGIAVEQDKNTQEVFAQVKQIYKTPPIKDFGGFNFSQILPDPSKPSKRSFIEDLLFNKVTLADAGFIKQYGDCLGDIAARDLICAQKFNGLTVLPPLLTDEMIAQYTSALLAGTITSGWTFGAGAALQIPFAMQMAYRFNGIGVTQNVLYENQKLIANQFNSAIGKIQDSLSSTASALGKLQDVVNQNAQALNTLVKQLSSNFGCISSVLNDILSRLDKVEAEVQIDCLITGRLQSLQTYVTQQLIRAAEIRASANLAATKMSECVLGQSKRVDFCGKGYHLMSFPQSAPHGVVFLHVTYVPAQEKNFTTAPAICHDGKAHFPREGVFVSNGTHWFVTQRNFYEPQIITTDNTFVSGNCDVVIGIVNNTVYDPLQPELDSFKEELDKYFKNHTSPDVDLGDISGINASVVNIQKEIDRLNEVAKNLNESLIDLQELGKYEQYIK

SEQ ID NO: 2453 - protein, 1211 aa, Artificial Sequence
  SARS-CoV-2/South Korea/SNU01/2020__EPI_ISL_411929 spike protein (1-1211)(A972C_R995C)
MFVFLVLLPLVSSQCVNLTTRTQLPPAYTNSFTRGVYYPDKVFRSSVLHSTQDLFLPFFSNVTWFHAIHVSGTNGTKRFDNPVLPFNDGVYFASTEKSNIIRGWIFGTTLDSKTQSLLIVNNATNVVIKVCEFQFCNDPFLGVYYHKNNKSWMESEFRVYSSANNCTFEYVSQPFLMDLEGKQGNFKNLREFVFKNIDGYFKIYSKHTPINLVRDLPQGFWALEPLVDLPIGINITRFQTLLALHRSYLTPGDSSSGWTAGAAAYYVGYLQPRTFLLKYNENGTITDAVDCALDPLSETKCTLKSFTVEKGIYQTSNFRVQPTESIVRFPNITNLCPFGEVFNATRFASVYAWNRKRISNCVADYSVLYNSASFSTFKCYGVSPTKLNDLCFTNVYADSFVIRGDEVRQIAPGQTGKIADYNYKLPDDFTGCVIAWNSNNLDSKVGGNYNYLYRLFRKSNLKPFERDISTEIYQAGSTPCNGVEGFNCYFPLQSYGFQPTNGVGYQPYRVVVLSFELLHAPATVCGPKKSTNLVKNKCVNFNFNGLTGTGVLTESNKKFLPFQQFGRDIADTTDAVRDPQTLEILDITPCSFGGVSVITPGTNTSNQVAVLYQDVNCTEVPVAIHADQLTPTWRVYSTGSNVFQTRAGCLIGAEHVNNSYECDIPIGAGICASYQTQTNSPRRARSVASQSIIAYTMSLGAENSVAYSNNSIAIPTNFTISVTTEILPVSMTKTSVDCTMYICGDSTECSNLLLQYGSFCTQLNRALTGIAVEQDKNTQEVFAQVKQIYKTPPIKDFGGFNFSQILPDPSKPSKRSFIEDLLFNKVTLADAGFIKQYGDCLGDIAARDLICAQKFNGLTVLPPLLTDEMIAQYTSALLAGTITSGWTFGAGAALQIPFAMQMAYRFNGIGVTQNVLYENQKLIANQFNSAIGKIQDSLSSTASALGKLQDVVNQNAQALNTLVKQLSSNFGCISSVLNDILSRLDKVEAEVQIDCLITGRLQSLQTYVTQQLIRAAEIRASANLAATKMSECVLGQSKRVDFCGKGYHLMSFPQSAPHGVVFLHVTYVPAQEKNFTTAPAICHDGKAHFPREGVFVSNGTHWFVTQRNFYEPQIITTDNTFVSGNCDVVIGIVNNTVYDPLQPELDSFKEELDKYFKNHTSPDVDLGDISGINASVVNIQKEIDRLNEVAKNLNESLIDLQELGKYEQYIK

SEQ ID NO: 2454 - protein, 1211 aa, Artificial Sequence
  SARS-CoV-2/China/WF0004/2020__EPI_ISL_413694 spike protein (1-1211)(A972C_R995C)
MFVFLVLLPLVSSQCVNLTTRTQLPPAYTNSFTRGVYYPDKVFRSSVLHSTQDLFLPFFSNVTWFHAIHVSGTNGTKRFDNPVLPFNDGVYFASTEKSNIIRGWIFGTTLDSKTQSLLIVNNATNVVIKVCEFQFCNDPFLGVYYHKNNKSWTESEFRVYSSANNCTFEYVSQPFLMDLEGKQGNFKNLREFVFKNIDGYFKIYSKHTPINLVRDLPQGFSALEPLVDLPIGINITRFQTLLALHRSYLTPGDSSSGWTAGAAAYYVGYLQPRTFLLKYNENGTITDAVDCALDPLSETKCTLKSFTVEKGIYQTSNFRVQPTESIVRFPNITNLCPFGEVFNATRFASVYAWNRKRISNCVADYSVLYNSASFSTFKCYGVSPTKLNDLCFTNVYADSFVIRGDEVRQIAPGQTGKIADYNYKLPDDFTGCVIAWNSNNLDSKVGGNYNYLYRLFRKSNLKPFERDISTEIYQAGSTPCNGVEGFNCYFPLQSYGFQPTNGVGYQPYRVVVLSFELLHAPATVCGPKKSTNLVKNKCVNFNFNGLTGTGVLTESNKKFLPFQQFGRDIADTTDAVRDPQTLEILDITPCSFGGVSVITPGTNTSNQVAVLYQDVNCTEVPVAIHADQLTPTWRVYSTGSNVFQTRAGCLIGAEHVNNSYECDIPIGAGICASYQTQTNSPRRARSVASQSIIAYTMSLGAENSVAYSNNSIAIPTNFTISVTTEILPVSMTKTSVDCTMYICGDSTECSNLLLQYGSFCTQLNRALTGIAVEQDKNTQEVFAQVKQIYKTPPIKDFGGFNFSQILPDPSKPSKRSFIEDLLFNKVTLADAGFIKQYGDCLGDIAARDLICAQKFNGLTVLPPLLTDEMIAQYTSALLAGTITSGWTFGAGAALQIPFAMQMAYRFNGIGVTQNVLYENQKLIANQFNSAIGKIQDSLSSTASALGKLQDVVNQNAQALNTLVKQLSSNFGCISSVLNDILSRLDKVEAEVQIDCLITGRLQSLQTYVTQQLIRAAEIRASANLAATKMSECVLGQSKRFDFCGKGYHLMSFPQSAPHGVVFLHVTYVPAQEKNFTTAPAICHDGKAHFPREGVFVSNGTHWFVTQRNFYEPQIITTDNTFVSGNCDVVIGIVNNTVYDPLQPELDSFKEELDKYFKNHTSPDVDLGDISGINASVVNIQKEIDRLNEVAKNLNESLIDLQELGKYEQYIK

SEQ ID NO: 2455 - protein, 1211 aa, Artificial Sequence
  SARS-CoV-2/China/WF0028/2020__EPI_ISL_413791 spike protein (1-1211)(A972C_R995C)
MFVFLVLLPLVSSQCVNLTTRTQLPPAYTNSFTRGVYYPDKVFRSSVLHSTQDLFLPFFSNVTWFHAIHVSGTNGTKRFDNPVLPFNDGVYFASTEKSNIIRGWIFGTTLDSKTQSLLIVNNATNVVIKVCEFQFCNDPFLGVYYHKNNKSWMESEFRVYSSANNCTFEYVSQPFLMDLEGKQGNFKNLREFVFKNIDGYFKIYSKHTPINLVRDLPQGFSALEPLVDLPIGINITRFQTLLALHRSYLTPGDSSSGWTAGAAAYYVGYLQPRTFLLKYNENGTITDAVDCALDPLSETKCTLKSFTVEKGIYQTSNFRVQPTESIVRFPNITNLCPFGEVFNATRFASVYAWNRKRISNCVADYSVLYNSASFSTFKCYGVSPTKLNDLCFTNVYADSFVIRGDEVRQIAPGQTGKIADYNYKLPDDFTGCVIAWNSNNLDSKVGGNYNYLYRLFRKSNLKPFERDISTEIYQAGSTPCNGVEGFNCYFPLQSYGFQPTNGVGYQPYRVVVLSFELLHAPATVCGPKKSTNLVKNKCVNFNFNGLTGTGVLTESNKKFLPFQQFGRDIADTTDAVRDPQTLEILDITPCSFGGVSVITPGTNTSNQVAVLYQDVNCTEVPVAIHADQLTPTWRVYSTGSNVFQTRAGCLIGAEHVNNSYECDIPIGAGICASYQTQTNSPRRARSVASQSIIAYTMSLGAENSVAYSNNSIAIPTNFTISVTTEILPVSMTKTSVDCTMYICGDSTECSNLLLQYGSFCTQLNRALTGIAVEQDKNTQEVFAQVKQIYKTPPIKDFGGFNFSQILPDPSKPSKRSFIEDLLFNKVTLADAGFIKQYGDCLGDIAARDLICAQKFNGLTVLPPLLTDEMIAQYTSALLAGTITSGWTFGAGAALQIPFAMQMAYRFNGIGVTQNVLYENQKLIANQFNSAIGKIQDSLSSTASALGKLQDVVNQNAQALNTLVKQLSSNFGCISSVLNDILSRLDKVEAEVQIDCLITGRLQSLQTYVTQQLIRAAEIRASANLAATKMSECVLGQSKRVDFCGKGYHLMSFPQSAPHGVVFLHVTYVPAQEKNFTTAPAICHDGKAHFPREGVFVSNGTHWFVTQRNFYEPQIITTDNTFVSGNCDVVIGIVNNTVYDPLQPELESFKEELDKYFKNHTSPDVDLGDISGINASVVNIQKEIDRLNEVAKNLNESLIDLQELGKYEQYIK

SEQ ID NO: 2456 - protein, 1211 aa, Artificial Sequence
  SARS-CoV-2/2019-nCoV/USA-CruiseA-18/2020__MT159716.1 spike protein (1-1211)(A972C_R995C)
MFVFLVLLPLVSSQCVNLTTRTQLPPAYTNSFTRGVYYPDKVFRSSVLHSTQDLFLPFFSNVTWFHAIHVSGTNGTKRFDNPVLPFNDGVYFASTEKSNIIRGWIFGTTLDSKTQSLLIVNNATNVVIKVCEFQFCNDPFLGVYYHKNNKSWMESELRVYSSANNCTFEYVSQPFLMDLEGKQGNFKNLREFVFKNIDGYFKIYSKHTPINLVRDLPQGFSALEPLVDLPIGINITRFQTLLALHRSYLTPGDSSSGWTAGAAAYYVGYLQPRTFLLKYNENGTITDAVDCALDPLSETKCTLKSFTVEKGIYQTSNFRVQPTESIVRFPNITNLCPFGEVFNATRFASVYAWNRKRISNCVADYSVLYNSASFSTFKCYGVSPTKLNDLCFTNVYADSFVIRGDEVRQIAPGQTGKIADYNYKLPDDFTGCVIAWNSNNLDSKVGGNYNYLYRLFRKSNLKPFERDISTEIYQAGSTPCNGVEGFNCYFPLQSYGFQPTNGVGYQPYRVVVLSFELLHAPATVCGPKKSTNLVKNKCVNFNFNGLTGTGVLTESNKKFLPFQQFGRDIADTTDAVRDPQTLEILDITPCSFGGVSVITPGTNTSNQVAVLYQDVNCTEVPVAIHADQLTPTWRVYSTGSNVFQTRAGCLIGAEHVNNSYECDIPIGAGICASYQTQTNSPRRARSVASQSIIAYTMSLGAENSVAYSNNSIAIPTNFTISVTTEILPVSMTKTSVDCTMYICGDSTECSNLLLQYGSFCTQLNRALTGIAVEQDKNTQEVFAQVKQIYKTPPIKDFGGFNFSQILPDPSKPSKRSFIEDLLFNKVTLADAGFIKQYGDCLGDIAARDLICAQKFNGLTVLPPLLTDEMIAQYTSALLAGTITSGWTFGAGAALQIPFAMQMAYRFNGIGVTQNVLYENQKLIANQFNSAIGKIQDSLSSTASALGKLQDVVNQNAQALNTLVKQLSSNFGCISSVLNDILSRLDKVEAEVQIDCLITGRLQSLQTYVTQQLIRAAEIRASANLAATKMSECVLGQSKRVDFCGKGYHLMSFPQSAPHGVVFLHVTYVPAQEKNFTTAPAICHDGKAHFPREGVFVSNGTHWFVTQRNFYEPQIITTDNTFVSGNCDVVIGIVNNTVYDPLQPELDSFKEELDKYFKNHTSPDVDLGDISGINASVVNIQKEIDRLNEVAKNLNESLIDLQELGKYEQYIK

SEQ ID NO: 2457 - protein, 1211 aa, Artificial Sequence
  SARS-CoV-2/SARS-CoV-2/Yunnan-01/human/2020/CHN__MT049951.1 spike protein (1-1211)(A972C_R995C)
MFVFLVLLPLVSSQCVNLTTRTQLPPANTNSFTRGVYYPDKVFRSSVLHSTQDLFLPFFSNVTWFHAIHVSGTNGTKRFDNPVLPFNDGVYFASTEKSNIIRGWIFGTTLDSKTQSLLIVNNATNVVIKVCEFQFCNDPFLGVYYHKNNKSWMESEFRVYSSANNCTFEYVSQPFLMDLEGKQGNFKNLREFVFKNIDGYFKIYSKHTPINLVRDLPQGFSALEPLVDLPIGINITRFQTLLALHRSYLTPGDSSSGWTAGAAAYYVGYLQPRTFLLKYNENGTITDAVDCALDPLSETKCTLKSFTVEKGIYQTSNFRVQPTESIVRFPNITNLCPFGEVFNATRFASVYAWNRKRISNCVADYSVLYNSASFSTFKCYGVSPTKLNDLCFTNVYADSFVIRGDEVRQIAPGQTGKIADYNYKLPDDFTGCVIAWNSNNLDSKVGGNYNYLYRLFRKSNLKPFERDISTEIYQAGSTPCNGVEGFNCYFPLQSYGFQPTNGVGYQPYRVVVLSFELLHAPATVCGPKKSTNLVKNKCVNFNFNGLTGTGVLTESNKKFLPFQQFGRDIADTTDAVRDPQTLEILDITPCSFGGVSVITPGTNTSNQVAVLYQDVNCTEVPVAIHADQLTPTWRVYSTGSNVFQTRAGCLIGAEHVNNSYECDIPIGAGICASYQTQTNSPRRARSVASQSIIAYTMSLGAENSVAYSNNSIAIPTNFTISVTTEILPVSMTKTSVDCTMYICGDSTECSNLLLQYGSFCTQLNRALTGIAVEQDKNTQEVFAQVKQIYKTPPIKDFGGFNFSQILPDPSKPSKRSFIEDLLFNKVTLADAGFIKQYGDCLGDIAARDLICAQKFNGLTVLPPLLTDEMIAQYTSALLAGTITSGWTFGAGAALQIPFAMQMAYRFNGIGVTQNVLYENQKLIANQFNSAIGKIQDSLSSTASALGKLQDVVNQNAQALNTLVKQLSSNFGCISSVLNDILSRLDKVEAEVQIDCLITGRLQSLQTYVTQQLIRAAEIRASANLAATKMSECVLGQSKRVDFCGKGYHLMSFPQSAPHGVVFLHVTYVPAQEKNFTTAPAICHDGKAHFPREGVFVSNGTHWFVTQRNFYEPQIITTDNTFVSGNCDVVIGIVNNTVYDPLQPELDSFKEELDKYFKNHTSPDVDLGDISGINASVVNIQKEIDRLNEVAKNLNESLIDLQELGKYEQYIK

SEQ ID NO: 2458 - protein, 1211 aa, Artificial Sequence
  SARS-CoV-2/USA/WA-UW292/2020__EPI_ISL_418077 spike protein (1-1211)(A972C_R995C)
MFVFLVLLPLVSSQCVNLTTRTQLPPAYTNSFTRGVYYPDKVFRSSVLHSTQDLFLPFFSNVTWFHAIHVSGTNGTKRFDNPVLPFNDGVYFASTEKSNIIRGWIFGTTLDSKTQSLLIVNNATNVVIKVCEFQFCNDPFLGVYYHKNNKSWMESEFRVYSSANNCTFEYVSQPFLMDLEGKQGNFKNLREFVFKNIDGYFKIYSKHTPINLVRDLPQGFSALEPLVDLPIGINITRFQTLLALHRSYLTPGDSSSGWTAGAAAYYVGYLQPRTFLLKYNENGTITDAVDCALDPLSETKCTLKSFTVEKGIYQTSNFRVQPTESIVRFPNITNLCPFGEVFNATRFASVYAWNRKRISNCVADYSVLYNSASFSTFKCYGVSPTKLNDLCFTNVYADSFVIRGDEVRQIAPGQTGKIADYNYKLPDDFTGCVIAWNSNNLDSKVGGNYNYLYRLFRKSNLKPFERDISTEIYQASSTPCNGVEGFNCYFPLQSYGFQPTNGVGYQPYRVVVLSFELLHAPATVCGPKKSTNLVKNKCVNFNFNGLTGTGVLTESNKKFLPFQQFGRDIADTTDAVRDPQTLEILDITPCSFGGVSVITPGTNTSNQVAVLYQDVNCTEVPVAIHADQLTPTWRVYSTGSNVFQTRAGCLIGAEHVNNSYECDIPIGAGICASYQTQTNSPRRARSVASQSIIAYTMSLGAENSVAYSNNSIAIPTNFTISVTTEILPVSMTKTSVDCTMYICGDSTECSNLLLQYGSFCTQLNRALTGIAVEQDKNTQEVFAQVKQIYKTPPIKDFGGFNFSQILPDPSKPSKRSFIEDLLFNKVTLADAGFIKQYGDCLGDIAARDLICAQKFNGLTVLPPLLTDEMIAQYTSALLAGTITSGWTFGAGAALQIPFAMQMAYRFNGIGVTQNVLYENQKLIANQFNSAIGKIQDSLSSTASALGKLQDVVNQNAQALNTLVKQLSSNFGCISSVLNDILSRLDKVEAEVQIDCLITGRLQSLQTYVTQQLIRAAEIRASANLAATKMSECVLGQSKRVDFCGKGYHLMSFPQSAPHGVVFLHVTYVPAQEKNFTTAPAICHDGKAHFPREGVFVSNGTHWFVTQRNFYEPQIITTDNTFVSGNCDVVIGIVNNTVYDPLQPELDSFKEELDKYFKNHTSPDVDLGDISGINASVVNIQKEIDRLNEVAKNLNESLIDLQELGKYEQYIK

SEQ ID NO: 2459 - protein, 1211 aa, Artificial Sequence
  SARS-CoV-2/Iceland/192/2020__EPI_ISL_417819 spike protein (1-1211)(A972C_R995C)
MFVFFVLLPLVSSQCVNLTTRTQLPPAYTNSFTRGVYYPDKVFRSSVLHSTQDLFLPFFSNVTWFHAIHVSGTNGTKRFDNPVLPFNDGVYFASTEKSNIIRGWIFGTTLDSKTQSLLIVNNATNVVIKVCEFQFCNDPFLGVYYHKNNKSWMESEFRVYSSANNCTFEYVSQPFLMDLEGKQGNFKNLREFVFKNIDGYFKIYSKHTPINLVRDLPQGFSALEPLVDLPIGINITRFQTLLALHRSYLTPGDSSSGWTAGAAAYYVGYLQPRTFLLKYNENGTITDAVDCALDPLSETKCTLKSFTVEKGIYQTSNFRVQPTESIVRFPNITNLCPFGEVFNATRFASVYAWNRKRISNCVADYSVLYNSASFSTFKCYGVSPTKLNDLCFTNVYADSFVIRGDEVRQIAPGQTGKIADYNYKLPDDFTGCVIAWNSNNLDSKVGGNYNYLYRLFRKSNLKPFERDISTEIYQAGSTPCNGVEGFNCYFPLQSYGFQPTNGVGYQPYRVVVLSFELLHAPATVCGPKKSTNLVKNKCVNFNFNGLTGTGVLTESNKKFLPFQQFGRDIADTTDAVRDPQTLEILDITPCSFGGVSVITPGTNTSNQVAVLYQGVNCTEVPVAIHADQLTPTWRVYSTGSNVFQTRAGCLIGAEHVNNSYECDIPIGAGICASYQTQTNSPRRARSVASQSIIAYTMSLGAENSVAYSNNSIAIPTNFTISVTTEILPVSMTKTSVDCTMYICGDSTECSNLLLQYGSFCTQLNRALTGIAVEQDKNTQEVFAQVKQIYKTPPIKDFGGFNFSQILPDPSKPSKRSFIEDLLFNKVTLADAGFIKQYGDCLGDIAARDLICAQKFNGLTVLPPLLTDEMIAQYTSALLAGTITSGWTFGAGAALQIPFAMQMAYRFNGIGVTQNVLYENQKLIANQFNSAIGKIQDSLSSTASALGKLQDVVNQNAQALNTLVKQLSSNFGCISSVLNDILSRLDKVEAEVQIDCLITGRLQSLQTYVTQQLIRAAEIRASANLAATKMSECVLGQSKRVDFCGKGYHLMSFPQSAPHGVVFLHVTYVPAQEKNFTTAPAICHDGKAHFPREGVFVSNGTHWFVTQRNFYEPQIITTDNTFVSGNCDVVIGIVNNTVYDPLQPELDSFKEELDKYFKNHTSPDVDLGDISGINASVVNIQKEIDRLNEVAKNLNESLIDLQELGKYEQYIK

SEQ ID NO: 2460 - protein, 1211 aa, Artificial Sequence
  SARS-CoV-2/Belgium/ULG-6939/2020__EPI_ISL_417020 spike protein (1-1211)(A972C_R995C)
MFVFLVLLPLVSSQCVNLTTRTQLPPAYTNSFTRGVYYPDKVFRSSVLHSTQDLFLPFFSNVTWFHAIHVSGTNGTKRFDNPVLPFNDGVYFASTEKSNIIRGWIFGTTLDSKTQSLLIVNNATNVVIKVCEFQFCNDPFLGVYYHKNNKSWMESEFRVYSSANNCTFEYVSQPFLMDLEGKQGNFKNLREFVFKNIDGYFKIYSKHTPINLVRDLPQGFSALEPLVDLPIGINITRFQTLLALHRSYLTPGDSSSGWTAGAAAYYVGYLQPRTFLLKYNENGTITDAVDCALDPLSETKCTLKSFTVEKGIYQTSNFRVQPTESIVRFPNITNLCPFGEVFNATRFASVYAWNRKRISNCVADYSVLYNSASFSTFKCYGVSPTKLNDLCFTNVYADSFVIRGDEVRQIAPGQTGKIADYNYKLPDDFTGCVIAWNSNNLDSKVGGNYNYLYRLFRKSNLKPFERDISTEIYQAGSTPCNGVEGFNCYFPLQSYGFQPTNGVGYQPYRVVVLSFELLHAPATVCGPKKSTNLVKNKCVNFNFNGLTGTGVLTESNKKFLPFQQFGRDIADTTDAVRDPQTLEILDITPCSFGGVSVITPGTNTSNQVAVLYQGVNCTEVPVAIHADQLTPTWRVYSTGSNVFQTRAGCLIGAEHVNNSYECDIPIGAGICASYQTQTNSPRRARSVASQSIIAYTMSLGAENSVVYSNNSIAIPTNFTISVTTEILPVSMTKTSVDCTMYICGDSTECSNLLLQYGSFCTQLNRALTGIAVEQDKNTQEVFAQVKQIYKTPPIKDFGGFNFSQILPDPSKPSKRSFIEDLLFNKVTLADAGFIKQYGDCLGDIAARDLICAQKFNGLTVLPPLLTDEMIAQYTSALLAGTITSGWTFGAGAALQIPFAMQMAYRFNGIGVTQNVLYENQKLIANQFNSAIGKIQDSLSSTASALGKLQDVVNQNAQALNTLVKQLSSNFGCISSVLNDILSRLDKVEAEVQIDCLITGRLQSLQTYVTQQLIRAAEIRASANLAATKMSECVLGQSKRVDFCGKGYHLMSFPQSAPHGVVFLHVTYVPAQEKNFTTAPAICHDGKAHFPREGVFVSNGTHWFVTQRNFYEPQIITTDNTFVSGNCDVVIGIVNNTVYDPLQPELDSFKEELDKYFKNHTSPDVDLGDISGINASVVNIQKEIDRLNEVAKNLNESLIDLQELGKYEQYIK

SEQ ID NO: 2461 - protein, 1211 aa, Artificial Sequence
  SARS-CoV-2/France/HF2496/2020__EPI_ISL_418231 spike protein (1-1211)(A972C_R995C)
MFVFLVLLPLVSSQCVNLTTRTQLPPAYTNSFTRGVYYPDKVFRSSVLHSTQDLFLPFFSNVTWFHAIHVSGTNGTKRFDNPVLPFNDGVYFASTEKSNIIRGWIFGTTLDSKTQSLLIVNNATNVVIKVCEFQFCNDPFLGVYYHKNNKSWMESEFRVYSSANNCTFEYVSQPFLMDLEGKQGNFKNLREFVFKNIDGYFKIYSKHTPINLVRDLPQGFSALEPLVDLPIGINITRFQTLLALHRSYLTPGDSSSGWTAGAAAYYVGYLQPRTFLLKYNENGTITDAVDCALDPLSETKCTLKSFTVEKGIYQTSNFRVQPTESIVRFPNITNLCPFGEVFNATRFASVYAWNRKRISNCVADYSVLYNSASFSTFKCYGVSPTKLNDLCFTNVYADSFVIRGDEVRQIAPGQTGKIADYNYKLPDDFTGCVIAWNSNNLDSKVGGNYNYLYRLFRKSNLKPFERDISTEIYQAGSTPCNGVEGFNCYFPLQSYGFQPTNGVGYQPYRVVVLSFELLHAPATVCGPKKSTNLVKNKCVNFNFNGLTGTGVLTESNKKFLPFQQFGRDIADTTDAVRDPQTLEILDITPCSFGGVSVITPGTNTSNQVAVLYQGVNCTEVPVAIHADQLTPTWRVYSTGSNVFQTRAGCLIGAEHVNNSYECDIPIGAGICASYQTQTNSPRRARSVASQSIIAYTMSLGAENSVAYSNNSIAIPTNFTISVTTEILPVSMTKTSVDCTMYICGDSTECSNLLLQYGSFCTQLNRALTGIAVEQDKNTQEVFAQVKQIYKTPPIKDFGGFNFSQILPDPSKPSKRSFIEDLLFNKVTLADAGFIKQYGDCLGDIVARDLICAQKFNGLTVLPPLLTDEMIAQYTSALLAGTITSGWTFGAGAALQIPFAMQMAYRFNGIGVTQNVLYENQKLIANQFNSAIGKIQDSLSSTASALGKLQDVVNQNAQALNTLVKQLSSNFGCISSVLNDILSRLDKVEAEVQIDCLITGRLQSLQTYVTQQLIRAAEIRASANLAATKMSECVLGQSKRVDFCGKGYHLMSFPQSAPHGVVFLHVTYVPAQEKNFTTAPAICHDGKAHFPREGVFVSNGTHWFVTQRNFYEPQIITTDNTFVSGNCDVVIGIVNNTVYDPLQPELDSFKEELDKYFKNHTSPDVDLGDISGINASVVNIQKEIDRLNEVAKNLNESLIDLQELGKYEQYIK

SEQ ID NO: 2462 - protein, 1211 aa, Artificial Sequence
  SARS-CoV-2/USA/WA-UW291/2020__EPI_ISL_418076 spike protein (1-1211)(A972C_R995C)
MFVFLVLLPLVSSQCVNLTTRTQLPPAYTNSFTRGVYYPDKVFRSSVLHSTQDLFLPFFSNVTWFHAIHVSGTNGTKRFDNPVLPFNDGVYFASTEKSNIIRGWIFGTTLDSKTQSLLIVNNATNVVIKVCEFQFCNDPFLGVYYHKNNKSWMESEFRVYSSANNCTFEYVSQPFLMDLEGKQGNFKNLREFVFKNIDGYFKIYSKHTPINLVRDLPQGFSALEPLVDLPIGINITRFQTLLALHRSYLTPGDSSSGWTAGAAAYYVGYLQPRTFLLKYNENGTITDAVDCALDPLSETKCTLKSFTVEKGIYQTSNFRVQPTESIVRFPNITNLCPFGEVFNATRFASVYAWNRKRISNCVADYSVLYNSASFSTFKCYGVSPTKLNDLCFTNVYADSFVIRGDEVRQIAPGQTGKIADYNYKLPDDFTGCVIAWNSNNLDSKVGGNYNYLYRLFRKSNLKPFERDISTEIYQAGSTPCNGVEGFNCYFPLQSYGFQPTNGVGYQPYRVVVLSFELLHAPATVCGPKKSTNLVKNKCVNFNFNGLTGTGVLTESNKKFLPFQQFGRDIADTTDAVRDPQTLEILDITPCSFGGVSVITPGTNTSNQVAVLYQGVNCTEVPVAIHADQLTPTWRVYSTGSNVFQTRAGCLIGAEHVNNSYECDIPIGAGICASYQTQTNSPRRARSVASQSIIAYTMSLGAENSVAYSNNSIAIPTNFTISVTTEILPVSMTKTSVDCTMYICGDSTECSNLLLQYGSFCTQLNRALTGIAVEQDKNTQEVFAQVKQIYKTPPIKDFGGFNFSQILPDPSKPSKRSFIEDLLFNKVTLADAGFIKQYGDCLGDIAARDLICAQKFNGLTVLPPLLTDEMIAQYTSALLAGTITSGWTFGAGAALQIPFAMQMAYRFNGIGVTQNVLYENQKLIANQFNSAIGKIQYSLSSTASALGKLQDVVNQNAQALNTLVKQLSSNFGCISSVLNDILSRLDKVEAEVQIDCLITGRLQSLQTYVTQQLIRAAEIRASANLAATKMSECVLGQSKRVDFCGKGYHLMSFPQSAPHGVVFLHVTYVPAQEKNFTTAPAICHDGKAHFPREGVFVSNGTHWFVTQRNFYEPQIITTDNTFVSGNCDVVIGIVNNTVYDPLQPELDSFKEELDKYFKNHTSPDVDLGDISGINASVVNIQKEIDRLNEVAKNLNESLIDLQELGKYEQYIK

SEQ ID NO: 2463 - protein, 1211 aa, Artificial Sequence; identical to SEQ ID NO: 2426
  SARS-CoV-2/Portugal/PT0034/2020__EPI_ISL_418019 spike protein (1-1211)(A972C_R995C)

SEQ ID NO: 2464 - protein, 1211 aa, Artificial Sequence
  SARS-CoV-2/Iceland/202/2020__EPI_ISL_417750 spike protein (1-1211)(A972C_R995C)
MFVFLVLLPLVSSQCVNLTTRTQLPPAYTNSFTRGVYYPDKVFRSSVLHSTQDLFLPFFSNVTWFHAIHVSGTNGTKRFDNPVLPFNDGVYFASTEKSNIIRGWIFGTTLDSKTQSLLIVNNATNVVIKVCEFQFCNDPFLGVYYHKNNKSWMESEFRVYSSANNCTFEYVSQPFLMDLEGKQGNFKNLREFVFKNIDGYFKIYSKHTPINLVRDLPQGFSALEPLVDLPIGINITRFQTLLALHRSYLTPGDSSSGWTAGAAAYYVGYLQPRTFLLKYNENGTITDAVDCALDPLSETKCTLKSFTVEKGIYQTSNFRVQPTESIVRFPNITNLCPFGEVFNATRFASVYAWNRKRISNCVADYSVLYNSASFSTFKCYGVSPTKLNDLCFTNVYADSFVIRGDEVRQIAPGQTGKIADYNYKLPDDFTGCVIAWNSNNLDSKVGGNYNYLYRLFRKSNLKPFERDISTEIYQAGSTPCNGVEGFNCYFPLQSYGFQPTNGVGYQPYRVVVLSFELLHAPATVCGPKKSTNLVKNKCVNFNFNGLTGTGVLTESNKKFLPFQQFGRDIADTTDAVRDPQTLEILDITPCSFGGVSVITPGTNTSNQVAVLYQDVNCTEVPVAIHADQLTPTWRVYSTGSNVFQTRAGCLIGAEHVNNSYECDIPIGAGICASYQTQTNSPRRARSVASQSIIAYTMSLGAENSVAYSNNSIAIPTNFTISVTTEILPVSMTKTSVDCTMYICGDSTECSNLLLQYGSFCTQLNRALTGIAVEQDKNTQEVFAQVKQIYKTPPIKDFGGFNFSQILPDPSKPSKRSFIEDLLFNKVTLADAGFIKQYGDCLGDIAARDLICAQKFNGLTVLPPLLTDEMIAQYTSALLAGTITSGWTFGAGAALQIPFAMQMAYRFNGIGVTQNVLYENQKLIANQFNSAIGKIQDSLSSTASALGKLQDVVNQNAQALNTLVKQLSSNFGCISSVLNDILSRLDKVEAEVQIDCLITGRLQSLQTYVTQQLIRAAEIRASANLAATKMSECVLGQSKRVDFCGKGYHLMSFPQSAPHGVVFLHVTYVPAQEKNFTTAPAICHDGKAHFPREGVFVSNGTHWFVTQRNFYEPQIITTDNTFVSGNCDVVIGIVNNTVYDPLQPELDSFKEELDKYFKNHTSPDVDLGDIPGINASVVNIQKEIDRLNEVAKNLNESLIDLQELGKYEQYIK

SEQ ID NO: 2465 - protein, 1211 aa, Artificial Sequence
  SARS-CoV-2/USA/WA-UW261/2020__EPI_ISL_418046 spike protein (1-1211)(A972C_R995C)
MFVFLVLLPLVSSQCVNLTTRTQLPPAYTNSFTRGVYYPDKVFRSSVLHSTQDLFLPFFSNVTWFHAIHVSGTNGTKRFDNPVLPFNDGVYFASTEKSNIIRGWIFGTTLDSKTQSLLIVNNATNVVIKVCEFQFCNDPFLGVYYHKNNKSWMESEFRVYSSANNCTFEYVSQPFLMDLEGKQGNFKNLREFVFKNIDGYFKIYSKHTPINLVRDLPQGFSALEPLVDLPIGINITRFQTLLALHRSYLTPGDSSSGWTAGAAAYYVGYLQPRTFLLKYNENGTITDAVDCALDPLSETKCTLKSFTVEKGIYQTSNFRVQPTESIVRFPNITNLCPFGEVFNATRFTSVYAWNRKRISNCVADYSVLYNSASFSTFKCYGVSPTKLNDLCFTNVYADSFVIRGDEVRQIAPGQTGKIADYNYKLPDDFTGCVIAWNSNNLDSKVGGNYNYLYRLFRKSNLKPFERDISTEIYQAGSTPCNGVEGFNCYFPLQSYGFQPTNGVGYQPYRVVVLSFELLHAPATVCGPKKSTNLVKNKCVNFNFNGLTGTGVLTESNKKFLPFQQFGRDIADTTDAVRDPQTLEILDITPCSFGGVSVITPGTNTSNQVAVLYQDVNCTEVPVAIHADQLTPTWRVYSTGSNVFQTRAGCLIGAEHVNNSYECDIPIGAGICASYQTQTNSPRRARSVASQSIIAYTMSLGAENSVAYSNNSIAIPTNFTISVTTEILPVSMTKTSVDCTMYICGDSTECSNLLLQYGSFCTQLNRALTGIAVEQDKNTQEVFAQVKQIYKTPPIKDFGGFNFSQILPDPSKPSKRSFIEDLLFNKVTLADAGFIKQYGDCLGDIAARDLICAQKFNGLTVLPPLLTDEMIAQYTSALLAGTITSGWTFGAGAALQIPFAMQMAYRFNGIGVTQNVLYENQKLIANQFNSAIGKIQDSLSSTASALGKLQDVVNQNAQALNTLVKQLSSNFGCISSVLNDILSRLDKVEAEVQIDCLITGRLQSLQTYVTQQLIRAAEIRASANLAATKMSECVLGQSKRVDFCGKGYHLMSFPQSAPHGVVFLHVTYVPAQEKNFTTAPAICHDGKAHFPREGVFVSNGTHWFVTQRNFYEPQIITTDNTFVSGNCDVVIGIVNNTVYDPLQPELDSFKEELDKYFKNHTSPDVDLGDISGINASVVNIQKEIDRLNEVAKNLNESLIDLQELGKYEQYIK

SEQ ID NO: 2466 - protein, 1211 aa, Artificial Sequence
  SARS-CoV-2/Portugal/PT0035/2020__EPI_ISL_418020 spike protein (1-1211)(A972C_R995C)
MFVFLVLLPLVSSQCVNLTTRTQLPPAYTNSFTRGVYYPDKVFRSSVLHSTQDLFLPFFSNVTWFHAIHVSGTNGTKRFDNPVLPFNDGVYFASTEKSNIIRGWIFGTTLDSKTQSLLIVNNATNVVIKVCEFQFCNDPFLGVYYHKNNKSWMESEFRVYSSANNCTFEYVSQPFLMDLEGKQGNFKNLREFVFKNIDGYFKIYSKHTPINLVRDLPQGFSALEPLVDLPIGINITRFQTLLALHRSYLTPGDSSSGWTAGAAAYYVGYLQPRTFLLKYNENGTITDAVDCALDPLSETKCTLKSFTVEKGIYQTSNFRVQPTESIVRFPNITNLCPFGEVFNATRFASVYAWNRKRISNCVADYSVLYNSASFSTFKCYGVSPTKLNDLCFTNVYADSFVIRGDEVRQIAPGQTGKIADYNYKLPDDFTGCVIAWNSNNLDSKVGGNYNYLYRLFRKSNLKPFERDISTEIYQAGSTPCNGVEGFNCYFPLQSYGFQPTNGVGYQPYRVVVLSFELLHAPATVCGPKKSTNLVKNKCVNFNFNGLTGTGVLTESNKKFLPFQQFGRDIADTTDAVRDPQTLEILDITPCSFGGVSVITPGTNTSNQVAVLYQDVNCTEVPVAIHADQLTPTWRVYSTGSNVFQTRAGCLIGAEHVNNSYECDIPIGAGICASYQTQTNSPRRARSVASQSIIAYTMSLGAENSVAYSNNSIAIPTNFTISVTTEILPVSMTKTSVDCTMYICGDSTECSNLLLQYGSFCTQLNRALTGIAVEQDKNTQEVFAQVKQIYKTPPIKDFGGFNFSQILPDPSKPSKRSFIEDLLFNKVTLADAGFIKQYGDCLGDISARDLICAQKFNGLTVLPPLLTDEMIAQYTSALLAGTITSGWTFGAGAALQIPFAMQMAYRFNGIGVTQNVLYENQKLIANQFNSAIGKIQDSLSSTASALGKLQDVVNQNAQALNTLVKQLSSNFGCISSVLNDILSRLDKVEAEVQIDCLITGRLQSLQTYVTQQLIRAAEIRASANLAATKMSECVLGQSKRVDFCGKGYHLMSFPQSAPHGVVFLHVTYVPAQEKNFTTAPAICHDGKAHFPREGVFVSNGTHWFVTQRNFYEPQIITTDNTFVSGNCDVVIGIVNNTVYDPLQPELDSFKEELDKYFKNHTSPDVDLGDISGINASVVNIQKEIDRLNEVAKNLNESLIDLQELGKYEQYIK

SEQ ID NO: 2467 - protein, 1211 aa, Artificial Sequence
  SARS-CoV-2/USA/NY-NYUMC7/2020__EPI_ISL_418192 spike protein (1-1211)(A972C_R995C)
MFVFLVLLPLVSSQCVNLTTRTQLPPAYTNSFTRGVYYPDKVFRSSVLHSTQDLFLPFFSNVTWFHAIHVSGTNGTKRFDNPVLPFNDGVYFASTEKSNIIRGWIFGTTLDSKTQSLLIVNNATNVVIKVCEFQFCNDPFLGVYHHKNNKSWMESEFRVYSSANNCTFEYVSQPFLMDLEGKQGNFKNLREFVFKNIDGYFKIYSKHTPINLVRDLPQGFSALEPLVDLPIGINITRFQTLLALHRSYLTPGDSSSGWTAGAAAYYVGYLQPRTFLLKYNENGTITDAVDCALDPLSETKCTLKSFTVEKGIYQTSNFRVQPTESIVRFPNITNLCPFGEVFNATRFASVYAWNRKRISNCVADYSVLYNSASFSTFKCYGVSPTKLNDLCFTNVYADSFVIRGDEVRQIAPGQTGKIADYNYKLPDDFTGCVIAWNSNNLDSKVGGNYNYLYRLFRKSNLKPFERDISTEIYQAGSTPCNGVEGFNCYFPLQSYGFQPTNGVGYQPYRVVVLSFELLHAPATVCGPKKSTNLVKNKCVNFNFNGLTGTGVLTESNKKFLPFQQFGRDIADTTDAVRDPQTLEILDITPCSFGGVSVITPGTNTSNQVAVLYQGVNCTEVPVAIHADQLTPTWRVYSTGSNVFQTRAGCLIGAEHVNNSYECDIPIGAGICASYQTQTNSPRRARSVASQSIIAYTMSLGAENSVAYSNNSIAIPTNFTISVTTEILPVSMTKTSVDCTMYICGDSTECSNLLLQYGSFCTQLNRALTGIAVEQDKNTQEVFAQVKQIYKTPPIKDFGGFNFSQILPDPSKPSKRSFIEDLLFNKVTLADAGFIKQYGDCLGDIAARDLICAQKFNGLTVLPPLLTDEMIAQYTSALLAGTITSGWTFGAGAALQIPFAMQMAYRFNGIGVTQNVLYENQKLIANQFNSAIGKIQDSLSSTASALGKLQDVVNQNAQALNTLVKQLSSNFGCISSVLNDILSRLDKVEAEVQIDCLITGRLQSLQTYVTQQLIRAAEIRASANLAATKMSECVLGQSKRVDFCGKGYHLMSFPQSAPHGVVFLHVTYVPAQEKNFTTAPAICHDGKAHFPREGVFVSNGTHWFVTQRNFYEPQIITTDNTFVSGNCDVVIGIVNNTVYDPLQPELDSFKEELDKYFKNHTSPDVDLGDISGINASVVNIQKEIDRLNEVAKNLNESLIDLQELGKYEQYIK

SEQ ID NO: 2468 - protein, 1211 aa, Artificial Sequence
  SARS-CoV-2/Iceland/189/2020__EPI_ISL_417709 spike protein (1-1211)(A972C_R995C)
MFVFLVLLPLVSSQCVNLTTRTQLPPAYTNSFTRGVYYPDKVFRSSVLHSTQDLFLPFFSNVTWFHAIHVSGTNGTKRFDNPVLPFNDGVYFASTEKSNIIRGWIFGTTLDSKTQSLLIVNNATNVVIKVCEFQFCNDPFLGVYYHKNNKSWMESEFRVYSSANNCTFEYVSQPFLMDLEGKQGNFKNLREFVFKNIDGYFKIYSKHTPINLVRDLPQGFSALEPLVDLPIGINITRFQTLLALHRSYLTPGDSSSGWTAGAAAYYVGYLQPRTFLLKYNENGTITDAVDCALDPLSETKCTLKSFTVEKGIYQTSNFRVQPTESIVRFPNITNLCPFGEVFNATRFASVYAWNRKRISNCVADYSVLYNSASFSTFKCYGVSPTKLNDLCFTNVYADSFVIRGDEVRQIAPGQTGKIADYNYKLPDDFTGCVIAWNSNNLDSKVGGNYNYLYRLFRKSNLKPFERDISTEIYQAGSTPCNGVEGFNCYFPLQSYGFQPTNGVGYQPYRVVVLSFELLHAPATVCGPKKSTNLVKNKCVNFNFNGLTGTGVLTESNKKFLPFQQFGRDIADTTDAVRDPQTLEILDITPCSFGGVSVITPGTNTSNQVAVLYQGVNCTEVPVAIHADQLTPTWRVYSTGSNVFQTRAGCLIGAEHVNNSYECDIPIGAGICASYQTQTNSPRRARSVASQSIIAYTMSLGAENSVAYSNNSIAIPTNFTISVTTEILPVSMTKTSVDCTMYICGDSTECSNLLLQYGSFCTQLNRALTGIAVEQDKNTQEVFAQVKQIYKTPPIKDFGGFNFSQILPDPSKPSKRSFIEDLLFNKVTLADAGFTKQYGDCLGDIAARDLICAQKFNGLTVLPPLLTDEMIAQYTSALLAGTITSGWTFGAGAALQIPFAMQMAYRFNGIGVTQNVLYENQKLIANQFNSAIGKIQDSLSSTASALGKLQDVVNQNAQALNTLVKQLSSNFGCISSVLNDILSRLDKVEAEVQIDCLITGRLQSLQTYVTQQLIRAAEIRASANLAATKMSECVLGQSKRVDFCGKGYHLMSFPQSAPHGVVFLHVTYVPAQEKNFTTAPAICHDGKAHFPREGVFVSNGTHWFVTQRNFYEPQIITTDNTFVSGNCDVVIGIVNNTVYDPLQPELDSFKEELDKYFKNHTSPDVDLGDISGINASVVNIQKEIDRLNEVAKNLNESLIDLQELGKYEQYIK

SEQ ID NO: 2469 - protein, 1211 aa, Artificial Sequence
  SARS-CoV-2/Australia/NSW56/2020__EPI_ISL_417408 spike protein (1-1211)(A972C_R995C)
MFVFLVLLPLVSSQCVNLTTRTQLPPAYTNSFTRGVYYPDKVFRSSVLHSTQDLFLPFFSNVTWFHAIHVSGTNGTKRFDNPVLPFNDGVYFASTEKSNIIRGWIFGTTLDSKTQSLLIVNNATNVVIKVCEFQFCNDPFLGVYYHKNNKSWMESEFRVYSSANNCTFEYVSQPFLMDLEGKQGNFKNLREFVFKNIDGYFKIYSKHTPINLVRDLPQGFSALEPLVDLPIGINITRFQTLLALHRSYLTPGDSSSGWTAGAAAYYVGYLQPRTFLLKYNENGTITDAVDCALDPLSETKCTLKSFTVEKGIYQTSNFRVQPTESIVRFPNITNLCPFGEVFNATRFASVYAWNRKRISNCVADYSVLYNSASFSTFKCYGVSPTKLNDLCFTNVYADSFVIRGDEVRQIAPGQTGKIADYNYKLPDDFTGCVIAWNSNNLDSKVGGNYNYLYRLFRKSNLKPFERDISTEIYQAGSTPCNGVEGFNCYFPLQSYGFQPTNGVGYQPYRVVVLSFELLHAPATVCGPKKSTNLVKNKCVNFNFNGLTGTGVLTESNKKFLPFQQFGRDIADTTDAVRDPQTLEILDITPCSFGGVSVITPGTNTSNQVAVLYQDVNCTEVPVAIHADQLTPTWRVYSTGSNVFQTRAGCLIGAEHVNNSYECDIPIGAGICASYQTQTNSPRRARSVASQSIIAYTMSLGAENSVAYSNNSIAIPTNFTISVTTEILPVSMTKTSVDCTMYICGDSTECSNLLLQYGSFCTQLNRALTGIAVEQDKNTQEVFAQVKQIYKTPPIKDFGGFNFSQILPDSSKPSKRSFIEDLLFNKVTLADAGFIKQYGDCLGDIAARDLICAQKFNGLTVLPPLLTDEMIAQYTSALLAGTITSGWTFGAGAALQIPFAMQMAYRFNGIGVTQNVLYENQKLIANQFNSAIGKIQDSLSSTASALGKLQDVVNQNAQALNTLVKQLSSNFGCISSVLNDILSRLDKVEAEVQIDCLITGRLQSLQTYVTQQLIRAAEIRASANLAATKMSECVLGQSKRVDFCGKGYHLMSFPQSAPHGVVFLHVTYVPAQEKNFTTAPAICHDGKAHFPREGVFVSNGTHWFVTQRNFYEPQIITTDNTFVSGNCDVVIGIVNNTVYDPLQPELDSFKEELDKYFKNHTSPDVDLGDISGINASVVNIQKEIDRLNEVAKNLNESLIDLQELGKYEQYIK

SEQ ID NO: 2470 - protein, 1211 aa, Artificial Sequence
  SARS-CoV-2/Iceland/280/2020__EPI_ISL_417608 spike protein (1-1211)(A972C_R995C)
MFVFLVLLPLVSSQCVNLTTRTQLPPAYTNSFTRGVYYPDKVFRSSVLHSTQDLFLPFFSNVTWFHAIHVSGTNGTKRFDNPVLPFNDGVYFASTEKSNIIRGWIFGTTLDSKTQSLLIVNNATNVVIKVCEFQFCNDPFLGVYYHKNNKSWMESEFRVYSSANNCTFEYVSQPFLMDLEGKQGNFKNLREFVFKNIDGYFKIYSKHTPINLVRDLPQGFSALEPLVDLPIGINITRFQTLLALHRSYLTPGDSSSGWTAGAAAYYVGYLQPRTFLLKYNENGTITDAVDCALDPLSETKCTLKSFTVEKGIYQTSNFRVQPTESIVRFPNITNLCPFGEVFNATRFASVYAWNRKRISNCVADYSVLYNSASFSTFKCYGVSPTKLNDLCFTNVYADSFVIRGDEVRQIAPGQTGKIADYNYKLPDDFTGCVIAWNSNNLDSKVGGNYNYLYRLFRKSNLKPFERDISTEIYQAGSTPCNGVEGFNCYFPLQSYGFQPTNGVGYQPYRVVVLSFELLHAPATVCGPKKSTNLVKNKCVNFNFNGLTGTGVLTESNKKFLPFQQFGRDIADTTDAVRDPQTLEILDITPCSFGGVSVITPGTNTSNQVAVLYQGVNCTEVPVAIHADQLTPTWRVYSTGSNVFQTRAGCLIGAEHVNNSYECDIPIGAGICASYHTQTNSPRRARSVASQSIIAYTMSLGAENSVAYSNNSIAIPTNFTISVTTEILPVSMTKTSVDCTMYICGDSTECSNLLLQYGSFCTQLNRALTGIAVEQDKNTQEVFAQVKQIYKTPPIKDFGGFNFSQILPDPSKPSKRSFIEDLLFNKVTLADAGFIKQYGDCLGDIAARDLICAQKFNGLTVLPPLLTDEMIAQYTSALLAGTITSGWTFGAGAALQIPFAMQMAYRFNGIGVTQNVLYENQKLIANQFNSAIGKIQDSLSSTASALGKLQDVVNQNAQALNTLVKQLSSNFGCISSVLNDILSRLDKVEAEVQIDCLITGRLQSLQTYVTQQLIRAAEIRASANLAATKMSECVLGQSKRVDFCGKGYHLMSFPQSAPHGVVFLHVTYVPAQEKNFTTAPAICHDGKAHFPREGVFVSNGTHWFVTQRNFYEPQIITTDNTFVSGNCDVVIGIVNNTVYDPLQPELDSFKEELDKYFKNHTSPDVDLGDISGINASVVNIQKEIDRLNEVAKNLNESLIDLQELGKYEQYIK

SEQ ID NO: 2471 - protein, 1211 aa, Artificial Sequence; identical to SEQ ID NO: 2426
  SARS-CoV-2/Iceland/247/2020__EPI_ISL_417575 spike protein (1-1211)(A972C_R995C)

SEQ ID NO: 2472 - protein, 1211 aa, Artificial Sequence
  SARS-CoV-2/Iceland/238/2020__EPI_ISL_417566 spike protein (1-1211)(A972C_R995C)
MFVFLVLLPLVSSQCVNLTTRTQLPPAYTNSFTRGVYYPDKVFRSSVLHSTQDLFLPFFSNVTWFHAIHVSGTNGTKRFDNPVLPFNDGVYFASTEKSNIIRGWIFGTTLDSKTQSLLIVNNATNVVIKVCEFQFCNDPFLGVYYHKNNKSWMESEFRVYSSANNCTFEYVSQPFLMDLEGKQGNFKNLREFVFKNIDGYFKIYSKHTPINLVRDLPQGFSALEPLVDLPIGINITRFQTLLALHRSYLTPGDSSSGWTAGAAAYYVGYLQPRTFLLKYNENGTITDAVDCALDPLSETKCTLKSFTVEKGIYQTSNFRVQPTESIVRFPNITNLCPFGEVFNATRFASVYAWNRKRISNCVADYSVLYNSASFSTFKCYGVSPTKLNDLCFTNVYADSFVIRGDEVRQIAPGQTGKIADYNYKLPDDFTGCVIAWNSNNLDSKVGGNYNYLYRLFRKSNLKPFERDISTEIYQAGSTPCNGVEGFNCYFPLQSYGFQPTNGVGYQPYRVVVLSFELLHAPATVCGPKKSTNLVKNKCVNFNFNGLTGTGVLTESNKKFLPFQQFGRDIADTTDAVRDPQTLEILDITPCSFGGVSVITPGTNTSNQVAVLYQGVNCTEVPVAIHADQLTPTWRVYSTGSNVFQTRAGCLIGAEHVNNSYECDIPIGAGICASYQTQTNSPRRARSVASQSIIAYTMSLGAENSVAYSNNSIAIPTNFTISVTTEILPVSMTKTSVDCTMYICGDSTECSNLLLQYGSFCTQLNRALTGIAVEQDKNTQEVFAQVKQIYKTPPIKDFGGFNFSQILPDPSKPSKRSFIEDLLFNKVTLADVGFIKQYGDCLGDIAARDLICAQKFNGLTVLPPLLTDEMIAQYTSALLAGTITSGWTFGAGAALQIPFAMQMAYRFNGIGVTQNVLYENQKLIANQFNSAIGKIQDSLSSTASALGKLQDVVNQNAQALNTLVKQLSSNFGCISSVLNDILSRLDKVEAEVQIDCLITGRLQSLQTYVTQQLIRAAEIRASANLAATKMSECVLGQSKRVDFCGKGYHLMSFPQSAPHGVVFLHVTYVPAQEKNFTTAPAICHDGKAHFPREGVFVSNGTHWFVTQRNFYEPQIITTDNTFVSGNCDVVIGIVNNTVYDPLQPELDSFKEELDKYFKNHTSPDVDLGDISGINASVVNIQKEIDRLNEVAKNLNESLIDLQELGKYEQYIK

SEQ ID NO: 2473 - protein, 1211 aa, Artificial Sequence
  SARS-CoV-2/Greece/16/2020__EPI_ISL_418265 spike protein (1-1211)(A972C_R995C)
MFVFLVLLPLVSSQCVNLTTRTQLPPAYTNSFTRGVYYPDKVFRSSVLHSTQDLFLPFFSNVTWFHAIHVSGTNGTKRFDNPVLPFNDGVYFASTEKSNIIRGWIFGTTLDSKTQSLLIVNNATNVVIKVCEFQFCNDPFLGVYYHKNNKSWMESEFRVYSSANNCTFEYVSQPFLMDLEGKQGNFKNLREFVFKNVDGYFKIYSKHTPINLVRDLPQGFSALEPLVDLPIGINITRFQTLLALHRSYLTPGDSSSGWTAGAAAYYVGYLQPRTFLLKYNENGTITDAVDCALDPLSETKCTLKSFTVEKGIYQTSNFRVQPTESIVRFPNITNLCPFGEVFNATRFASVYAWNRKRISNCVADYSVLYNSASFSTFKCYGVSPTKLNDLCFTNVYADSFVIRGDEVRQIAPGQTGKIADYNYKLPDDFTGCVIAWNSNNLDSKVGGNYNYLYRLFRKSNLKPFERDISTEIYQAGSTPCNGVEGFNCYFPLQSYGFQPTNGVGYQPYRVVVLSFELLHAPATVCGPKKSTNLVKNKCVNFNFNGLTGTGVLTESNKKFLPFQQFGRDIADTTDAVRDPQTLEILDITPCSFGGVSVITPGTNTSNQVAVLYQDVNCTEVPVAIHADQLTPTWRVYSTGSNVFQTRAGCLIGAEHVNNSYECDIPIGAGICASYQTQTNSPRRARSVASQSIIAYTMSLGAENSVAYSNNSIAIPTNFTISVTTEILPVSMTKTSVDCTMYICGDSTECSNLLLQYGSFCTQLNRALTGIAVEQDKNTQEVFAQVKQIYKTPPIKDFGGFNFSQILPDPSKPSKRSFIEDLLFNKVTLADAGFIKQYGDCLGDIAARDLICAQKFNGLTVLPPLLTDEMIAQYTSALLAGTITSGWTFGAGAALQIPFAMQMAYRFNGIGVTQNVLYENQKLIANQFNSAIGKIQDSLSSTASALGKLQDVVNQNAQALNTLVKQLSSNFGCISSVLNDILSRLDKVEAEVQIDCLITGRLQSLQTYVTQQLIRAAEIRASANLAATKMSECVLGQSKRVDFCGKGYHLMSFPQSAPHGVVFLHVTYVPAQEKNFTTAPAICHDGKAHFPREGVFVSNGTHWFVTQRNFYEPQIITTDNTFVSGNCDVVIGIVNNTVYDPLQPELDSFKEELDKYFKNHTSPDVDLGDISGINASVVNIQKEIDRLNEVAKNLNESLIDLQELGKYEQYIK

SEQ ID NO: 2474 - protein, 1211 aa, Artificial Sequence
  SARS-CoV-2/Iceland/319/2020__EPI_ISL_417648 spike protein (1-1211)(A972C_R995C)
MFVFLVLLPLVSSQCVNLTTRTQLPPAYTNSFTRGVYYPDKVFRSSVLHSTQDLFLPFFSNVTWFHAIHVSGTNGTKRFDNPVLPFNDGVYFASTEKSNIIRGWIFGTTLDSKTQSLLIVNNATNVVIKVCEFQFCNDPFLGVYYHKNNKSWMESEFRVYSSANNCTFEYVSQPFLIDLEGKQGNFKNLREFVFKNIDGYFKIYSKHTPINLVRDLPQGFSALEPLVDLPIGINITRFQTLLALHRSYLTPGDSSSGWTAGAAAYYVGYLQPRTFLLKYNENGTITDAVDCALDPLSETKCTLKSFTVEKGIYQTSNFRVQPTESIVRFPNITNLCPFGEVFNATRFASVYAWNRKRISNCVADYSVLYNSASFSTFKCYGVSPTKLNDLCFTNVYADSFVIRGDEVRQIAPGQTGKIADYNYKLPDDFTGCVIAWNSNNLDSKVGGNYNYLYRLFRKSNLKPFERDISTEIYQAGSTPCNGVEGFNCYFPLQSYGFQPTNGVGYQPYRVVVLSFELLHAPATVCGPKKSTNLVKNKCVNFNFNGLTGTGVLTESNKKFLPFQQFGRDIADTTDAVRDPQTLEILDITPCSFGGVSVITPGTNTSNQVAVLYQGVNCTEVPVAIHADQLTPTWRVYSTGSNVFQTRAGCLIGAEHVNNSYECDIPIGAGICASYQTQTNSPRRARSVASQSIIAYTMSLGAENSVAYSNNSIAIPTNFTISVTTEILPVSMTKTSVDCTMYICGDSTECSNLLLQYGSFCTQLNRALTGIAVEQDKNTQEVFAQVKQIYKTPPIKDFGGFNFSQILPDPSKPSKRSFIEDLLFNKVTLADAGFIKQYGDCLGDIAARDLICAQKFNGLTVLPPLLTDEMIAQYTSALLAGTITSGWTFGAGAALQIPFAMQMAYRFNGIGVTQNVLYENQKLIANQFNSAIGKIQDSLSSTASALGKLQDVVNQNAQALNTLVKQLSSNFGCISSVLNDILSRLDKVEAEVQIDCLITGRLQSLQTYVTQQLIRAAEIRASANLAATKMSECVLGQSKRVDFCGKGYHLMSFPQSAPHGVVFLHVTYVPAQEKNFTTAPAICHDGKAHFPREGVFVSNGTHWFVTQRNFYEPQIITTDNTFVSGNCDVVIGIVNNTVYDPLQPELDSFKEELDKYFKNHTSPDVDLGDISGINASVVNIQKEIDRLNEVAKNLNESLIDLQELGKYEQYIK

SEQ ID NO: 2475 - protein, 1211 aa, Artificial Sequence
  SARS-CoV-2/Congo/94/2020__EPI_ISL_417947 spike protein (1-1211)(A972C_R995C)
MFVFLVLLPLVSSQCVNLTTRTQLPPAYTNSFTRGVYYPDKVFRSSVLHSTQDLFLPFFSNVTWFHAIHVSGTNGTKRFDNPVLPFNDGVYFASTEKSNIIRGWIFGTTLDSKTQSLLIVNNATNVVIKVCEFQFCNDPFLGVYYHKNNKSWMESEFRVYSSANNCTFEYVSQPFLMDLEGKQGNFKNLREFVFKNIDGYFKIYSKHTPINLVRDLPQGFSALEPLVDLPIGINITRFQTLLALHRSYLTPGDSSSGWTAGAAAYYVGYLQPRTFLLKYNENGTITDAVDCALDPLSETKCTLKSFTVEKGIYQTSNFRVQPTESIVRFPNITNLCPFGEVFNATRFASVYAWNRKRISNCVADYSVLYNSASFSTFKCYGVSPTKLNDLCFTNVYADSFVIRGDEVRQIAPGQTGKIADYNYKLPDDFTGCVIAWNSNNLDSKVGGNYNYLYRLFRKSNLKPFERDISTEIYQAGSTPCNGVEGFNCYFPLQSYGFQPTNGVGYQPYRVVVLSFELLHAPATVCGPKKSTNLVKNKCVNFNFNGLTGTGVLTESNKKFLPFQQFGRDIADTTDAVRDPQTLEILDITPCSFGGVSVITPGTNTSNQVAVLYQGVNCTEVPVAIHADQLTPTWRVYSTGSNVFQTRAGCLIGAEHVNNSYECDIPIGAGICASYQTQTNSPRRARSVASQSIIAYTMSLGAENSVAYSNNSIAIPTNFTISVTTEILPVSMTKTSVDCTMYICGDSTECSNLLLQYGSFCTQLNRALTGIAVEQDKNTQEVFAQVKQIYKTPPIKDFGGFNFSQILPDPSKPSKRSFIEDILFNKVTLADAGFIKQYGDCLGDIAARDLICAQKFNGLTVLPPLLTDEMIAQYTSALLAGTITSGWTFGAGAALQIPFAMQMAYRFNGIGVTQNVLYENQKLIANQFNSAIGKIQDSLSSTASALGKLQDVVNQNAQALNTLVKQLSSNFGCISSVLNDILSRLDKVEAEVQIDCLITGRLQSLQTYVTQQLIRAAEIRASANLAATKMSECVLGQSKRVDFCGKGYHLMSFPQSAPHGVVFLHVTYVPAQEKNFTTAPAICHDGKAHFPREGVFVSNGTHWFVTQRNFYEPQIITTDNTFVSGNCDVVIGIVNNTVYDPLQPELDSFKEELDKYFKNHTSPDVDLGDISGINASVVNIQKEIDRLNEVAKNLNESLIDLQELGKYEQYIK

SEQ ID NO: 2476 - protein, 1211 aa, Artificial Sequence
  SARS-CoV-2/Congo/158/2020__EPI_ISL_417950 spike protein (1-1211)(A972C_R995C)
MFVFLVLLPLVSSQCVNLTTRTQLPPAYTNSFTRGVYYPDKVFRSSVLHSTQDLFLPFFSNVTWFHAIHVSGTNGTKRFDNPVLPFNDGVYFASTEKSNIIRGWIFGTTLDSKTQSLLIVNNATNVVIKVCEFQFCNDPFLGVYYHKNNKSWMESEFRVYSSANNCTFEYVSQPFLMDLEGKQGNFKNLREFVFKNIDGYFKIYSKHTPINLVRDLPQGFSALEPLVDLPIGINITRFQTLLALHRSYLTPGDSSSGWTAGAAAYYVGYLQPRTFLLKYNENGTITDAVDCALDPLSETKCTLKSFTVEKGIYQTSNFRVQPTESIVRFPNITNLCPFGEVFNATRFASVYAWNRKRISNCVADYSVLYNSASFSTFKCYGVSPTKLNDLCFTNVYADSFVIRGDEVRQIAPGQTGKIADYNYKLPDDFTGCVIAWNSNNLDSKVGGNYNYLYRLFRKSNLKPFERDISTEIYQAGSTPCNGVEGFNCYFPLQSYGFQPTNGVGYQPYRVVVLSFELLHAPATVCGPKKSTNLVKNKCVNFNFNGLTGTGVLTESNKKFLPFQQFGRDIADTTDAVRDPQTLEILDITPCSFGGVSVITPGTNTSNQVAVLYQDVNCTEVPVAIHADQLTPTWRVYSTGSNVFQTRAGCLIGAEHVNNSYECDIPIGAGICASYQTQTNSPRRARSVASQSIIAYTMSLGAENSVAYSNNSIAIPTNFTISVTTEILPVSMTKTSVDCTMYICGDSTECSNLLLQYGSFCTQLNRALTGIAVEQDKNTQEVFAQVKQIYKTPPIKDFGGFNFSQILPDPSKPSKRSFIEDLLFNKVTLADAGFIKQYGDCLGDIAARDLICAQKFNGLTVLPPLLTDEMIAQYTSALLAGTITSGWTFGAGAALQIPFAMQMAYRFNGIGVTQNVLYENQKLIANQFNSAIGKIQDSLSSTASALGKLQDVVNQNAQALNTLVKQLSSNFGCISSVLNDILSRLDKVEAEVQIDCLITGRLQSLQTYVTQQLIRAAEIRASANLAATKMSECVLGQSKRVDFCGKGYHLMSFPQSAPHGVVFLHVTYVPAQEKNFTTAPAICHDGKAHFPREGVFVSNGTHWFVTQRNFYEPQIITTDNTFLSGNCDVVIGIVNNTVYDPLQPELDSFKEELDKYFKNHTSPDVDLGDISGINASVVNIQKEIDRLNEVAKNLNESLIDLQELGKYEQYIK

SEQ ID NO: 2477 - protein, 1211 aa, Artificial Sequence
  SARS-CoV-2/USA/UT-00034/2020__EPI_ISL_417977 spike protein (1-1211)(A972C_R995C)
MFVFLVLLPLVSSQCVNLTTRTQLPPAYTNSFTRGVYYPDKVFRSSVLHSTQDLFLPFFSNVTWFHAIHVSGTNGTKRFDNPVLPFNDGVYFASTEKSNIIRGWIFGTTLDSKTQSLLIVNNATNVVIKVCEFQFCNDPFLGVYYYKNNKSWMESEFRVYSSANNCTFEYVSQPFLMDLEGKQGNFKNLREFVFKNIDGYFKIYSKHTPINLVRDLPQGFSALEPLVDLPIGINITRFQTLLALHRSYLTPGDSSSGWTAGAAAYYVGYLQPRTFLLKYNENGTITDAVDCALDPLSETKCTLKSFTVEKGIYQTSNFRVQPTESIVRFPNITNLCPFGEVFNATRFASVYAWNRKRISNCVADYSVLYNSASFSTFKCYGVSPTKLNDLCFTNVYADSFVIRGDEVRQIAPGQTGKIADYNYKLPDDFTGCVIAWNSNNLDSKVGGNYNYLYRLFRKSNLKPFERDISTEIYQAGSTPCNGVEGFNCYFPLQSYGFQPTNGVGYQPYRVVVLSFELLHAPATVCGPKKSTNLVKNKCVNFNFNGLTGTGVLTESNKKFLPFQQFGRDIADTTDAVRDPQTLEILDITPCSFGGVSVITPGTNTSNQVAVLYQGVNCTEVPVAIHADQLTPTWRVYSTGSNVFQTRAGCLIGAEHVNNSYECDIPIGAGICASYQTQTNSPRRARSVASQSIIAYTMSLGAENSVAYSNNSIAIPTNFTISVTTEILPVSMTKTSVDCTMYICGDSTECSNLLLQYGSFCTQLNRALTGIAVEQDKNTQEVFAQVKQIYKTPPIKDFGGFNFSQILPDPSKPSKRSFIEDLLFNKVTLADAGFIKQYGDCLGDIAARDLICAQKFNGLTVLPPLLTDEMIAQYTSALLAGTITSGWTFGAGAALQIPFAMQMAYRFNGIGVTQNVLYENQKLIANQFNSAIGKIQDSLSSTASALGKLQDVVNQNAQALNTLVKQLSSNFGCISSVLNDILSRLDKVEAEVQIDCLITGRLQSLQTYVTQQLIRAAEIRASANLAATKMSECVLGQSKRVDFCGKGYHLMSFPQSAPHGVVFLHVTYVPAQEKNFTTAPAICHDGKAHFPREGVFVSNGTHWFVTQRNFYEPQIITTDNTFVSGNCDVVIGIVNNTVYDPLQPELDSFKEELDKYFKNHTSPDVDLGDISGINASVVNIQKEIDRLNEVAKNLNESLIDLQELGKYEQYIK

SEQ ID NO: 2478 - protein, 1211 aa, Artificial Sequence
  SARS-CoV-2/USA/UT-00033/2020__EPI_ISL_417976 spike protein (1-1211)(A972C_R995C)
MFVFLVLLPLVSSQCVNLTTRTQLPPAYTNSFTRGVYYPDKVFRSSVLHSTQDLFLPFFSNVTWFHAIHVSGTNGTKRFDNPVLPFNDGVYFASTEKSNIIRGWIFGTTLDSKTQSLLIVNNATNVVIKVCEFQFCNDPFLGVYYHKNNKSWMESEFRVYSSANNCTFEYVSQPFLMDLEGKQGNFKNLREFVFKNIDGYFKIYSKHTPINLVRDLPQGFSALEPLVDLPIGINITRFQTLLALHRSYLTPGDSSSGLTAGAAAYYVGYLQPRTFLLKYNENGTITDAVDCALDPLSETKCTLKSFTVEKGIYQTSNFRVQPTESIVRFPNITNLCPFGEVFNATRFASVYAWNRKRISNCVADYSVLYNSASFSTFKCYGVSPTKLNDLCFTNVYADSFVIRGDEVRQIAPGQTGKIADYNYKLPDDFTGCVIAWNSNNLDSKVGGNYNYLYRLFRKSNLKPFERDISTEIYQAGSTPCNGVEGFNCYFPLQSYGFQPTNGVGYQPYRVVVLSFELLHAPATVCGPKKSTNLVKNKCVNFNFNGLTGTGVLTESNKKFLPFQQFGRDIADTTDAVRDPQTLEILDITPCSFGGVSVITPGTNTSNQVAVLYQGVNCTEVPVAIHADQLTPTWRVYSTGSNVFQTRAGCLIGAEHVNNSYECDIPIGAGICASYQTQTNSPRRARSVASQSIIAYTMSLGAENSVAYSNNSIAIPTNFTISVTTEILPVSMTKTSVDCTMYICGDSTECSNLLLQYGSFCTQLNRALTGIAVEQDKNTQEVFAQVKQIYKTPPIKDFGGFNFSQILPDPSKPSKRSFIEDLLFNKVTLADAGFIKQYGDCLGDIAARDLICAQKFNGLTVLPPLLTDEMIAQYTSALLAGTITSGWTFGAGAALQIPFAMQMAYRFNGIGVTQNVLYENQKLIANQFNSAIGKIQDSLSSTASALGKLQDVVNQNAQALNTLVKQLSSNFGCISSVLNDILSRLDKVEAEVQIDCLITGRLQSLQTYVTQQLIRAAEIRASANLAATKMSECVLGQSKRVDFCGKGYHLMSFPQSAPHGVVFLHVTYVPAQEKNFTTAPAICHDGKAHFPREGVFVSNGTHWFVTQRNFYEPQIITTDNTFVSGNCDVVIGIVNNTVYDPLQPELDSFKEELDKYFKNHTSPDVDLGDISGINASVVNIQKEIDRLNEVAKNLNESLIDLQELGKYEQYIK

SEQ ID NO: 2479 - protein, 1211 aa, Artificial Sequence
  SARS-CoV-2/USA/WI-13/2020__EPI_ISL_417516 spike protein (1-1211)(A972C_R995C)
MFVFLVLLPLVSSQCVNLTTRTQLPPAYTNSFTRGVYYPDKVFRSSVLHSTQDLFLPFFSNVTWFHAIHVSGTNGTKRFDNPVLPFNDGVYFASTEKSNIIRGWIFGTTLDSKTQSLLIVNNATNVVIKVCEFQFCNDPFLGVYYHKNNKSWMESEFRVYSSANNCTFEYVSQPFLMDLEGKQGNFKNLREFVFKNIDGYFKIYSKHTPINLVRDLPQGFSALEPLVDLPIGINITRFQTLLALHRSYLTPGDSSSGWTAGAAAYYVGYLQPRTFLLKYNENGTITDAVDCALDPLSETKCTLKSFTVEKGIYQTSNFRVLPTESIVRFPNITNLCPFGEVFNATRFASVYAWNRKRISNCVADYSVLYNSASFSTFKCYGVSPTKLNDLCFTNVYADSFVIRGDEVRQIAPGQTGKIADYNYKLPDDFTGCVIAWNSNNLDSKVGGNYNYLYRLFRKSNLKPFERDISTEIYQAGSTPCNGVEGFNCYFPLQSYGFQPTNGVGYQPYRVVVLSFELLHAPATVCGPKKSTNLVKNKCVNFNFNGLTGTGVLTESNKKFLPFQQFGRDIADTTDAVRDPQTLEILDITPCSFGGVSVITPGTNTSNQVAVLYQGVNCTEVPVAIHADQLTPTWRVYSTGSNVFQTRAGCLIGAEHVNNSYECDIPIGAGICASYQTQTNSPRRARSVASQSIIAYTMSLGAENSVAYSNNSIAIPTNFTISVTTEILPVSMTKTSVDCTMYICGDSTECSNLLLQYGSFCTQLNRALTGIAVEQDKNTQEVFAQVKQIYKTPPIKDFGGFNFSQILPDPSKPSKRSFIEDLLFNKVTLADAGFIKQYGDCLGDIAARDLICAQKFNGLTVLPPLLTDEMIAQYTSALLAGTITSGWTFGAGAALQIPFAMQMAYRFNGIGVTQNVLYENQKLIANQFNSAIGKIQDSLSSTASALGKLQDVVNQNAQALNTLVKQLSSNFGCISSVLNDILSRLDKVEAEVQIDCLITGRLQSLQTYVTQQLIRAAEIRASANLAATKMSECVLGQSKRVDFCGKGYHLMSFPQSAPHGVVFLHVTYVPAQEKNFTTAPAICHDGKAHFPREGVFVSNGTHWFVTQRNFYEPQIITTDNTFVSGNCDVVIGIVNNTVYDPLQPELDSFKEELDKYFKNHTSPDVDLGDISGINASVVNIQKEIDRLNEVAKNLNESLIDLQELGKYEQYIK

SEQ ID NO: 2480 - protein, 1210 aa, Artificial Sequence
  SARS-CoV-2/India/1-27/2020__EPI_ISL_413522 spike protein (1-1210)(A971C_R994C)
MFVFLVLLPLVSSQCVNLTTRTQLPPAYTNSFTRGVYYPDKVFRSSVLHSTQDLFLPFFSNVTWFHAIHVSGTNGTKRFDNPVLPFNDGVYFASTEKSNIIRGWIFGTTLDSKTQSLLIVNNATNVVIKVCEFQFCNDPFLGVYHKNNKSWMESEFRVYSSANNCTFEYVSQPFLMDLEGKQGNFKNLREFVFKNIDGYFKIYSKHTPINLVRDLPQGFSALEPLVDLPIGINITRFQTLLALHRSYLTPGDSSSGWTAGAAAYYVGYLQPRTFLLKYNENGTITDAVDCALDPLSETKCTLKSFTVEKGIYQTSNFRVQPTESIVRFPNITNLCPFGEVFNATRFASVYAWNRKRISNCVADYSVLYNSASFSTFKCYGVSPTKLNDLCFTNVYADSFVIRGDEVIQIAPGQTGKIADYNYKLPDDFTGCVIAWNSNNLDSKVGGNYNYLYRLFRKSNLKPFERDISTEIYQAGSTPCNGVEGFNCYFPLQSYGFQPTNGVGYQPYRVVVLSFELLHAPATVCGPKKSTNLVKNKCVNFNFNGLTGTGVLTESNKKFLPFQQFGRDIADTTDAVRDPQTLEILDITPCSFGGVSVITPGTNTSNQVAVLYQDVNCTEVPVAIHADQLTPTWRVYSTGSNVFQTRAGCLIGAEHVNNSYECDIPIGAGICASYQTQTNSPRRARSVASQSIIAYTMSLGAENSVAYSNNSIAIPTNFTISVTTEILPVSMTKTSVDCTMYICGDSTECSNLLLQYGSFCTQLNRALTGIAVEQDKNTQEVFAQVKQIYKTPPIKDFGGFNFSQILPDPSKPSKRSFIEDLLFNKVTLADAGFIKQYGDCLGDIAARDLICAQKFNGLTVLPPLLTDEMIAQYTSALLAGTITSGWTFGAGAALQIPFAMQMAYRFNGIGVTQNVLYENQKLIANQFNSAIGKIQDSLSSTASALGKLQDVVNQNAQALNTLVKQLSSNFGCISSVLNDILSRLDKVEAEVQIDCLITGRLQSLQTYVTQQLIRAAEIRASANLAATKMSECVLGQSKRVDFCGKGYHLMSFPQSAPHGVVFLHVTYVPAQEKNFTTAPAICHDGKAHFPREGVFVSNGTHWFVTQRNFYEPQIITTDNTFVSGNCDVVIGIVNNTVYDPLQPELDSFKEELDKYFKNHTSPDVDLGDISGINASVVNIQKEIDRLNEVAKNLNESLIDLQELGKYEQYIK

SEQ ID NO: 2481 - protein, 1205 aa, Artificial Sequence
  SARS-CoV-2/pangolin/Guangxi/P4L/2017__EPI_ISL_410538 spike protein (1-1205)(A966C_R989C)
MFVFLFVLPLVSSQCVNLTTRTGIPPGYTNSSTRGVYYPDKVFRSSILHLTQDLFLPFFSNVTWFNTINYQGGFKKFDNPVLPFNDGVYFASTEKSNIIRGWIFGTTLDARTQSLLIVNNATNVVIKVCEFQFCTDPFLGVYYHNNNKTWVENEFRVYSSANNCTFEYISQPFLMDLEGKQGNFKNLREFVFKNVDGYFKIYSKHTPIDLVRDLPRGFAALEPLVDLPIGINITRFQTLLALHRSYLTPGNLESGWTTGAAAYYVGYLQQRTFLLSYNQNGTITDAVDCSLDPLSETKCTLKSLTVEKGIYQTSNFRVQPTISIVRFPNITNLCPFGEVFNASKFASVYAWNRKRISNCVADYSVLYNSTSFSTFKCYGVSPTKLNDLCFTNVYADSFVVKGDEVRQIAPGQTGVIADYNYKLPDDFTGCVIAWNSVKQDALTGGNYGYLYRLFRKSKLKPFERDISTEIYQAGSTPCNGQVGLNCYYPLERYGFHPTTGVNYQPFRVVVLSFELLNGPATVCGPKLSTTLVKDKCVNFNFNGLTGTGVLTTSKKQFLPFQQFGRDISDTTDAVRDPQTLEILDITPCSFGGVSVITPGTNTSNQVAVLYQDVNCTEVPMAIHAEQLTPAWRVYSAGANVFQTRAGCLVGAEHVNNSYECDIPVGAGICASYHSMSSLRSVNQRSIIAYTMSLGAENSVAYSNNSIAIPTNFTISVTTEILPVSMTKTSVDCTMYICGDSIECSNLLLQYGSFCTQLNRALTGIAVEQDKNTQEVFAQVKQIYKTPPIKDFGGFNFSQILPDPSKPSKRSFIEDLLFNKVTLADAGFIKQYGDCLGDIAARDLICAQKFNGLTVLPPLLTDEMIAQYTSALLAGTITSGWTFGAGAALQIPFAMQMAYRFNGIGVTQNVLYENQKLIANQFNSAIGKIQDSLSSTASALGKLQDVVNQNAQALNTLVKQLSSNFGCISSVLNDILSRLDKVEAEVQIDCLITGRLQSLQTYVTQQLIRAAEIRASANLAATKMSECVLGQSKRVDFCGKGYHLMSFPQSAPHGVVFLHVTYVPAQEKNFTTAPAICHEGKAHFPREGVFVSNGTHWFITQRNFYEPQIITTDNTFVSGSCDVVIGIVNNTVYDPLQPELDSFKEELDKYFKNHTSPDVDLGDISGINASVVNIQKEIDRLNEVAKNLNESPIDLQELGKYEQYIK

SEQ ID NO: 2482 - protein, 1205 aa, Artificial Sequence
  SARS-CoV-2/pangolin/Guangxi/P5L/2017__EPI_ISL_410540 spike protein (1-1205)(A966C_R989C)
MFVFLFVLPLVSSQCVNLTTRTGIPPGYTNSSTRGVYYPDKVFRSSILHLTQDLFLPFFSNVTWFNTINYQGGFKKFDNPVLPFNDGVYFASTEKSNIIRGWIFGTTLDARTQSLLIVNNATNVVIKVCEFQFCTDPFLGVYYHNNNKTWVENEFRVYSSANNCTFEYISQPFLMDLEGKQGNFKNLREFVFKNVDGYFKIYSKHTPIDLVRDLPRGFAALEPLVDLPIGINITRFQTLLALHRSYLTPGKLESGWTTGAAAYYVGYLQQRTFLLSYNQNGTITDAVDCSLDPLSETKCTLKSLTVEKGIYQTSNFRVQPTISIVRFPNITNLCPFGEVFNASKFASVYAWNRKRISNCVADYSVLYNSTSFSTFKCYGVSPTKLNDLCFTNVYADSFVVKGDEVRQIAPGQTGVIADYNYKLPDDFTGCVIAWNSVKQDALTGGNYGYLYRLFRKSKLKPFERDISTEIYQAGSTPCNGQVGLNCYYPLERYGFHPTTGVNYQPFRVVVLSFELLNGPATVCGPKLSTTLVKDKCVNFNFNGLTGTGVLTTSKKQFLPFQQFGRDISDTTDAVRDPQTLEILDITPCSFGGVSVITPGTNTSNQVAVLYQDVNCTEVPMAIHAEQLTPAWRVYSAGANVFQTRAGCLVGAEHVNNSYECDIPVGAGICASYHSMSSFRSVNQRSIIAYTMSLGAENSVAYSNNSIAIPTNFTISVTTEILPVSMTKTSVDCTMYICGDSIECSNLLLQYGSFCTQLNRALTGIAVEQDKNTQEVFAQVKQIYKTPPIKDFGGFNFSQILPDPSKPSKRSFIEDLLFNKVTLADAGFIKQYGDCLGDIAARDLICAQKFNGLTVLPPLLTDEMIAQYTSALLAGTITSGWTFGAGAALQIPFAMQMAYRFNGIGVTQNVLYENQKLIANQFNSAIGKIQDSLSSTASALGKLQDVVNQNAQALNTLVKQLSSNFGCISSVLNDILSRLDKVEAEVQIDCLITGRLQSLQTYVTQQLIRAAEIRASANLAATKMSECVLGQSKRVDFCGKGYHLMSFPQSAPHGVVFLHVTYVPAQEKNFTTAPAICHEGKAHFPREGVFVSNGTHWFITQRNFYEPQIITTDNTFVSGSCDVVIGIVNNTVYDPLQPELDSFKEELDKYFKNHTSPDVDLGDISGINASVVNIQKEIDRLNEVAKNLNESLIDLQELGKYEQYIK

SEQ ID NO: 2483 - protein, 1205 aa, Artificial Sequence
  SARS-CoV-2/pangolin/Guangxi/P5E/2017__EPI_ISL_410541 spike protein (1-1205)(A966C_R989C)
MFVFLFVLPLVSSQCVNLTTRTGIPPGYTNSSTRGVYYPDKVFRSSILHLTQDLFLPFFSNVTWFNTITYQGGSKKFDNPVLPFNDGVYFASTEKSNIIRGWIFGTTLDARTQSLLIVNNATNVVIKVCEFQFCTDPFLGVYYHNNNKTWVENEFRVYSSANNCTFEYISQPFLMDLEGKQGNFKNLREFVFKNVDGYFKIYSKHTPIDLVRDLPRGFAALEPLVDLPIGINITRFQTLLALHRSYLTPGKLESGWTTGAAAYYVGYLQQRTFLLSYNQNGTITDAVDCSLDPLSETKCTLKSLTVEKGIYQTSNFRVQPTISIVRFPNITNLCPFGEVFNASKFASVYAWNRKRISNCVADYSVLYNSTSFSTFKCYGVSPTKLNDLCFTNVYADSFVVKGDEVRQIAPGQTGVIADYNYKLPDDFTGCVIAWNSVKQDALTGDNYGYLYRLFRKSKLKPFERDISTEIYQAGSTPCNGQVGLNCYYPLERYGFHPTTGVNYQPFRVVVLSFELLNGPATVCGPKLSTTLVKDKCVNFNFNGLTGTGVLTTSKKQFLPFQQFGRDISDTTDAVRDPQTLEILDITPCSFGGVSVITPGTNTSNQVAVLYQDVNCTEVPMAIHAEQLTPAWRVYSAGANVFQTRAGCLVGAEHVNNSYECDIPVGAGICASYHSMSSFRSVNQRSIIAYTMSLGAENSVAYSNNSIAIPTNFTISVTTEILPVSMTKTSVDCTMYICGDSIECSNLLLQYGSFCTQLNRALTGIAVEQDKNTQEVFAQVKQIYKTPPIKDFGGFNFSQILPDPSKPSKRSFIEDLLFNKVTLADAGFIKQYGDCLGDIAARDLICAQKFNGLTVLPPLLTDEMIAQYTSALLAGTITSGWTFGAGAALQIPFAMQMAYRFNGIGVTQNVLYENQKLIANQFNSAIGKIQDSLSSTASALGKLQDVVNQNAQALNTLVKQLSSNFGCISSVLNDILSRLDKVEAEVQIDCLITGRLQSLQTYVTQQLIRAAEIRASANLAATKMSECVLGQSKRVDFCGKGYHLMSFPQSAPHGVVFLHVTYVPAQEKNFTTAPAICHEGKAHFPREGVFVSNGTHWFITQRNFYEPQIITTDNTFVSGSCDVVIGIVNNTVYDPLQPELDSFKEELDKYFKNHTSPDVDLGDISGINASVVNIQKEIDRLNEVAKNLNESLIDLQELGKYEQYIK

SEQ ID NO: 2484 - protein, 1203 aa, Artificial Sequence
  SARS-CoV-2/pangolin/Guangxi/P1E/2017__EPI_ISL_410539 spike protein (1-1203)(A964C_R987C)
MFVFLFVLPLVSSQCVNLTTRTGIQPGYTNSSTRGVYYPDKVFRSSILHLTQDLFLPFFSNVTWFNTINYQGGFKKFDNPVLPFNDGVYFASTEKSNIIRGWIFGTTLDARTQSLLIVNNATNVVIKVCEFQFCTDPFLGVYYHNNNKTWVENEFRVYSSANNCTFEYISQPFLMDLEGKQGNFKNLREFVFKNVDGYFKIYSKHTPIDLVRDLPRGFAALEPLVDLPIGINITRFQTLLALHRSYLTPGKLESGWTTGAAAYYVGYLQQRTFLLSYNQNGTITDAVDCSLDPLSETKCTLKSLTVEKGIYQTSNFRVQPTISIVRFPNITNLCPFGEVFNASKFASVYAWNRKRISNCVADYSVLYNSTSFSTFKCYGVSPTKLNDLCFTNVYADSFVVKGDEVRQIAPGQTGVIADYNYKLPDDFTGCVIAWNSVKQDALTGGNYLYRLFRKSKLKPFERDISTEIYQAGSTPCNGQVGLNCYYPLERYGFHPTTGVNYQPFRVVVLSFELLNGPATVCGPKLSTTLVKDKCVNFNFNGLTGTGVLTTSKKQFLPFQQFGRDISDTTDAVRDPQTLEILDITPCSFGGVSVITPGTNTSNQVAVLYQDVNCTEVPMAIHAEQLTPAWRVYSAGANVFQTRAGCLVGAEHVNNSYECDIPVGAGICASYHSMSSLRSVNQRSIIAYTMSLGAENSVAYSNNSIAIPTNFTISVTTEILPVSMTKTSVDCTMYICGDSIECSNLLLQYGSFCTQLNRALTGIAVEQDKNTQEVFAQVKQIYKTPPIKDFGGFNFSQILPDPSKPSKRSFIEDLLFNKVTLADAGFIKQYGDCLGDIAARDLICAQKFNGLTVLPPLLTDEMIAQYTSALLAGTITSGWTFGAGAALQIPFAMQMAYRFNGIGVTQNVLYENQKLIANQFNSAIGKIQDSLSSTASALGKLQDVVNQNAQALNTLVKQLSSNFGCISSVLNDILSRLDKVEAEVQIDCLITGRLQSLQTYVTQQLIRAAEIRASANLAATKMSECVLGQSKRVDFCGKGYHLMSFPQSAPHGVVFLHVTYVPAQEKNFTTAPAICHEGKAHFPREGVFVSNGTHWFITQRNFYEPQIITTDNTFVSGSCDVVIGIVNNTVYDPLQPELDSFKEELDKYFKNHTSPDVDLGDISGINASVVNIQKEIDRLNEVAKNLNESLIDLQELGKYEQYIK

SEQ ID NO: 2485 - protein, 1211 aa, Artificial Sequence
  SARS-CoV-2/Wuhan/WIV05/2019__EPI_ISL_402128 spike protein (1-1211)(A890C_V1040C)
MFVFLVLLPLVSSQCVNLTTRTQLPPAYTNSFTRGVYYPDKVFRSSVLHSTQDLFLPFFSNVTWFHAIHVSGTNGTKRFDNPVLPFNDGVYFASTEKSNIIRGWIFGTTLDSKTQSLLIVNNATNVVIKVCEFQFCNDPFLGVYYHKNNKSWMESEFRVYSSANNCTFEYVSQPFLMDLEGKQGNFKNLREFVFKNIDGYFKIYSKHTPINLVRDLPQGFSALEPLVDLPIGINITRFQTLLALHRSYLTPGDSSSGWTAGAAAYYVGYLQPRTFLLKYNENGTITDAVDCALDPLSETKCTLKSFTVEKGIYQTSNFRVQPTESIVRFPNITNLCPFGEVFNATRFASVYAWNRKRISNCVADYSVLYNSASFSTFKCYGVSPTKLNDLCFTNVYADSFVIRGDEVRQIAPGQTGKIADYNYKLPDDFTGCVIAWNSNNLDSKVGGNYNYLYRLFRKSNLKPFERDISTEIYQAGSTPCNGVEGFNCYFPLQSYGFQPTNGVGYQPYRVVVLSFELLHAPATVCGPKKSTNLVKNKCVNFNFNGLTGTGVLTESNKKFLPFQQFGRDIADTTDAVRDPQTLEILDITPCSFGGVSVITPGTNTSNQVAVLYQDVNCTEVPVAIHADQLTPTWRVYSTGSNVFQTRAGCLIGAEHVNNSYECDIPIGAGICASYQTQTNSPRRARSVASQSIIAYTMSLGAENSVAYSNNSIAIPTNFTISVTTEILPVSMTKTSVDCTMYICGDSTECSNLLLQYGSFCTQLNRALTGIAVEQDKNTQEVFAQVKQIYKTPPIKDFGGFNFSQILPDPSKPSKRSFIEDLLFNKVTLADAGFIKQYGDCLGDIAARDLICAQKFNGLTVLPPLLTDEMIAQYTSALLAGTITSGWTFGCGAALQIPFAMQMAYRFNGIGVTQNVLYENQKLIANQFNSAIGKIQDSLSSTASALGKLQDVVNQNAQALNTLVKQLSSNFGAISSVLNDILSRLDKVEAEVQIDRLITGRLQSLQTYVTQQLIRAAEIRASANLAATKMSECVLGQSKRCDFCGKGYHLMSFPQSAPHGVVFLHVTYVPAQEKNFTTAPAICHDGKAHFPREGVFVSNGTHWFVTQRNFYEPQIITTDNTFVSGNCDVVIGIVNNTVYDPLQPELDSFKEELDKYFKNHTSPDVDLGDISGINASVVNIQKEIDRLNEVAKNLNESLIDLQELGKYEQYIK

SEQ ID NO: 2486 - protein, 1207 aa, Artificial Sequence; identical to SEQ ID NO: 2218
  SARS-CoV-2/bat/Yunnan/RaTG13/2013__EPI_ISL_402131 spike protein (1-1207)(A886C_V1036C)

SEQ ID NO: 2487 - protein, 1211 aa, Artificial Sequence; identical to SEQ ID NO: 2219
  SARS-CoV-2/Wuhan/HBCDC-HB-01/2019__EPI_ISL_402132 spike protein (1-1211)(A890C_V1040C)

SEQ ID NO: 2488 - protein, 1211 aa, Artificial Sequence; identical to SEQ ID NO: 2220
  SARS-CoV-2/Guangdong/20SF028/2020__EPI_ISL_403936 spike protein (1-1211)(A890C_V1040C)

SEQ ID NO: 2489 - protein, 1211 aa, Artificial Sequence; identical to SEQ ID NO: 2221
  SARS-CoV-2/Shenzhen/SZTH-001/2020__EPI_ISL_406592 spike protein (1-1211)(A890C_V1040C)

SEQ ID NO: 2490 - protein, 1211 aa, Artificial Sequence; identical to SEQ ID NO: 2222
  SARS-CoV-2/Shenzhen/SZTH-004/2020__EPI_ISL_406595 spike protein (1-1211)(A890C_V1040C)

SEQ ID NO: 2491 - protein, 1211 aa, Artificial Sequence; identical to SEQ ID NO: 2223
  SARS-CoV-2/France/IDF0372/2020__EPI_ISL_406596 spike protein (1-1211)(A890C_V1040C)

SEQ ID NO: 2492 - protein, 1211 aa, Artificial Sequence; identical to SEQ ID NO: 2224
  SARS-CoV-2/Australia/VIC01/2020__EPI_ISL_406844 spike protein (1-1211)(A890C_V1040C)

SEQ ID NO: 2493 - protein, 1211 aa, Artificial Sequence; identical to SEQ ID NO: 2225
  SARS-CoV-2/Germany/BavPat1/2020__EPI_ISL_406862 spike protein (1-1211)(A890C_V1040C)

SEQ ID NO: 2494 - protein, 1211 aa, Artificial Sequence; identical to SEQ ID NO: 2226
  SARS-CoV-2/Wuhan/HBCDC-HB-02/2020__EPI_ISL_412978 spike protein (1-1211)(A890C_V1040C)

SEQ ID NO: 2495 - protein, 1211 aa, Artificial Sequence; identical to SEQ ID NO: 2227
  SARS-CoV-2/Australia/QLD02/2020__EPI_ISL_407896 spike protein (1-1211)(A890C_V1040C)

SEQ ID NO: 2496 - protein, 1211 aa, Artificial Sequence; identical to SEQ ID NO: 2228
  SARS-CoV-2/India/1-31/2020__EPI_ISL_413523 spike protein (1-1211)(A890C_V1040C)

SEQ ID NO: 2497 - protein, 1211 aa, Artificial Sequence; identical to SEQ ID NO: 2229
  SARS-CoV-2/Guangdong/GD2020087-P0008/2020__EPI_ISL_413863 spike protein (1-1211)(A890C_V1040C)

SEQ ID NO: 2498 - protein, 1211 aa, Artificial Sequence; identical to SEQ ID NO: 2230
  SARS-CoV-2/Sweden/01/2020__EPI_ISL_411951 spike protein (1-1211)(A890C_V1040C)

SEQ ID NO: 2499 - protein, 1211 aa, Artificial Sequence; identical to SEQ ID NO: 2231
  SARS-CoV-2/Tianmen/HBCDC-HB-07/2020__EPI_ISL_412983 spike protein (1-1211)(A890C_V1040C)

SEQ ID NO: 2500 - protein, 1211 aa, Artificial Sequence; identical to SEQ ID NO: 2232
  SARS-CoV-2/Hong Kong/case42_VM20002493/2020__EPI_ISL_414527 spike protein (1-1211)(A890C_V1040C)

SEQ ID NO: 2501 - protein, 1211 aa, Artificial Sequence; identical to SEQ ID NO: 2233
  SARS-CoV-2/USA/CruiseA-23/2020__EPI_ISL_414482 spike protein (1-1211)(A890C_V1040C)

SEQ ID NO: 2502 - protein, 1211 aa, Artificial Sequence; identical to SEQ ID NO: 2234
  SARS-CoV-2/Hong Kong/case85_VM20002868/2020__EPI_ISL_414519 spike protein (1-1211)(A890C_V1040C)

SEQ ID NO: 2503 - protein, 1211 aa, Artificial Sequence; identical to SEQ ID NO: 2225
  SARS-CoV-2/England/200990660/2020__EPI_ISL_414523 spike protein (1-1211)(A890C_V1040C)

SEQ ID NO: 2504 - protein, 1211 aa, Artificial Sequence; identical to SEQ ID NO: 2236
  SARS-CoV-2/Australia/NSW09/2020__EPI_ISL_413595 spike protein (1-1211)(A890C_V1040C)

SEQ ID NO: 2505 - protein, 1211 aa, Artificial Sequence; identical to SEQ ID NO: 2217
  SARS-CoV-2/Australia/NSW10/2020__EPI_ISL_413596 spike protein (1-1211)(A890C_V1040C)

SEQ ID NO: 2506 - protein, 1211 aa, Artificial Sequence; identical to SEQ ID NO: 2238
  SARS-CoV-2/Switzerland/1000477797/2020__EPI_ISL_413023 spike protein (1-1211)(A890C_V1040C)

SEQ ID NO: 2507 - protein, 1211 aa, Artificial Sequence; identical to SEQ ID NO: 2239
  SARS-CoV-2/Belgium/BA-02291/2020__EPI_ISL_415159 spike protein (1-1211)(A890C_V1040C)

SEQ ID NO: 2508 - protein, 1211 aa, Artificial Sequence; identical to SEQ ID NO: 2240
  SARS-CoV-2/USA/WA8-UW5/2020__EPI_ISL_413486 spike protein (1-1211)(A890C_V1040C)

SEQ ID NO: 2509 - protein, 1211 aa, Artificial Sequence; identical to SEQ ID NO: 2241
  SARS-CoV-2/England/20102000506/2020__EPI_ISL_415147 spike protein (1-1211)(A890C_V1040C)

SEQ ID NO: 2510 - protein, 1211 aa, Artificial Sequence; identical to SEQ ID NO: 2242
  SARS-CoV-2/Belgium/VAG-03013/2020__EPI_ISL_415155 spike protein (1-1211)(A890C_V1040C)

SEQ ID NO: 2511 - protein, 1211 aa, Artificial Sequence; identical to SEQ ID NO: 2243
  SARS-CoV-2/Belgium/BC-03016/2020__EPI_ISL_415157 spike protein (1-1211)(A890C_V1040C)

SEQ ID NO: 2512 - protein, 1211 aa, Artificial Sequence; identical to SEQ ID NO: 2244
  SARS-CoV-2/Germany/BavPat3/2020__EPI_ISL_414521 spike protein (1-1211)(A890C_V1040C)

SEQ ID NO: 2513 - protein, 1211 aa, Artificial Sequence; identical to SEQ ID NO: 2245
  SARS-CoV-2/France/HF1805/2020__EPI_ISL_414628 spike protein (1-1211)(A890C_V1040C)

SEQ ID NO: 2514 - protein, 1211 aa, Artificial Sequence; identical to SEQ ID NO: 2246
  SARS-CoV-2/Netherlands/ZuidHolland_9/2020__EPI_ISL_414445 spike protein (1-1211)(A890C_V1040C)

SEQ ID NO: 2515 - protein, 1211 aa, Artificial Sequence; identical to SEQ ID NO: 2247
  SARS-CoV-2/Finland/FIN03032020A/2020__EPI_ISL_413602 spike protein (1-1211)(A890C_V1040C)

SEQ ID NO: 2516 - protein, 1211 aa, Artificial Sequence; identical to SEQ ID NO: 2248
  SARS-CoV-2/France/GE1977/2020__EPI_ISL_414632 spike protein (1-1211)(A890C_V1040C)

SEQ ID NO: 2517 - protein, 1211 aa, Artificial Sequence; identical to SEQ ID NO: 2249
  SARS-CoV-2/Finland/FIN-313/2020__EPI_ISL_414641 spike protein (1-1211)(A890C_V1040C)

SEQ ID NO: 2518 - protein, 1211 aa, Artificial Sequence; identical to SEQ ID NO: 2250
  SARS-CoV-2/Netherlands/ZuidHolland_2/2020__EPI_ISL_414556 spike protein (1-1211)(A890C_V1040C)

SEQ ID NO: 2519 - protein, 1211 aa, Artificial Sequence; identical to SEQ ID NO: 2251
  SARS-CoV-2/USA/WA-UW31/2020__EPI_ISL_414618 spike protein (1-1211)(A890C_V1040C)

SEQ ID NO: 2520 - protein, 1211 aa, Artificial Sequence; identical to SEQ ID NO: 2252
  SARS-CoV-2/South Korea/SNU01/2020__EPI_ISL_411929 spike protein (1-1211)(A890C_V1040C)

SEQ ID NO: 2521 - protein, 1211 aa, Artificial Sequence; identical to SEQ ID NO: 2253
  SARS-CoV-2/China/WF0004/2020__EPI_ISL_413694 spike protein (1-1211)(A890C_V1040C)

SEQ ID NO: 2522 - protein, 1211 aa, Artificial Sequence; identical to SEQ ID NO: 2254
  SARS-CoV-2/China/WF0028/2020__EPI_ISL_413791 spike protein (1-1211)(A890C_V1040C)

SEQ ID NO: 2523 - protein, 1211 aa, Artificial Sequence; identical to SEQ ID NO: 2255
  SARS-CoV-2/2019-nCoV/USA-CruiseA-18/2020__MT159716.1 spike protein (1-1211)(A890C_V1040C)

SEQ ID NO: 2524 - protein, 1211 aa, Artificial Sequence; identical to SEQ ID NO: 2256
  SARS-CoV-2/SARS-CoV-2/Yunnan-01/human/2020/CHN__MT049951.1 spike protein (1-1211)(A890C_V1040C)

SEQ ID NO: 2525 - protein, 1211 aa, Artificial Sequence; identical to SEQ ID NO: 2257
  SARS-CoV-2/USA/WA-UW292/2020__EPI_ISL_418077 spike protein (1-1211)(A890C_V1040C)

SEQ ID NO: 2526 - protein, 1211 aa, Artificial Sequence; identical to SEQ ID NO: 2258
  SARS-CoV-2/Iceland/192/2020__EPI_ISL_417819 spike protein (1-1211)(A890C_V1040C)

SEQ ID NO: 2527 - protein, 1211 aa, Artificial Sequence; identical to SEQ ID NO: 2259
  SARS-CoV-2/Belgium/ULG-6939/2020__EPI_ISL_417020 spike protein (1-1211)(A890C_V1040C)

SEQ ID NO: 2528 - protein, 1211 aa, Artificial Sequence; identical to SEQ ID NO: 2260
  SARS-CoV-2/France/HF2496/2020__EPI_ISL_418231 spike protein (1-1211)(A890C_V1040C)

SEQ ID NO: 2529 - protein, 1211 aa, Artificial Sequence; identical to SEQ ID NO: 2261
  SARS-CoV-2/USA/WA-UW291/2020__EPI_ISL_418076 spike protein (1-1211)(A890C_V1040C)

SEQ ID NO: 2530 - protein, 1211 aa, Artificial Sequence; identical to SEQ ID NO: 2225
  SARS-CoV-2/Portugal/PT0034/2020__EPI_ISL_418019 spike protein (1-1211)(A890C_V1040C)

SEQ ID NO: 2531 - protein, 1211 aa, Artificial Sequence; identical to SEQ ID NO: 2263
  SARS-CoV-2/Iceland/202/2020__EPI_ISL_417750 spike protein (1-1211)(A890C_V1040C)

SEQ ID NO: 2532 - protein, 1211 aa, Artificial Sequence; identical to SEQ ID NO: 2264
  SARS-CoV-2/USA/WA-UW261/2020__EPI_ISL_418046 spike protein (1-1211)(A890C_V1040C)

SEQ ID NO: 2533 - protein, 1211 aa, Artificial Sequence; identical to SEQ ID NO: 2265
  SARS-CoV-2/Portugal/PT0035/2020__EPI_ISL_418020 spike protein (1-1211)(A890C_V1040C)

SEQ ID NO: 2534 - protein, 1211 aa, Artificial Sequence; identical to SEQ ID NO: 2266
  SARS-CoV-2/USA/NY-NYUMC7/2020__EPI_ISL_418192 spike protein (1-1211)(A890C_V1040C)

SEQ ID NO: 2535 - protein, 1211 aa, Artificial Sequence; identical to SEQ ID NO: 2267
  SARS-CoV-2/Iceland/189/2020__EPI_ISL_417709 spike protein (1-1211)(A890C_V1040C)

SEQ ID NO: 2536 - protein, 1211 aa, Artificial Sequence; identical to SEQ ID NO: 2268
  SARS-CoV-2/Australia/NSW56/2020__EPI_ISL_417408 spike protein (1-1211)(A890C_V1040C)

SEQ ID NO: 2537 - protein, 1211 aa, Artificial Sequence; identical to SEQ ID NO: 2269
  SARS-CoV-2/Iceland/280/2020__EPI_ISL_417608 spike protein (1-1211)(A890C_V1040C)

SEQ ID NO: 2538 - protein, 1211 aa, Artificial Sequence; identical to SEQ ID NO: 2225
  SARS-CoV-2/Iceland/247/2020__EPI_ISL_417575 spike protein (1-1211)(A890C_V1040C)

SEQ ID NO: 2539 - protein, 1211 aa, Artificial Sequence; identical to SEQ ID NO: 2271
  SARS-CoV-2/Iceland/238/2020__EPI_ISL_417566 spike protein (1-1211)(A890C_V1040C)

SEQ ID NO: 2540 - protein, 1211 aa, Artificial Sequence; identical to SEQ ID NO: 2272
  SARS-CoV-2/Greece/16/2020__EPI_ISL_418265 spike protein (1-1211)(A890C_V1040C)

SEQ ID NO: 2541 - protein, 1211 aa, Artificial Sequence; identical to SEQ ID NO: 2273
  SARS-CoV-2/Iceland/319/2020__EPI_ISL_417648 spike protein (1-1211)(A890C_V1040C)

SEQ ID NO: 2542 - protein, 1211 aa, Artificial Sequence; identical to SEQ ID NO: 2274
  SARS-CoV-2/Congo/94/2020__EPI_ISL_417947 spike protein (1-1211)(A890C_V1040C)

SEQ ID NO: 2543 - protein, 1211 aa, Artificial Sequence; identical to SEQ ID NO: 2275
  SARS-CoV-2/Congo/158/2020__EPI_ISL_417950 spike protein (1-1211)(A890C_V1040C)

SEQ ID NO: 2544 - protein, 1211 aa, Artificial Sequence; identical to SEQ ID NO: 2276
  SARS-CoV-2/USA/UT-00034/2020__EPI_ISL_417977 spike protein (1-1211)(A890C_V1040C)

SEQ ID NO: 2545 - protein, 1211 aa, Artificial Sequence; identical to SEQ ID NO: 2277
  SARS-CoV-2/USA/UT-00033/2020__EPI_ISL_417976 spike protein (1-1211)(A890C_V1040C)

SEQ ID NO: 2546 - protein, 1211 aa, Artificial Sequence; identical to SEQ ID NO: 2278
  SARS-CoV-2/USA/WI-13/2020__EPI_ISL_417516 spike protein (1-1211)(A890C_V1040C)

SEQ ID NO: 2547 - protein, 1210 aa, Artificial Sequence; identical to SEQ ID NO: 2279
  SARS-CoV-2/India/1-27/2020__EPI_ISL_413522 spike protein (1-1210)(A889C_V1039C)

SEQ ID NO: 2548 - protein, 1205 aa, Artificial Sequence; identical to SEQ ID NO: 2280
  SARS-CoV-2/pangolin/Guangxi/P4L/2017__EPI_ISL_410538 spike protein (1-1205)(A884C_V1034C)

SEQ ID NO: 2549 - protein, 1205 aa, Artificial Sequence; identical to SEQ ID NO: 2281
  SARS-CoV-2/pangolin/Guangxi/P5L/2017__EPI_ISL_410540 spike protein (1-1205)(A884C_V1034C)

SEQ ID NO: 2550 - protein, 1205 aa, Artificial Sequence; identical to SEQ ID NO: 2282
  SARS-CoV-2/pangolin/Guangxi/P5E/2017__EPI_ISL_410541 spike protein (1-1205)(A884C_V1034C)

SEQ ID NO: 2551 - protein, 1203 aa, Artificial Sequence; identical to SEQ ID NO: 2283
  SARS-CoV-2/pangolin/Guangxi/P1E/2017__EPI_ISL_410539 spike protein (1-1203)(A882C_V1032C)

SEQ ID NO: 2552 - protein, 1211 aa, Artificial Sequence
  SARS-CoV-2/Wuhan/WIV05/2019__EPI_ISL_402128 spike protein (1-1211)(T874C_S1055C)
MFVFLVLLPLVSSQCVNLTTRTQLPPAYTNSFTRGVYYPDKVFRSSVLHSTQDLFLPFFSNVTWFHAIHVSGTNGTKRFDNPVLPFNDGVYFASTEKSNIIRGWIFGTTLDSKTQSLLIVNNATNVVIKVCEFQFCNDPFLGVYYHKNNKSWMESEFRVYSSANNCTFEYVSQPFLMDLEGKQGNFKNLREFVFKNIDGYFKIYSKHTPINLVRDLPQGFSALEPLVDLPIGINITRFQTLLALHRSYLTPGDSSSGWTAGAAAYYVGYLQPRTFLLKYNENGTITDAVDCALDPLSETKCTLKSFTVEKGIYQTSNFRVQPTESIVRFPNITNLCPFGEVFNATRFASVYAWNRKRISNCVADYSVLYNSASFSTFKCYGVSPTKLNDLCFTNVYADSFVIRGDEVRQIAPGQTGKIADYNYKLPDDFTGCVIAWNSNNLDSKVGGNYNYLYRLFRKSNLKPFERDISTEIYQAGSTPCNGVEGFNCYFPLQSYGFQPTNGVGYQPYRVVVLSFELLHAPATVCGPKKSTNLVKNKCVNFNFNGLTGTGVLTESNKKFLPFQQFGRDIADTTDAVRDPQTLEILDITPCSFGGVSVITPGTNTSNQVAVLYQDVNCTEVPVAIHADQLTPTWRVYSTGSNVFQTRAGCLIGAEHVNNSYECDIPIGAGICASYQTQTNSPRRARSVASQSIIAYTMSLGAENSVAYSNNSIAIPTNFTISVTTEILPVSMTKTSVDCTMYICGDSTECSNLLLQYGSFCTQLNRALTGIAVEQDKNTQEVFAQVKQIYKTPPIKDFGGFNFSQILPDPSKPSKRSFIEDLLFNKVTLADAGFIKQYGDCLGDIAARDLICAQKFNGLTVLPPLLTDEMIAQYCSALLAGTITSGWTFGAGAALQIPFAMQMAYRFNGIGVTQNVLYENQKLIANQFNSAIGKIQDSLSSTASALGKLQDVVNQNAQALNTLVKQLSSNFGAISSVLNDILSRLDKVEAEVQIDRLITGRLQSLQTYVTQQLIRAAEIRASANLAATKMSECVLGQSKRVDFCGKGYHLMSFPQCAPHGVVFLHVTYVPAQEKNFTTAPAICHDGKAHFPREGVFVSNGTHWFVTQRNFYEPQIITTDNTFVSGNCDVVIGIVNNTVYDPLQPELDSFKEELDKYFKNHTSPDVDLGDISGINASVVNIQKEIDRLNEVAKNLNESLIDLQELGKYEQYIK

SEQ ID NO: 2553 - protein, 1207 aa, Artificial Sequence
  SARS-CoV-2/bat/Yunnan/RaTG13/2013__EPI_ISL_402131 spike protein (1-1207)(T870C_S1051C)
MFVFLVLLPLVSSQCVNLTTRTQLPPAYTNSSTRGVYYPDKVFRSSVLHLTQDLFLPFFSNVTWFHAIHVSGTNGIKRFDNPVLPFNDGVYFASTEKSNIIRGWIFGTTLDSKTQSLLIVNNATNVVIKVCEFQFCNDPFLGVYYHKNNKSWMESEFRVYSSANNCTFEYVSQPFLMDLEGKQGNFKNLREFVFKNIDGYFKIYSKHTPINLVRDLPPGFSALEPLVDLPIGINITRFQTLLALHRSYLTPGDSSSGWTAGAAAYYVGYLQPRTFLLKYNENGTITDAVDCALDPLSETKCTLKSFTVEKGIYQTSNFRVQPTDSIVRFPNITNLCPFGEVFNATTFASVYAWNRKRISNCVADYSVLYNSTSFSTFKCYGVSPTKLNDLCFTNVYADSFVITGDEVRQIAPGQTGKIADYNYKLPDDFTGCVIAWNSKHIDAKEGGNFNYLYRLFRKANLKPFERDISTEIYQAGSKPCNGQTGLNCYYPLYRYGFYPTDGVGHQPYRVVVLSFELLNAPATVCGPKKSTNLVKNKCVNFNFNGLTGTGVLTESNKKFLPFQQFGRDIADTTDAVRDPQTLEILDITPCSFGGVSVITPGTNASNQVAVLYQDVNCTEVPVAIHADQLTPTWRVYSTGSNVFQTRAGCLIGAEHVNNSYECDIPIGAGICASYQTQTNSRSVASQSIIAYTMSLGAENSVAYSNNSIAIPTNFTISVTTEILPVSMTKTSVDCTMYICGDSTECSNLLLQYGSFCTQLNRALTGIAVEQDKNTQEVFAQVKQIYKTPPIKDFGGFNFSQILPDPSKPSKRSFIEDLLFNKVTLADAGFIKQYGDCLGDIAARDLICAQKFNGLTVLPPLLTDEMIAQYCSALLAGTITSGWTFGAGAALQIPFAMQMAYRFNGIGVTQNVLYENQKLIANQFNSAIGKIQDSLSSTASALGKLQDVVNQNAQALNTLVKQLSSNFGAISSVLNDILSRLDKVEAEVQIDRLITGRLQSLQTYVTQQLIRAAEIRASANLAATKMSECVLGQSKRVDFCGKGYHLMSFPQCAPHGVVFLHVTYVPAQEKNFTTAPAICHDGKAHFPREGVFVSNGTHWFVTQRNFYEPQIITTDNTFVSGSCDVVIGIVNNTVYDPLQPELDSFKEELDKYFKNHTSPDVDLGDISGINASVVNIQKEIDRLNEVAKNLNESLIDLQELGKYEQYIK

SEQ ID NO: 2554 - protein, 1211 aa, Artificial Sequence
  SARS-CoV-2/Wuhan/HBCDC-HB-01/2019__EPI_ISL_402132 spike protein (1-1211)(T874C_S1055C)
MFVFLVLLPLVSSQCVNLTTRTQLPPAYTNSITRGVYYPDKVFRSSVLHSTQDLFLPFFSNVTWFHAIHVSGTNGTKRFDNPVLPFNDGVYFASTEKSNIIRGWIFGTTLDSKTQSLLIVNNATNVVIKVCEFQFCNDPFLGVYYHKNNKSWMESEFRVYSSANNCTFEYVSQPFLMDLEGKQGNFKNLREFVFKNIDGYFKIYSKHTPINLVRDLPQGFSALEPLVDLPIGINITRFQTLLALHRSYLTPGDSSSGWTAGAAAYYVGYLQPRTFLLKYNENGTITDAVDCALDPLSETKCTLKSFTVEKGIYQTSNFRVQPTESIVRFPNITNLCPFGEVFNATRFASVYAWNRKRISNCVADYSVLYNSASFSTFKCYGVSPTKLNDLCFTNVYADSFVIRGDEVRQIAPGQTGKIADYNYKLPDDFTGCVIAWNSNNLDSKVGGNYNYLYRLFRKSNLKPFERDISTEIYQAGSTPCNGVEGFNCYFPLQSYGFQPTNGVGYQPYRVVVLSFELLHAPATVCGPKKSTNLVKNKCVNFNFNGLTGTGVLTESNKKFLPFQQFGRDIADTTDAVRDPQTLEILDITPCSFGGVSVITPGTNTSNQVAVLYQDVNCTEVPVAIHADQLTPTWRVYSTGSNVFQTRAGCLIGAEHVNNSYECDIPIGAGICASYQTQTNSPRRARSVASQSIIAYTMSLGAENSVAYSNNSIAIPTNFTISVTTEILPVSMTKTSVDCTMYICGDSTECSNLLLQYGSFCTQLNRALTGIAVEQDKNTQEVFAQVKQIYKTPPIKDFGGFNFSQILPDPSKPSKRSFIEDLLFNKVTLADAGFIKQYGDCLGDIAARDLICAQKFNGLTVLPPLLTDEMIAQYCSALLAGTITSGWTFGAGAALQIPFAMQMAYRFNGIGVTQNVLYENQKLIANQFNSAIGKIQDSLSSTASALGKLQDVVNQNAQALNTLVKQLSSNFGAISSVLNDILSRLDKVEAEVQIDRLITGRLQSLQTYVTQQLIRAAEIRASANLAATKMSECVLGQSKRVDFCGKGYHLMSFPQCAPHGVVFLHVTYVPAQEKNFTTAPAICHDGKAHFPREGVFVSNGTHWFVTQRNFYEPQIITTDNTFVSGNCDVVIGIVNNTVYDPLQPELDSFKEELDKYFKNHTSPDVDLGDISGINASVVNIQKEIDRLNEVAKNLNESLIDLQELGKYEQYIK

SEQ ID NO: 2555 - protein, 1211 aa, Artificial Sequence
  SARS-CoV-2/Guangdong/20SF028/2020__EPI_ISL_403936 spike protein (1-1211)(T874C_S1055C)
MFVFLVLLPLVSSQCVNLTTRTQLPPAYTNSFTRGVYYPDKVFRSSVLYSTQDLFLPFFSNVTWFHAIHVSGTNGTKRFDNPVLPFNDGVYFASTEKSNIIRGWIFGTTLDSKTQSLLIVNNATNVVIKVCEFQFCNDPFLGVYYHKNNKSWMESEFRVYSSANNCTFEYVSQPFLMDLEGKQGNFKNLREFVFKNIDGYFKIYSKHTPINLVRDLPQGFSALEPLVDLPIGINITRFQTLLALHRSYLTPGDSSSGWTAGAAAYYVGYLQPRTFLLKYNENGTITDAVDCALDPLSETKCTLKSFTVEKGIYQTSNFRVQPTESIVRFPNITNLCPFGEVFNATRFASVYAWNRKRISNCVADYSVLYNSASFSTFKCYGVSPTKLNDLCFTNVYADSFVIRGDEVRQIAPGQTGKIADYNYKLPDDFTGCVIAWNSNNLDSKVGGNYNYLYRLFRKSNLKPFERDISTEIYQAGSTPCNGVEGFNCYFPLQSYGFQPTNGVGYQPYRVVVLSFELLHAPATVCGPKKSTNLVKNKCVNFNFNGLTGTGVLTESNKKFLPFQQFGRDIADTTDAVRDPQTLEILDITPCSFGGVSVITPGTNTSNQVAVLYQDVNCTEVPVAIHADQLTPTWRVYSTGSNVFQTRAGCLIGAEHVNNSYECDIPIGAGICASYQTQTNSPRRARSVASQSIIAYTMSLGAENSVAYSNNSIAIPTNFTISVTTEILPVSMTKTSVDCTMYICGDSTECSNLLLQYGSFCTQLNRALTGIAVEQDKNTQEVFAQVKQIYKTPPIKDFGGFNFSQILPDPSKPSKRSFIEDLLFNKVTLADAGFIKQYGDCLGDIAARDLICAQKFNGLTVLPPLLTDEMIAQYCSALLAGTITSGWTFGAGAALQIPFAMQMAYRFNGIGVTQNVLYENQKLIANQFNSAIGKIQDSLSSTASALGKLQDVVNQNAQALNTLVKQLSSNFGAISSVLNDILSRLDKVEAEVQIDRLITGRLQSLQTYVTQQLIRAAEIRASANLAATKMSECVLGQSKRVDFCGKGYHLMSFPQCAPHGVVFLHVTYVPAQEKNFTTAPAICHDGKAHFPREGVFVSNGTHWFVTQRNFYEPQIITTDNTFVSGNCDVVIGIVNNTVYDPLQPELDSFKEELDKYFKNHTSPDVDLGDISGINASVVNIQKEIDRLNEVAKNLNESLIDLQELGKYEQYIK

SEQ ID NO: 2556 - protein, 1211 aa, Artificial Sequence
  SARS-CoV-2/Shenzhen/SZTH-001/2020__EPI_ISL_406592 spike protein (1-1211)(T874C_S1055C)
MFVFLVLLPLVSSQCVNLTTRTQLPPAYTNSFTRGVYYPDKVFRSSVLHSTQDLFLPFFSNVTWFHAIHVSGTNGTKRFDNPVLPFNDGVYFASTEKSNIIRGWIFGTTLDSKTQSLLIVNNATNVVIKVCEFQFCNDPFLGVYYHKNNKSWMESEFRVYSSANNCTFEYVSQPFLMDLEGKQGNFKNLREFVFKNIDGYFKIYSKHTPINLVRDLPQGFSALEPLVDLPIGINITRFQTLLALHRSYLTPGDSSSGWTAGAAAYYVGYLQPRTFLLKYNENGTITDAVDCALDPLSETKCTLKSFTVEKGIYQTSNFRVQPTESIVRFPNITNLCPFGEVFNATRFASVYAWNRKRISNCVADYSVLYNSASFSTFKCYGVSPTKLNDLCFTNVYADSFVIRGDEVRQIAPGQTGKIADYNYKLPDDFTGCVIAWNSNNLDSKVGGNYNYLYRLFRKSNLKPFERDISTEIYQAGSTPCNGVEGFNCYFPLQSYGFQPTNGVGYQPYRVVVLSFELLHAPATVCGPKKSTNLVKNKCVNFNFNGLTGTGVLTESNKKFLPFQQFGRDIADTTDAVRDPQTLEILDITPCSFGGVSVITPGTNTSNQVAVLYQDVNCTEVPVAIHADQLTPTWRVYSTGSNVFQTRAGCLIGAEHVNNSYECDIPIGAGICASYQTQTNSPRRARSVASQSIIAYTMSLGAENSVAYSNNSIAIPTNFTISVTTEILPVSMTKTSVDCTMYICGDSTECSNLLLQYGSFCTQLNRALTGIAVEQDKNTQEVFAQVKQIYKTPPIKDFGGFNFSQILPDPSKPSKRSFIEDLLFNKVTLADAGFIKQYGDCLGDIAARDLICAQKFNGLTVLPPLLTDEMIAQYCSALLAGTITSGWTFGAGAALQIPFAMQMAYRFNGIGVTQNVLYENQKLIANQFNSAIGKIQDSLSSTASALGKLQDVVNQNAQALNTLVKQLSSNFGAISSVLNDILSRLDKVEAEVQIDRLITGRLQSLQTYVTQQLIRAAEIRASANLAATKMSECVLGQSKRVDFCGKGYHLMSFPQCAPHGVVFLHVTYVPAQEKNFTTAPAICHDGKAHFPREGVFVSNGTHWFVTQRNFYEPQIITTDNTFVSGNCDVLIGIVNNTVYDPLQPELDSFKEELDKYFKNHTSPDVDLGDISGINASVVNIQKEIDRLNEVAKNLNESLIDLQELGKYEQYIK

SEQ ID NO: 2557 - protein, 1211 aa, Artificial Sequence
  SARS-CoV-2/Shenzhen/SZTH-004/2020__EPI_ISL_406595 spike protein (1-1211)(T874C_S1055C)
MFVFLVLLPLVSSQCVNLTTRTQLPPAYTNSFTRGVYYPDKVFRSSVLHSTQDLFLPFFSNVTWFHAIHVSGTNGTKRFDNPVLPFNDGVYFASTEKSNIIRGWIFGTTLDSKTQSLLIVNNATNVVIKVCEFQFCNDPFLGVYYHKNNKSWMESEFRVYSSANNCTFEYVSQPFLMDLEGKQGNFKNLREFVFKNIDGYFKIYSKHTPINLVRDLPQGFSALEPLVDLPIGINITRFQTLLALHRSYLTPGDSSSGWTAGAAAYYVGYLQPRTFLLKYNENGTITDAVDCALDPLSETKCTLKSFTVEKGIYQTSNFRVQPTESIVRFPNITNLCPFGEVFNATRFASVYAWDRKRISNCVAYYSVLYNSASFSTFKCYGVSPTKLNDLCFTNVYADSFVIRGDEVRQIAPGQTGKIADYNYKLPDDFTGCVIAWNSNNLDSKVGGNYNYLYRLFRKSNLKPFERDISTEIYQAGSTPCNGVEGFNCYFPLQSYGFQPTNGVGYQPYRVVVLSFELLHAPATVCGPKKSTNLVKNKCVNFNFNGLTGTGVLTESNKKFLPFQQFGRDIADTTDAVRDPQTLEILDITPCSFGGVSVITPGTNTSNQVAVLYQDVNCTEVPVAIHADQLTPTWRVYSTGSNVFQTRAGCLIGAEHVNNSYECDIPIGAGICASYQTQTNSPRRARSVASQSIIAYTMSLGAENSVAYSNNSIAIPTNFTISVTTEILPVSMTKTSVDCTMYICGDSTECSNLLLQYGSFCTQLNRALTGIAVEQDKNTQEVFAQVKQIYKTPPIKDFGGFNFSQILPDPSKPSKRSFIEDLLFNKVTLADAGFIKQYGDCLGDIAARDLICAQKFNGLTVLPPLLTDEMIAQYCSALLAGTITSGWTFGAGAALQIPFAMQMAYRFNGIGVTQNVLYENQKLIANQFNSAIGKIQDSLSSTASALGKLQDVVNQNAQALNTLVKQLSSNFGAISSVLNDILSRLDKVEAEVQIDRLITGRLQSLQTYVTQQLIRAAEIRASANLAATKMSECVLGQSKRVDFCGKGYHLMSFPQCAPHGVVFLHVTYVPAQEKNFTTAPAICHDGKAHFPREGVFVSNGTHWFVTQRNFYEPQIITTDNTFVSGNCDVVIGIVNNTVYDPLQPELDSFKEELDKYFKNHTSPDVDLGDISGINASVVNIQKEIDRLNEVAKNLNESLIDLQELGKYEQYIK

SEQ ID NO: 2558 - protein, 1211 aa, Artificial Sequence
  SARS-CoV-2/France/IDF0372/2020__EPI_ISL_406596 spike protein (1-1211)(T874C_S1055C)
MFVFLVLLPLVSSQCVNLTTRTQLPPAYTNSFTRGVYYPDKVFRSSVLHSTQDLFLPFFSNVTWFHAIHVSGTNGTKRFDNPVLPFNDGVYFASTEKSNIIRGWIFGTTLDSKTQSLLIVNNATNVVIKVCEFQFCNDPFLGVYYHKNNKSWMESEFRVYSSANNCTFEYVSQPFLMDLEGKQGNFKNLREFVFKNIDGYFKIYSKHTPINLVRDLPQGFSALEPLVDLPIGINITRFQTLLALHRSYLTPGDSSSGWTAGAAAYYVGYLQPRTFLLKYNENGTITDAVDCALDPLSETKCTLKSFTVEKGIYQTSNFRVQPTESIVRFPNITNLCPFGEVFNATRFASVYAWNRKRISNCVADYSFLYNSASFSTFKCYGVSPTKLNDLCFTNVYADSFVIRGDEVRQIAPGQTGKIADYNYKLPDDFTGCVIAWNSNNLDSKVGGNYNYLYRLFRKSNLKPFERDISTEIYQAGSTPCNGVEGFNCYFPLQSYGFQPTNGVGYQPYRVVVLSFELLHAPATVCGPKKSTNLVKNKCVNFNFNGLTGTGVLTESNKKFLPFQQFGRDIADTTDAVRDPQTLEILDITPCSFGGVSVITPGTNTSNQVAVLYQDVNCTEVPVAIHADQLTPTWRVYSTGSNVFQTRAGCLIGAEHVNNSYECDIPIGAGICASYQTQTNSPRRARSVASQSIIAYTMSLGAENSVAYSNNSIAIPTNFTISVTTEILPVSMTKTSVDCTMYICGDSTECSNLLLQYGSFCTQLNRALTGIAVEQDKNTQEVFAQVKQIYKTPPIKDFGGFNFSQILPDPSKPSKRSFIEDLLFNKVTLADAGFIKQYGDCLGDIAARDLICAQKFNGLTVLPPLLTDEMIAQYCSALLAGTITSGWTFGAGAALQIPFAMQMAYRFNGIGVTQNVLYENQKLIANQFNSAIGKIQDSLSSTASALGKLQDVVNQNAQALNTLVKQLSSNFGAISSVLNDILSRLDKVEAEVQIDRLITGRLQSLQTYVTQQLIRAAEIRASANLAATKMSECVLGQSKRVDFCGKGYHLMSFPQCAPHGVVFLHVTYVPAQEKNFTTAPAICHDGKAHFPREGVFVSNGTHWFVTQRNFYEPQIITTDNTFVSGNCDVVIGIVNNTVYDPLQPELDSFKEELDKYFKNHTSPDVDLGDISGINASVVNIQKEIDRLNEVAKNLNESLIDLQELGKYEQYIK

SEQ ID NO: 2559 - protein, 1211 aa, Artificial Sequence
  SARS-CoV-2/Australia/VIC01/2020__EPI_ISL_406844 spike protein (1-1211)(T874C_S1055C)
MFVFLVLLPLVSSQCVNLTTRTQLPPAYTNSFTRGVYYPDKVFRSSVLHSTQDLFLPFFSNVTWFHAIHVSGTNGTKRFDNPVLPFNDGVYFASTEKSNIIRGWIFGTTLDSKTQSLLIVNNATNVVIKVCEFQFCNDPFLGVYYHKNNKSWMESEFRVYSSANNCTFEYVSQPFLMDLEGKQGNFKNLREFVFKNIDGYFKIYSKHTPINLVRDLPQGFSALEPLVDLPIGINITRFQTLLALHRRYLTPGDSSSGWTAGAAAYYVGYLQPRTFLLKYNENGTITDAVDCALDPLSETKCTLKSFTVEKGIYQTSNFRVQPTESIVRFPNITNLCPFGEVFNATRFASVYAWNRKRISNCVADYSVLYNSASFSTFKCYGVSPTKLNDLCFTNVYADSFVIRGDEVRQIAPGQTGKIADYNYKLPDDFTGCVIAWNSNNLDSKVGGNYNYLYRLFRKSNLKPFERDISTEIYQAGSTPCNGVEGFNCYFPLQSYGFQPTNGVGYQPYRVVVLSFELLHAPATVCGPKKSTNLVKNKCVNFNFNGLTGTGVLTESNKKFLPFQQFGRDIADTTDAVRDPQTLEILDITPCSFGGVSVITPGTNTSNQVAVLYQDVNCTEVPVAIHADQLTPTWRVYSTGSNVFQTRAGCLIGAEHVNNSYECDIPIGAGICASYQTQTNSPRRARSVASQSIIAYTMSLGAENSVAYSNNSIAIPTNFTISVTTEILPVSMTKTSVDCTMYICGDSTECSNLLLQYGSFCTQLNRALTGIAVEQDKNTQEVFAQVKQIYKTPPIKDFGGFNFSQILPDPSKPSKRSFIEDLLFNKVTLADAGFIKQYGDCLGDIAARDLICAQKFNGLTVLPPLLTDEMIAQYCSALLAGTITSGWTFGAGAALQIPFAMQMAYRFNGIGVTQNVLYENQKLIANQFNSAIGKIQDSLSSTASALGKLQDVVNQNAQALNTLVKQLSSNFGAISSVLNDILSRLDKVEAEVQIDRLITGRLQSLQTYVTQQLIRAAEIRASANLAATKMSECVLGQSKRVDFCGKGYHLMSFPQCAPHGVVFLHVTYVPAQEKNFTTAPAICHDGKAHFPREGVFVSNGTHWFVTQRNFYEPQIITTDNTFVSGNCDVVIGIVNNTVYDPLQPELDSFKEELDKYFKNHTSPDVDLGDISGINASVVNIQKEIDRLNEVAKNLNESLIDLQELGKYEQYIK

SEQ ID NO: 2560 - protein, 1211 aa, Artificial Sequence
  SARS-CoV-2/Germany/BavPat1/2020__EPI_ISL_406862 spike protein (1-1211)(T874C_S1055C)
MFVFLVLLPLVSSQCVNLTTRTQLPPAYTNSFTRGVYYPDKVFRSSVLHSTQDLFLPFFSNVTWFHAIHVSGTNGTKRFDNPVLPFNDGVYFASTEKSNIIRGWIFGTTLDSKTQSLLIVNNATNVVIKVCEFQFCNDPFLGVYYHKNNKSWMESEFRVYSSANNCTFEYVSQPFLMDLEGKQGNFKNLREFVFKNIDGYFKIYSKHTPINLVRDLPQGFSALEPLVDLPIGINITRFQTLLALHRSYLTPGDSSSGWTAGAAAYYVGYLQPRTFLLKYNENGTITDAVDCALDPLSETKCTLKSFTVEKGIYQTSNFRVQPTESIVRFPNITNLCPFGEVFNATRFASVYAWNRKRISNCVADYSVLYNSASFSTFKCYGVSPTKLNDLCFTNVYADSFVIRGDEVRQIAPGQTGKIADYNYKLPDDFTGCVIAWNSNNLDSKVGGNYNYLYRLFRKSNLKPFERDISTEIYQAGSTPCNGVEGFNCYFPLQSYGFQPTNGVGYQPYRVVVLSFELLHAPATVCGPKKSTNLVKNKCVNFNFNGLTGTGVLTESNKKFLPFQQFGRDIADTTDAVRDPQTLEILDITPCSFGGVSVITPGTNTSNQVAVLYQGVNCTEVPVAIHADQLTPTWRVYSTGSNVFQTRAGCLIGAEHVNNSYECDIPIGAGICASYQTQTNSPRRARSVASQSIIAYTMSLGAENSVAYSNNSIAIPTNFTISVTTEILPVSMTKTSVDCTMYICGDSTECSNLLLQYGSFCTQLNRALTGIAVEQDKNTQEVFAQVKQIYKTPPIKDFGGFNFSQILPDPSKPSKRSFIEDLLFNKVTLADAGFIKQYGDCLGDIAARDLICAQKFNGLTVLPPLLTDEMIAQYCSALLAGTITSGWTFGAGAALQIPFAMQMAYRFNGIGVTQNVLYENQKLIANQFNSAIGKIQDSLSSTASALGKLQDVVNQNAQALNTLVKQLSSNFGAISSVLNDILSRLDKVEAEVQIDRLITGRLQSLQTYVTQQLIRAAEIRASANLAATKMSECVLGQSKRVDFCGKGYHLMSFPQCAPHGVVFLHVTYVPAQEKNFTTAPAICHDGKAHFPREGVFVSNGTHWFVTQRNFYEPQIITTDNTFVSGNCDVVIGIVNNTVYDPLQPELDSFKEELDKYFKNHTSPDVDLGDISGINASVVNIQKEIDRLNEVAKNLNESLIDLQELGKYEQYIK

SEQ ID NO: 2561 - protein, 1211 aa, Artificial Sequence
  SARS-CoV-2/Wuhan/HBCDC-HB-02/2020__EPI_ISL_412978 spike protein (1-1211)(T874C_S1055C)
MFVFLVLLPLVSSQCVNLTTRTQLPPAYTNSFTRGVYYPDKVFRSSVLHSTQDLFLPFFSNVTWFHAIHVSGTNGTKRFDNPVLPFNDGVYFASTEKSNIIRGWIFGTTLDSKTQSLLIVNNATNVVIKVCEFQFCNDPFLGVYYHKNNKSWMESEFRVYSSANNCTFEYVSQPFLMDLEGKQGNFKNLREFVFKNIDGYFKIYSKHTPINLVRDLPQGFSALEPLVDLPIGINITRFQTLLALHRSYLTPGDSSSGWTAGAAAYYVGYLQPRTFLLKYNENGTITDAVDCALDPLSETKCTLKSFTVEKGIYQTSNFRVQPTESIVRFPNITNLCPFGEVFNATRFASVYAWNRKRISNCVADYSVLYNSASFSTFKCYGVSPTKLNDLCFTNVYADSFVIRGDEVRQIAPGQTGKIADYNYKLPDDFTGCVIAWNSNNLDSKVGGNYNYLYRLFRKSNLKPFERDISTEIYQAGSTPCNGVEGFNCYFPLQSYGFQPTNGVGYQPYRVVVLSFELLHAPATVCGPKKSTNLVKNKCVNFNFNGLTGTGVLTESNKKFLPFQQFGRDIADTTDAVRDPQTLEILDITPCSFGGVSVITPGTNTSNQVAVLYQDVNCTEVPVAIHADQLTPTWRVYSTGSNVFQTRAGCLIGAEHVNNSYECDIPIGAGICASYQTQTNSPRRARSVASQSIIAYTMSLGAENSVAYSNNSIAIPTNFTISVTTEILPVSMTKTSVDCTMYICGDSTECSNFLLQYGSFCTQLNRALTGIAVEQDKNTQEVFAQVKQIYKTPPIKDFGGFNFSQILPDPSKPSKRSFIEDLLFNKVTLADAGFIKQYGDCLGDIAARDLICAQKFNGLTVLPPLLTDEMIAQYCSALLAGTITSGWTFGAGAALQIPFAMQMAYRFNGIGVTQNVLYENQKLIANQFNSAIGKIQDSLSSTASALGKLQDVVNQNAQALNTLVKQLSSNFGAISSVLNDILSRLDKVEAEVQIDRLITGRLQSLQTYVTQQLIRAAEIRASANLAATKMSECVLGQSKRVDFCGKGYHLMSFPQCAPHGVVFLHVTYVPAQEKNFTTAPAICHDGKAHFPREGVFVSNGTHWFVTQRNFYEPQIITTDNTFVSGNCDVVIGIVNNTVYDPLQPELDSFKEELDKYFKNHTSPDVDLGDISGINASVVNIQKEIDRLNEVAKNLNESLIDLQELGKYEQYIK

SEQ ID NO: 2562 - protein, 1211 aa, Artificial Sequence
  SARS-CoV-2/Australia/QLD02/2020__EPI_ISL_407896 spike protein (1-1211)(T874C_S1055C)
MFVFLVLLPLVSSQCVNLTTRTQLPPAYTNSFTRGVYYPDKVFRSSVLHSTQDLFLPFFSNVTWFHAIHVSGTNGTKRFDNPVLPFNDGVYFASTEKSNIIRGWIFGTTLDSKTQSLLIVNNATNVVIKVCEFQFCNDPFLGVYYHKNNKSWMESEFRVYSSANNCTFEYVSQPFLMDLEGKQGNFKNLREFVFKNIDGYFKIYSKHTPINLVRDLPQGFSALEPLVDLPIGINITRFQTLLALHRSYLTPGDSSSGWTAGAAAYYVGYLQPRTFLLKYNENGTITDAVDCALDPLSETKCTLKSFTVEKGIYQTSNFRVQPTESIVRFPNITNLCPFGEVFNATRFASVYAWNRKRISNCVADYSVLYNSASFSTFKCYGVSPTKLNDLCFTNVYADSFVIRGDEVRQIAPGQTGKIADYNYKLPDDFTGCVIAWNSNNLDSKVGGNYNYLYRLFRKSNLKPFERDISTEIYQAGSTPCNGVEGFNCYFPLQSYGFQPTNGVGYQPYRVVVLSFELLHAPATVCGPKKSTNLVKNKCVNFNFNGLTGTGVLTESNKKFLPFQQFGRDIADTTDAVRDPQTLEILDITPCSFGGVSVITPGTNTSNQVAVLYQDVNCTEVPVAIHADQLTPTWRVYSTGSNVFQTRAGCLIGAEHVNNSYECDIPIGAGICASYQTQTNSPRRARSVASQSIIAYTMSLGAENSVAYSNNSIAIPTNFTISVTTEILPVSMTKTSVDCTMYICGDSTECSNLLLQYGSFCTQLNRALTGIAVEQDKNTQEVFAQVKQIYKTPPIKDFGGFNFSQILPDPSKPSKRSFIEDLLFNKVTLADAGFIKQYGDCLGDIAARDLICAQKFNGLTVLPPLLTDEMIAQYCSALLAGTITSGWTFGAGAALQIPFAMQMAYRFNGIGVTQNVLYENQKLIANQFNSAIGKIQDSLSSTASALGKLQDVVNQNAQALNTLVKQLSSNFGAISSVLNDILSRLDKVEAEVQIDRLITGRLQSLQTYVTQQLIRAAEIRASANLAATKMSECVLGQSKRVDFCGKGYHLMSFPQCAPHGVVFLHVTYVPAQEKNFTTAPAICHDGKAHFPREGVFVSNGTHWFVTQRNFYEPQIITTDNTFVSGNCDVVIGIVNNTVYDPLQLELDSFKEELDKYFKNHTSPDVDLGDISGINASVVNIQKEIDRLNEVAKNLNESLIDLQELGKYEQYIK

SEQ ID NO: 2563 - protein, 1211 aa, Artificial Sequence
  SARS-CoV-2/India/1-31/2020__EPI_ISL_413523 spike protein (1-1211)(T874C_S1055C)
MFVFLVLLPLVSSQCVNLTTRTQLPPAYTNSFTRGVYYPDKVFRSSVLHSTQDLFLPFFSNVTWFHAIHVSGTNGTKRFDNPVLPFNDGVYFASTEKSNIIRGWIFGTTLDSKTQSLLIVNNATNVVIKVCEFQFCNDPFLGVYYHKNNKSWMESEFRVYSSANNCTFEYVSQPFLMDLEGKQGNFKNLREFVFKNIDGYFKIYSKHTPINLVRDLPQGFSALEPLVDLPIGINITRFQTLLALHRSYLTPGDSSSGWTAGAAAYYVGYLQPRTFLLKYNENGTITDAVDCALDPLSETKCTLKSFTVEKGIYQTSNFRVQPTESIVRFPNITNLCPFGEVFNATRFASVYAWNRKRISNCVADYSVLYNSASFSTFKCYGVSPTKLNDLCFTNVYADSFVIRGDEVRQIAPGQTGKIADYNYKLPDDFTGCVIAWNSNNLDSKVGGNYNYLYRLFRKSNLKPFERDISTEIYQAGSTPCNGVEGFNCYFPLQSYGFQPTNGVGYQPYRVVVLSFELLHAPATVCGPKKSTNLVKNKCVNFNFNGLTGTGVLTESNKKFLPFQQFGRDIADTTDAVRDPQTLEILDITPCSFGGVSVITPGTNTSNQVAVLYQDVNCTEVPVAIHADQLTPTWRVYSTGSNVFQTRAGCLIGAEHVNNSYECDIPIGAGICASYQTQTNSPRRARSVASQSIIAYTMSLGAENSVAYSNNSIAIPTNFTISVTTEILPVSMTKTSVDCTMYICGDSTECSNLLLQYGSFCTQLNRALTGIAVEQDKNTQEVFAQVKQIYKTPPIKDFGGFNFSQILPDPSKPSKRSFIEDLLFNKVTLADAGFIKQYGDCLGDIAARDLICAQKFNGLTVLPPLLTDEMIAQYCSALLAGTITSGWTFGAGAALQIPFAMQMAYRFNGIGVTQNVLYENQKLIANQFNSVIGKIQDSLSSTASALGKLQDVVNQNAQALNTLVKQLSSNFGAISSVLNDILSRLDKVEAEVQIDRLITGRLQSLQTYVTQQLIRAAEIRASANLAATKMSECVLGQSKRVDFCGKGYHLMSFPQCAPHGVVFLHVTYVPAQEKNFTTAPAICHDGKAHFPREGVFVSNGTHWFVTQRNFYEPQIITTDNTFVSGNCDVVIGIVNNTVYDPLQPELDSFKEELDKYFKNHTSPDVDLGDISGINASVVNIQKEIDRLNEVAKNLNESLIDLQELGKYEQYIK

SEQ ID NO: 2564 - protein, 1211 aa, Artificial Sequence
  SARS-CoV-2/Guangdong/GD2020087-P0008/2020__EPI_ISL_413863 spike protein (1-1211)(T874C_S1055C)
MFVFLVLLPLVSSQCVNLTTRTQLPPAYTNSFTRGVYYPDKVFRSSVLHSTQDLFLPFFSNVTWFHAIHVSGTNGTKRFDNPVLPFNDGVYFASTEKSNIIRGWIFGTTLDSKTQSLLIVNNATNVVIKVCEFQFCNDPFLGVYYHKNNKSWMESEFRVYSSANNCTFEYVSQPFLMDLEGKQGNFKNLREFVFKNIDGYFKIYSKHTPINLVRDLPQGFSALEPLVDLPIGINITRFQTLLALHRSYLTPGDSSSGWTAGAAAYYVGYLQPRTFLLKYNENGTITDAVDCALDPLSETKCTLKSFTVEKGIYQTSNFRVQPTESIVRFPNITNLCPFGEVFNATRFASVYAWNRKRISNCVADYSVLYNSASFSTFKCYGVSPTKLNDLCFTNVYADSFVIRGDEVREIAPGQTGKIADYNYKLPDDFTGCVIAWNSNNLDSKVGGNYNYLYRLFRKSNLKPFERDISTEIYQAGSTPCNGVEGFNCYFPLQSYGFQPTNGVGYQPYRVVVLSFELLHAPATVCGPKKSTNLVKNKCVNFNFNGLTGTGVLTESNKKFLPFQQFGRDIADTTDAVRDPQTLEILDITPCSFGGVSVITPGTNTSNQVAVLYQDVNCTEVPVAIHADQLTPTWRVYSTGSNVFQTRAGCLIGAEHVNNSYECDIPIGAGICASYQTQTNSPRRARSVASQSIIAYTMSLGAENSVAYSNNSIAIPTNFTISVTTEILPVSMTKTSVDCTMYICGDSTECSNLLLQYGSFCTQLNRALTGIAVEQDKNTQEVFAQVKQIYKTPPIKDFGGFNFSQILPDPSKPSKRSFIEDLLFNKVTLADAGFIKQYGDCLGDIAARDLICAQKFNGLTVLPPLLTDEMIAQYCSALLAGTITSGWTFGAGAALQIPFAMQMAYRFNGIGVTQNVLYENQKLIANQFNSAIGKIQDSLSSTASALGKLQDVVNQNAQALNTLVKQLSSNFGAISSVLNDILSRLDKVEAEVQIDRLITGRLQSLQTYVTQQLIRAAEIRASANLAATKMSECVLGQSKRVDFCGKGYHLMSFPQCAPHGVVFLHVTYVPAQEKNFTTAPAICHDGKAHFPREGVFVSNGTHWFVTQRNFYEPQIITTDNTFVSGNCDVVIGIVNNTVYDPLQPELDSFKEELDKYFKNHTSPDVDLGDISGINASVVNIQKEIDRLNEVAKNLNESLIDLQELGKYEQYIK

SEQ ID NO: 2565 - protein, 1211 aa, Artificial Sequence
  SARS-CoV-2/Sweden/01/2020__EPI_ISL_411951 spike protein (1-1211)(T874C_S1055C)
MFVFLVLLPLVSSQCVNLTTRTQLPPAYTNSFTRGVYYPDKVFRSSVLHSTQDLFLPFFSNVTWFHAIHVSGTNGTKRFDNPVLPFNDGVYFASTEKSNIIRGWIFGTTLDSKTQSLLIVNNATNVVIKVCEFQFCNDPFLGVYYHKNNKSWMESEFRVYSSANNCTFEYVSQPFLMDLEGKQGNFKNLREFVFKNIDGYFKIYSKHTPINLVRDLPQGFSALEPLVDLPIGINITRFQTLLALHRSYLTPGDSSSGWTAGAAAYYVGYLQPRTFLLKYNENGTITDAVDCALDPLSETKCTLKSFTVEKGIYQTSNFRVQPTESIVRFPNITNLCPFGEVFNATRFASVYAWNRKRISNCVADYSVLYNSASFSTFKCYGVSPTKLNDLCFTNVYADSFVIRGDEVRQIAPGQTGKIADYNYKLPDDFTGCVIAWNSNNLDSKVGGNYNYLYRLFRKSNLKPFERDISTEIYQAGSTPCNGVEGFNCYFPLQSYGFQPTNGVGYQPYRVVVLSFELLHAPATVCGPKKSTNLVKNKCVNFNFNGLTGTGVLTESNKKFLPFQQFGRDIADTTDAVRDPQTLEILDITPCSFGGVSVITPGTNTSNQVAVLYQDVNCTEVPVAIHADQLTPTWRVYSTGSNVFQTRAGCLIGAEHVNNSYECDIPIGAGICASYQTQTNSPRRARSVASQSIIAYTMSLGAENSVAYSNNSIAIPTNFTISVTTEILPVSMTKTSVDCTMYICGDSTECSNLLLQYGSFCTQLNRALTGIAVEQDKNTQEVFAQVKQIYKTPPIKDCGGFNFSQILPDPSKPSKRSFIEDLLFNKVTLADAGFIKQYGDCLGDIAARDLICAQKFNGLTVLPPLLTDEMIAQYCSALLAGTITSGWTFGAGAALQIPFAMQMAYRFNGIGVTQNVLYENQKLIANQFNSAIGKIQDSLSSTASALGKLQDVVNQNAQALNTLVKQLSSNFGAISSVLNDILSRLDKVEAEVQIDRLITGRLQSLQTYVTQQLIRAAEIRASANLAATKMSECVLGQSKRVDFCGKGYHLMSFPQCAPHGVVFLHVTYVPAQEKNFTTAPAICHDGKAHFPREGVFVSNGTHWFVTQRNFYEPQIITTDNTFVSGNCDVVIGIVNNTVYDPLQPELDSFKEELDKYFKNHTSPDVDLGDISGINASVVNIQKEIDRLNEVAKNLNESLIDLQELGKYEQYIK

SEQ ID NO: 2566 - protein, 1211 aa, Artificial Sequence
  SARS-CoV-2/Tianmen/HBCDC-HB-07/2020__EPI_ISL_412983 spike protein (1-1211)(T874C_S1055C)
MFVFLVLLPLVSSQCVNLTTRTQLPPAYTNSFTRGVYYPDKVFRSSVLHSTQDLFLPFFSNVTWFHAIHVSGTNGTKRFDNPVLPFNDGVYFASTEKSNIIRGWIFGTTLDSKTQSLLIVNNATNVVIKVCEFQFCNDPFLGVYYHKNNKSWMESEFRVYSSANNCTFEYVSQPFLMDLEGKQGNFKNLREFVFKNIDGYFKIYSKHTPINLVRDLPQGFSALEPLVDLPIGINITRFQTLLALHRSYLTPGDSSSGWTAGAAAYYVGYLQPRTFLLKYNENGTITDAVDCALDPLSETKCTLKSFTVEKGIYQTSNFRVQPTESIVRFPNITNLCPFGEVFNATRFASVYAWNRKRISNCVADYSVLYNSASFSTFKCYGVSPTKLNDLCFTNVYADSFVIRGDEVRQIAPGQTGKIADYNYKLPDDFTGCVIAWNSNNLDSKVGGNYNYLYRLFRKSNLKPFERDISTEIYQAGSTPCNGVEGFNCYFPLQSYGFQPTNGVGYQPYRVVVLSFELLHAPATVCGPKKSTNLVKNKCVNFNFNGLTGTGVLTESNKKFLPFQQFGRDIADTTDAVRDPQTLEILDITPCSFGGVSVITPGTNTSNQVAVLYQDLNCTEVPVAIHADQLTPTWRVYSTGSNVFQTRAGCLIGAEHVNNSYECDIPIGAGICASYQTQTNSPRRARSVASQSIIAYTMSLGAENSVAYSNNSIAIPTNFTISVTTEILPVSMTKTSVDCTMYICGDSTECSNLLLQYGSFCTQLNRALTGIAVEQDKNTQEVFAQVKQIYKTPPIKDFGGFNFSQILPDPSKPSKRSFIEDLLFNKVTLADAGFIKQYGDCLGDIAARDLICAQKFNGLTVLPPLLTDEMIAQYCSALLAGTITSGWTFGAGAALQIPFAMQMAYRFNGIGVTQNVLYENQKLIANQFNSAIGKIQDSLSSTASALGKLQDVVNQNAQALNTLVKQLSSNFGAISSVLNDILSRLDKVEAEVQIDRLITGRLQSLQTYVTQQLIRAAEIRASANLAATKMSECVLGQSKRVDFCGKGYHLMSFPQCAPHGVVFLHVTYVPAQEKNFTTAPAICHDGKAHFPREGVFVSNGTHWFVTQRNFYEPQIITTDNTFVSGNCDVVIGIVNNTVYDPLQPELDSFKEELDKYFKNHTSPDVDLGDISGINASVVNIQKEIDRLNEVAKNLNESLIDLQELGKYEQYIK

SEQ ID NO: 2567 - protein, 1211 aa, Artificial Sequence
  SARS-CoV-2/Hong Kong/case42_VM20002493/2020__EPI_ISL_414527 spike protein (1-1211)(T874C_S1055C)
MFVFLVLLPLVSSQCVNLTTRTQLPPAYTNSFTRGVYYPDKVFRSSVLHSTQDLFLPFFSNVTWFHAIHVSGTNGTKRFDNPVLPFNDGVYFASTEKSNIIRGWIFGTTLDSKTQSLLIVNNATNVVIKVCEFQFCNDPFLGVYYHKNNKSWMESEFRVYSSANNCTFEYVSQPFLMDLEGKQGNFKNLREFVFKNIDGYFKIYSKHTPINLVRDLPQGFSALEPLVDLPIGINITRFQTLLALHRSYLTPGDSSSGWTAGAAAYYVGYLQPRTFLLKYNENGTITDAVDCALDPLSETKCTLKSFTVEKGIYQTSNFRVQPTESIVRFPNITNLCPFGEVFNATRFASVYAWNRKRISNCVADYSVLYNSASFSTFKCYGVSPTKLNDLCFTNVYADSFVIRGDEVRQIAPGQTGKIADYNYKLPDDFTGCVIAWNSNNLDSKVGGNYNYLYRLFRKSNLKPFERDISTEIYQAGSTPCNGVEGFNCYFPLQSYGFQPTNGVGYQPYRVVVLSFELLHAPATVCGPKKSTNLVKNKCVNFNFNGLTGTGVLTESNKKFLPFQQFGRDIADTTDAVRDPQTLEILDITPCSFGGVSVITPGTNTSNQVAVLYQDVNCTEVPVAIHADQLTPTWRVYSTGSNVFQTRAGCLIGAEHVNNSYECDIPIGAGICASYQTQTNSPRRARSVASQSIIAYTMSLGAENSVAYSNNSIAIPTNFAISVTTEILPVSMTKTSVDCTMYICGDSTECSNLLLQYGSFCTQLNRALTGIAVEQDKNTQEVFAQVKQIYKTPPIKDFGGFNFSQILPDPSKPSKRSFIEDLLFNKVTLADAGFIKQYGDCLGDIAARDLICAQKFNGLTVLPPLLTDEMIAQYCSALLAGTITSGWTFGAGAALQIPFAMQMAYRFNGIGVTQNVLYENQKLIANQFNSAIGKIQDSLSSTASALGKLQDVVNQNAQALNTLVKQLSSNFGAISSVLNDILSRLDKVEAEVQIDRLITGRLQSLQTYVTQQLIRAAEIRASANLAATKMSECVLGQSKRVDFCGKGYHLMSFPQCAPHGVVFLHVTYVPAQEKNFTTAPAICHDGKAHFPREGVFVSNGTHWFVTQRNFYEPQIITTDNTFVSGNCDVVIGIVNNTVYDPLQPELDSFKEELDKYFKNHTSPDVDLGDISGINASVVNIQKEIDRLNEVAKNLNESLIDLQELGKYEQYIK

SEQ ID NO: 2568 - protein, 1211 aa, Artificial Sequence
  SARS-CoV-2/USA/CruiseA-23/2020__EPI_ISL_414482 spike protein (1-1211)(T874C_S1055C)
MFVFLVLLPLVSSQCVNLTTRTQLPPAYTNSFTRGVYYPDKVFRSSVLHSTQDLFLPFFSNVTWFHAIHVSGTNGTKRFDNPVLPFNDGVYFASTEKSNIIRGWIFGTTLDSKTQSLLIVNNATNVVIKVCEFQFCNDPFLGVYYHKNNKSWMESEFRVYSSANNCTFEYVSQPFLMDLEVKQGNFKNLREFVFKNIDGYFKIYSKHTPINLVRDLPQGFSALEPLVDLPIGINITRFQTLLALHRSYLTPGDSSSGWTAGAAAYYVGYLQPRTFLLKYNENGTITDAVDCALDPLSETKCTLKSFTVEKGIYQTSNFRVQPTESIVRFPNITNLCPFGEVFNATRFASVYAWNRKRISNCVADYSVLYNSASFSTFKCYGVSPTKLNDLCFTNVYADSFVIRGDEVRQIAPGQTGKIADYNYKLPDDFTGCVIAWNSNNLDSKVGGNYNYLYRLFRKSNLKPFERDISTEIYQAGSTPCNGVEGFNCYFPLQSYGFQPTNGVGYQPYRVVVLSFELLHAPATVCGPKKSTNLVKNKCVNFNFNGLTGTGVLTESNKKFLPFQQFGRDIADTTDAVRDPQTLEILDITPCSFGGVSVITPGTNTSNQVAVLYQDVNCTEVPVAIHADQLTPTWRVYSTGSNVFQTRAGCLIGAEHVNNSYECDIPIGAGICASYQTQTNSPRRARSVASQSIIAYTMSLGAENSVAYSNNSIAIPTNFTISVTTEILPVSMTKTSVDCTMYICGDSTECSNLLLQYGSFCTQLNRALTGIAVEQDKNTQEVFAQVKQIYKTPPIKDFGGFNFSQILPDPSKPSKRSFIEDLLFNKVTLADAGFIKQYGDCLGDIAARDLICAQKFNGLTVLPPLLTDEMIAQYCSALLAGTITSGWTFGAGAALQIPFAMQMAYRFNGIGVTQNVLYENQKLIANQFNSAIGKIQDSLSSTASALGKLQDVVNQNAQALNTLVKQLSSNFGAISSVLNDILSRLDKVEAEVQIDRLITGRLQSLQTYVTQQLIRAAEIRASANLAATKMSECVLGQSKRVDFCGKGYHLMSFPQCAPHGVVFLHVTYVPAQEKNFTTAPAICHDGKAHFPREGVFVSNGTHWFVTQRNFYEPQIITTDNTFVSGNCDVVIGIVNNTVYDPLQPELDSFKEELDKYFKNHTSPDVDLGDISGINASVVNIQKEIDRLNEVAKNLNESLIDLQELGKYEQYIK

SEQ ID NO: 2569 - protein, 1211 aa, Artificial Sequence
  SARS-CoV-2/Hong Kong/case85_VM20002868/2020__EPI_ISL_414519 spike protein (1-1211)(T874C_S1055C)
MFVFLVLVPLVSSQCVNLTTRTQLPPAYTNSFTRGVYYPDKVFRSSVLHSTQDLFLPFFSNVTWFHAIHVSGTNGTKRFDNPVLPFNDGVYFASTEKSNIIRGWIFGTTLDSKTQSLLIVNNATNVVIKVCEFQFCNDPFLGVYYHKNNKSWMESEFRVYSSANNCTFEYVSQPFLMDLEGKQGNFKNLREFVFKNIDGYFKIYSKHTPINLVRDLPQGFSALEPLVDLPIGINITRFQTLLALHRSYLTPGDSSSGWTAGAAAYYVGYLQPRTFLLKYNENGTITDAVDCALDPLSETKCTLKSFTVEKGIYQTSNFRVQPTESIVRFPNITNLCPFGEVFNATRFASVYAWNRKRISNCVADYSVLYNSASFSTFKCYGVSPTKLNDLCFTNVYADSFVIRGDEVRQIAPGQTGKIADYNYKLPDDFTGCVIAWNSNNLDSKVGGNYNYLYRLFRKSNLKPFERDISTEIYQAGSTPCNGVEGFNCYFPLQSYGFQPTNGVGYQPYRVVVLSFELLHAPATVCGPKKSTNLVKNKCVNFNFNGLTGTGVLTESNKKFLPFQQFGRDIADTTDAVRDPQTLEILDITPCSFGGVSVITPGTNTSNQVAVLYQDVNCTEVPVAIHADQLTPTWRVYSTGSNVFQTRAGCLIGAEHVNNSYECDIPIGAGICASYQTQTNSPRRARSVASQSIIAYTMSLGAENSVAYSNNSIAIPTNFTISVTTEILPVSMTKTSVDCTMYICGDSTECSNLLLQYGSFCTQLNRALTGIAVEQDKNTQEVFAQVKQIYKTPPIKDFGGFNFSQILPDPSKPSKRSFIEDLLFNKVTLADAGFIKQYGDCLGDIAARDLICAQKFNGLTVLPPLLTDEMIAQYCSALLAGTITSGWTFGAGAALQIPFAMQMAYRFNGIGVTQNVLYENQKLIANQFNSAIGKIQDSLSSTASALGKLQDVVNQNAQALNTLVKQLSSNFGAISSVLNDILSRLDKVEAEVQIDRLITGRLQSLQTYVTQQLIRAAEIRASANLAATKMSECVLGQSKRVDFCGKGYHLMSFPQCAPHGVVFLHVTYVPAQEKNFTTAPAICHDGKAHFPREGVFVSNGTHWFVTQRNFYEPQIITTDNTFVSGNCDVVIGIVNNTVYDPLQPELDSFKEELDKYFKNHTSPDVDLGDISGINASVVNIQKEIDRLNEVAKNLNESLIDLQELGKYEQYIK

SEQ ID NO: 2570 - protein, 1211 aa, Artificial Sequence; identical to SEQ ID NO: 2560
  SARS-CoV-2/England/200990660/2020__EPI_ISL_414523 spike protein (1-1211)(T874C_S1055C)

SEQ ID NO: 2571 - protein, 1211 aa, Artificial Sequence
  SARS-CoV-2/Australia/NSW09/2020__EPI_ISL_413595 spike protein (1-1211)(T874C_S1055C)
MFVFLVLLPLVSSQCVNLTTRTQLPPAYTNSFTRGVYYPDKVFRSSVLHSTQDLFLPFFSNVTWFHAIHVSGTNGTKRFDNPVLPFNDGVYFASTEKSNIIRGWIFGTTLDSKTQSLLIVNNATNVVIKVCEFQFCNDPFLGVYYHKNNKSWMESEFRVYSSANNCTFEYVSQPFLMDLEGKQGNFKNLREFVFKNIDGYFKIYSKHTPINLVRDLPQGFSALEPLVDLPIGINITRFQTLLALHRSYLTPGDSSSGWTAGAAAYYVGYLQPRTFLLKYNENGTITDAVDCALDPLSETKCTLKSFTVEKGIYQTSNFRVQPTESIVRFPNITNLCPFGEVFNATRFASVYAWNRKRISNCVADYSVLYNSASFSTFKCYGVSPTKLNDLCFTNVYADSFVIRGDEVRQIAPGQTGKIADYNYKLPDDFTGCVIAWNSNNLDSKVGGNYNYLYRLFRKSNLKPFERDISTEIYQAGSTPCNGVEGFNCYFPLQSYGFQPTNGVGYQPYRVVVLSFELLHAPATVCGPKKSTNLVKNKCVNFNFNGLTGTGVLTESNKKFLPFQQFGRDIADTTDAVRDPQTLEILDITPCSFGGVSVITPGTNTSNQVAVLYQDVNCTEVPVAIHADQLTPTWRVYSTGSNVFQTRAGCLIGAEHVNNSYECDIPIGAGICASYQTQTNSPRRARSVASQSIIAYTMSLGAENSVAYSNNSIAIPTNFTISVTTEILPVSMTKTSVDCTMYICGDSTECSNLLLQYGSFCTQLNRALTGIAVEQDKNTQEVFAQVKQIYKTPPIKDFGGFNFSQILPDPSKPSKRSFIEDLLFNKVTLADAGFIKQYGDCLGDIAARDLICAQKFNGLTVLPPLLTDEMIAQYCSALLAGTITSGWTFGAGAALQIPFAMQMAYRFNGIGVTQNVLYENQKLIANQFNSAIGKIQDSLSFTASALGKLQDVVNQNAQALNTLVKQLSSNFGAISSVLNDILSRLDKVEAEVQIDRLITGRLQSLQTYVTQQLIRAAEIRASANLAATKMSECVLGQSKRVDFCGKGYHLMSFPQCAPHGVVFLHVTYVPAQEKNFTTAPAICHDGKAHFPREGVFVSNGTHWFVTQRNFYEPQIITTDNTFVSGNCDVVIGIVNNTVYDPLQPELDSFKEELDKYFKNHTSPDVDLGDISGINASVVNIQKEIDRLNEVAKNLNESLIDLQELGKYEQYIK

SEQ ID NO: 2572 - protein, 1211 aa, Artificial Sequence; identical to SEQ ID NO: 2552
  SARS-CoV-2/Australia/NSW10/2020__EPI_ISL_413596 spike protein (1-1211)(T874C_S1055C)

SEQ ID NO: 2573 - protein, 1211 aa, Artificial Sequence
  SARS-CoV-2/Switzerland/1000477797/2020__EPI_ISL_413023 spike protein (1-1211)(T874C_S1055C)
MFVFLVLLPLVSSQCVNLTTRTQLPPAYTNSFTRGVYYPDKVFRSSVLHSTQDLFLPFFSNVTWFHAIHVSGTNGTKRFDNPVLPFNDGVYFASTEKSNIIRGWIFGTTLDSKTQSLLIVNNATNVVIKVCEFQFCNDPFLGVYYHKNNKSWMESEFRVYSSANNCTFEYVSQPFLMDLEGKQGNFKNLREFVFKNIDGYFNIYSKHTPINLVRDLPQGFSALEPLVDLPIGINITRFQTLLALHRSYLTPGDSSSGWTAGAAAYYVGYLQPRTFLLKYNENGTITDAVDCALDPLSETKCTLKSFTVEKGIYQTSNFRVQPTESIVRFPNITNLCPFGEVFNATRFASVYAWNRKRISNCVADYSVLYNSASFSTFKCYGVSPTKLNDLCFTNVYADSFVIRGDEVRQIAPGQTGKIADYNYKLPDDFTGCVIAWNSNNLDSKVGGNYNYLYRLFRKSNLKPFERDISTEIYQAGSTPCNGVEGFNCYFPLQSYGFQPTNGVGYQPYRVVVLSFELLHAPATVCGPKKSTNLVKNKCVNFNFNGLTGTGVLTESNKKFLPFQQFGRDIADTTDAVRDPQTLEILDITPCSFGGVSVITPGTNTSNQVAVLYQGVNCTEVPVAIHADQLTPTWRVYSTGSNVFQTRAGCLIGAEHVNNSYECDIPIGAGICASYQTQTNSPRRARSVASQSIIAYTMSLGAENSVAYSNNSIAIPTNFTISVTTEILPVSMTKTSVDCTMYICGDSTECSNLLLQYGSFCTQLNRALTGIAVEQDKNTQEVFAQVKQIYKTPPIKDFGGFNFSQILPDPSKPSKRSFIEDLLFNKVTLADAGFIKQYGDCLGDIAARDLICAQKFNGLTVLPPLLTDEMIAQYCSALLAGTITSGWTFGAGAALQIPFAMQMAYRFNGIGVTQNVLYENQKLIANQFNSAIGKIQDSLSSTASALGKLQDVVNQNAQALNTLVKQLSSNFGAISSVLNDILSRLDKVEAEVQIDRLITGRLQSLQTYVTQQLIRAAEIRASANLAATKMSECVLGQSKRVDFCGKGYHLMSFPQCAPHGVVFLHVTYVPAQEKNFTTAPAICHDGKAHFPREGVFVSNGTHWFVTQRNFYEPQIITTDNTFVSGNCDVVIGIVNNTVYDPLQPELDSFKEELDKYFKNHTSPDVDLGDISGINASVVNIQKEIDRLNEVAKNLNESLIDLQELGKYEQYIK

SEQ ID NO: 2574 - protein, 1211 aa, Artificial Sequence
  SARS-CoV-2/Belgium/BA-02291/2020__EPI_ISL_415159 spike protein (1-1211)(T874C_S1055C)
MFVFLVLLPLVSSQCVNLTTRTQLPPAYTNSFTRGVYYPDKVFRSSVLHSTQDLFLPFFSNVTWFHAIHVSGTNGTKRFDNPVLPFNDGVYFASTEKSNIIRGWIFGTTLDSKTQSLLIVNNATNVVIKVCEFQFCNDPFLGVYYHKNNKSWMESEFRVYSSANNCTFEYVSQPFLMDLEGKQGNFKNLREFVFKNIDGYFKIYSKHTPINLVRDLPQGFSALEPLVDLPIGINITRFQTLLALHRSYLTPGDSSSGWTAGAAAYYVGYLQPRTFLLKYNENGTITDAVDCALDPLSETKCTLKSFTVEKGIYQTSNFRVQPTESIVRFPNITNLCPFGEVFNATRFASVYAWNRKRISNCVADYSVLYNSASFSTFKCYGVSPTKLNDLCFTNVYADSFVIRGDEVRQIAPGQTGKIADYNYKLPDDFTGCVIAWNSNNLDSKVGGNYNYLYRLFRRSNLKPFERDISTEIYQAGSTPCNGVEGFNCYFPLQSYGFQPTNGVGYQPYRVVVLSFELLPAPATVCGPKKSTNLVKNKCVNFNFNGLTGTGVLTESNKKFLPFQQFGRDIADTTDAVRDPQTLEILDITPCSFGGVSVITPGTNTSNQVAVLYQGVNCTEVPVAIHADQLTPTWRVYSTGSNVFQTRAGCLIGAEHVNNSYECDIPIGAGICASYQTQTNSPRRARSVASQSIIAYTMSLGAENSVAYSNNSIAIPTNFTISVTTEILPVSMTKTSVDCTMYICGDSTECSNLLLQYGSFCTQLNRALTGIAVEQDKNTQEVFAQVKQIYKTPPIKDFGGFNFSQILPDPSKPSKRSFIEDLLFNKVTLADAGFIKQYGDCLGDIAARDLICAQKFNGLTVLPPLLTDEMIAQYCSALLAGTITSGWTFGAGAALQIPFAMQMAYRFNGIGVTQNVLYENQKLIANQFNSAIGKIQDSLSSAAPALGKLQDVVNQNAQALNTLVKQLSSNFGAISSVLNDILSRLDKVEAEVQIDRLITGRLQSLQTYVTQQLIRAAEIRASANLAATKMSECVLGQSKRVDFCGKGYHLMSFPQCAPHGVVFLHVTYVPAQEKNFTTAPAICHDGKAHFPREGVFVSNGTHWFVTQRNFYEPQIITTDNTFVSGNCDVVIGIVNNTVYDPLQPELDSFKEELDKYFKNHTSPDVDLGDISGINASVVNIQKEIDRLNEVAKNLNESLIDLQELGKYEQYIK

SEQ ID NO: 2575 - protein, 1211 aa, Artificial Sequence
  SARS-CoV-2/USA/WA8-UW5/2020__EPI_ISL_413486 spike protein (1-1211)(T874C_S1055C)
MFVFLVLLPLVSSQCVNLTTRTQLPPAYTNSFTRGVYYPDKVFRSSVLHSTQDLFLPFFSNVTWFHAIHVSGTNGTKRFDNPVLPFNDGVYFASTEKSNIIRGWIFGTTLDSKTQSLLIVNNATNVVIKVCEFQFCNDPFLGVYYHKNNKSWMESEFRVYSSANNCTFEYVSQPFLMDLEGKQGNFKNLREFVFKNIDGYFKIYSKHTPINLVRDLPQGFSALEPLVDLPIGINITRFQTLLALHRSYLTPGDSSSGWTAGAAAYYVGYLQPRTFLLKYNENGTITDAVDCALDPLSETKCTLKSFTVEKGIYQTSNFRVQPTESIVRFPNITNLCPFGEVFNATRFASVYAWNRKRISNCVADYSVLYNSASFSTFKCYGVSPTKLNDLCFTNVYADSFVIRGDEVRQIAPGQTGKIADYNYKLPDDFTGCVIAWNSNNLDSKVGGNYNYLYRLFRKSNLKPFERDISTEIYQAGSTPCNGVEGFNCYFPLQSYGFQPTNGVGYQPYRVVVLSFELLHAPATVCGPKKSTNLVKNKCVNFNFNGLTGTGVLTESNKKFLPFQQFGRDIADTTDAVRDPQTLEILDITPCSFGGVSVITPGTNTSNQVAVLYQDVNCTEVPVAIHADQLTPTWRVYSTGSNVFQTRAGCLIGAEYVNNSYECDIPIGAGICASYQTQTNSPRRARSVASQSIIAYTMSLGAENSVAYSNNSIAIPTNFTISVTTEILPVSMTKTSVDCTMYICGDSTECSNLLLQYGSFCTQLNRALTGIAVEQDKNTQEVFAQVKQIYKTPPIKDFGGFNFSQILPDPSKPSKRSFIEDLLFNKVTLADAGFIKQYGDCLGDIAARDLICAQKFNGLTVLPPLLTDEMIAQYCSALLAGTITSGWTFGAGAALQIPFAMQMAYRFNGIGVTQNVLYENQKLIANQFNSAIGKIQDSLSSTASALGKLQDVVNQNAQALNTLVKQLSSNFGAISSVLNDILSRLDKVEAEVQIDRLITGRLQSLQTYVTQQLIRAAEIRASANLAATKMSECVLGQSKRVDFCGKGYHLMSFPQCAPHGVVFLHVTYVPAQEKNFTTAPAICHDGKAHFPREGVFVSNGTHWFVTQRNFYEPQIITTDNTFVSGNCDVVIGIVNNTVYDPLQPELDSFKEELDKYFKNHTSPDVDLGDISGINASVVNIQKEIDRLNEVAKNLNESLIDLQELGKYEQYIK

SEQ ID NO: 2576 - protein, 1211 aa, Artificial Sequence
  SARS-CoV-2/England/20102000506/2020__EPI_ISL_415147 spike protein (1-1211)(T874C_S1055C)
MFVFLVLLPLVSSQCVNLTTRTQLPPAYTNSFTRGVYYPDKVFRSSVLHSTQDLFLPFFSNVTWFHAIHVSGTNGTKRFDNPVLPFNDGVYFASTEKSNIIRGWIFGTTLDSKTQSLLIVNNATNVVIKVCEFQFCNDPFLGVYYHKNNKSWMESEFRVYSSANNCTFEYVSQPFLMDLEGKQGNFKNLREFVFKNIDGYFKIYSKHTPINLVRDLPQGFSALEPLVDLPIGINITRFQTLLALHRSYLTPGDSSSGWTAGAAAYYVGYLQPRTFLLKYNENGTITDAVDCALDPLSETKCTLKSFTVEKGIYQTSNFRVQPTESIVRFPNITNLCPFGEVFNATRFASVYAWNRKRISNCVADYSVLYNSASFSTFKCYGVSPTKLNDLCFTNVYADSFVIRGDEVRQIAPGQTGKIADYNYKLPDDFTGCVIAWNSNNLDSKVGGNYNYLYRLFRKSNLKPFERDISTEIYQAGSTPCNGVEGFNCYFPLQSYGFQPTNGVGYQPYRVVVLSFELLHAPATVCGPKKSTNLVKNKCVNFNFNGLTGTGVLTESNKKFLPFQQFGRDIADTTDAVRDPQTLEILDITPCSFGGVSVITPGTNTSNQVAVLYQGVNCTEVPVAIHADQLTPTWRVYSTGSNVFQTRAGCLIGAEHVNNSYECDIPIGAGICASYQTQTNSPRRARSVASQSIIAYTMSLGAENSVAYSNNSIAIPTNFTISVTTEILPVSMTKTSVDCTMYICGDSTECSNLLLQYGSFCTQLNRALTGIAVEQDKNTQEVFAQVKQIYKTPPIKDFGGFNFSQILPDPSKPSKRSFIEDLLFNKVTLADAGFIKQYGYCLGDIAARDLICAQKFNGLTVLPPLLTDEMIAQYCSALLAGTITSGWTFGAGAALQIPFAMQMAYRFNGIGVTQNVLYENQKLIANQFNSAIGKIQDSLSSTASALGKLQDVVNQNAQALNTLVKQLSSNFGAISSVLNDILSRLDKVEAEVQIDRLITGRLQSLQTYVTQQLIRAAEIRASANLAATKMSECVLGQSKRVDFCGKGYHLMSFPQCAPHGVVFLHVTYVPAQEKNFTTAPAICHDGKAHFPREGVFVSNGTHWFVTQRNFYEPQIITTDNTFVSGNCDVVIGIVNNTVYDPLQPELDSFKEELDKYFKNHTSPDVDLGDISGINASVVNIQKEIDRLNEVAKNLNESLIDLQELGKYEQYIK

SEQ ID NO: 2577 - protein, 1211 aa, Artificial Sequence
  SARS-CoV-2/Belgium/VAG-03013/2020__EPI_ISL_415155 spike protein (1-1211)(T874C_S1055C)
MFVFLVLLPLVSSQCVNLTTRTQLPPAYTNSFTRGVYYPDKVFRSSVLHSTQDLFLPFFSNVTWFHAIHVSGTNGTKRFDNPVLPFNDGVYFASTEKSNIIRGWIFGTTLDSKTQSLLIVNNATNVVIKVCEFQFCNDPFLGVYYHKNNKSWMESEFRVYSSANNCTFEYVSQPFLMDLEGKQGNFKNLREFVFKNIDGYFKIYSKHTPINLVRDLPQGFSALEPLVDLPIGINITRFQTLLALHRSYLTPGDSSSGWTAGAAAYYVGYLQPRTFLLKYNENGTITDAVDCALDPLSETKCTLKSFTVEKGIYQTSNFRVQPTESIVRFPNITNLCPFGEVFNATRFASVYAWNRKRISNCVADYSVLYNSASFSTFKCYGVSPTKLNDLCFTNVYADSFVIRGDEVRQIAPGQTGKIADYNYKLPDDFTGCVIAWNSNNLDSKVGGNYNYLYRLFRKSNLKPFERDISTEIYQAGSTPCNGVEGFNCYFPLQSYGFQPTNGVGYQPYRVVVLSFELLHAPATVCGPKKSTNLVKNKCVNFNFNGLTGTGVLTESNKKFLPFQQFGRDIADTTDAVRDPQTLEILDITPCSFGGVSVITPGTNTSNQVAVLYQGVNCTEVPVAIHADQLTPTWRVYSTGSNVFQTRAGCLIGAEHVNNSYECDIPIGAGICASYQTQTNSPRRARSVASQSIIAYTMSLGAENSVAYSNNSIAIPTNFTISVTTEILPVSMTKTSVDCTMYICGDSTECSNLLLQYGSFCTQLNRALTGIAVEQDKNTQEVFAQVKQIYKTPPIKDFGGFNFSQILPDPSKPSKRSFIEDLLFNKVTLADAGFIKQYGDCLGDIAARDLICAQKFNGLTVLPPLLTDEMIAQYCSALLAGTITSGWTFGAGAALQIPFAMQMAYRFNGIGVTQNVLYENQKLIANQFNSAIGKIQDSLSSTATALGKLQDVVNQNAQALNTLVKQLSSNFGAISSVLNDILSRLDKVEAEVQIDRLITGRLQSLQTYVTQQLIRAAEIRASANLAATKMSECVLGQSKRVDFCGKGYHLMSFPQCAPHGVVFLHVTYVPAQEKNFTTAPAICHDGKAHFPREGVFVSNGTHWFVTQRNFYEPQIITTDNTFVSGNCDVVIGIVNNTVYDPLQPELDSFKEELDKYFKNHTSPDVDLGDISGINASVVNIQKEIDRLNEVAKNLNESLIDLQELGKYEQYIK

SEQ ID NO: 2578 - protein, 1211 aa, Artificial Sequence
  SARS-CoV-2/Belgium/BC-03016/2020__EPI_ISL_415157 spike protein (1-1211)(T874C_S1055C)
MFVFLVLLPLVSSQCVNLTTRTQLPPAYTNSFTRGVYYPDKVFRSSVLHSTQDLFLPFFSNVTWFHAIHVSGTNGTKRFDNPVLPFNDGVYFASTEKSNIIRGWIFGTTLDSKTQSLLIVNNATNVVIKVCEFQFCNDPFLGVYYHKNNKSWMESEFRVYSSANNCTFEYVSQPFLMDLEGKQGNFKNLREFVFKNIDGYFKIYSKHTPINLVRDLPQGFSALEPLVDLPIGINITRFQTLLALHRSYLTPGDSSSGWTAGAAAYYVGYLQPRTFLLKYNENGTITDAVDCALDPLSETKCTLKSFTVEKGIYQTSNFRVQPTESIVRFPNITNLCPFGEVFNATRFASVYAWNRKRISNCVADYSVLYNSASFSTFKCYGVSPTKLNDLCFTNVYADSFVIRGDEVRQIAPGQTGKIADYNYKLPDDFTGCVIAWNSNNLDSKVGGNYNYLYRLFRKSNLKPFERDISTEIYQAGSTPCNGVEGFNCYFPLQSYGFQPTNGVGYQPYRVVVLSFELLHAPATVCGPKKSTNLVKNKCVNFNFNGLTGTGVLTESNKKFLPFQQFGRDIADTTDAVRDPQTLEILDITPCSFGGVSVITPGTNTSNQVAVLYQGVNCTEVPVAIHADQLTPTWRVYSTGSNVFQTRAGCLIGAEHVNNSYECDIPIGAGICASYQTQTNSPRRARSVASQSIIAYTMSLGAENSVAYSNNSIAIPTNFTISVTTEILPVSMTKTSVDCTMYICGDSTECSNLLLQYGSFCTQLNRALTGIAVEQDKNTQEVFAQVKQIYKTPPIKDFGGFNFSQILPDPSKPSKRSFIEDLLFNKVTLADAGFIKQYGDCLGDIAARDLICAQKFNGLTVLPPLLTDEMIAQYCSALLAGTITSGWTFGAGAALQIPFAMQMAYRFNGIGVTQNVLYENQKLIANQFNSAIGKIQDSLSSTAPALGKLQDVVNQNAQALNTLVKQLSSNFGAISSVLNDILSRLDKVEAEVQIDRLITGRLQSLQTYVTQQLIRAAEIRASANLAATKMSECVLGQSKRVDFCGKGYHLMSFPQCAPHGVVFLHVTYVPAQEKNFTTAPAICHDGKAHFPREGVFVSNGTHWFVTQRNFYEPQIITTDNTFVSGNCDVVIGIVNNTVYDPLQPELDSFKEELDKYFKNHTSPDVDLGDISGINASVVNIQKEIDRLNEVAKNLNESLIDLQELGKYEQYIK

SEQ ID NO: 2579 - protein, 1211 aa, Artificial Sequence
  SARS-CoV-2/Germany/BavPat3/2020__EPI_ISL_414521 spike protein (1-1211)(T874C_S1055C)
MFVFLVLLPLVSSQCVNLTTRTQLPPAYTNSFTRGVYYPDKVFRSSVLHSTQDLFLPFFSNVTWFHAIHVSGTNGTKRFDNPVLPFNDGVYFASTEKSNIIRGWIFGTTLDSKTQSLLIVNNATNVVIKVCEFQFCNDPFLGVYYHKNNKSWMESEFRVYSSANNCTFEYVSQPFLMDLEGKQGNFKNLREFVFKNIDGYFKIYSKHTPINLVRDLPQGFSALEPLVDLPIGINITRFQTLLALHRSYLTPGDSSSGWTAGAAAYYVGYLQPRTFLLKYNENGTITDAVDCALDPLSETKCTLKSFTVEKGIYQTSNFRVQPTESIVRFPNITNLCPFGEVFNATRFASVYAWNRKRISNCVADYSVLYNSASFSTFKCYGVSPTKLNDLCFTNVYADSFVIRGDEVRQIAPGQTGKIADYNYKLPDDFTGCVIAWNSNNLDSKVGGNYNYLYRLFRKSNLKPFERDISTEIYQAGSTPCNGVEGFNCYFPLQSYGFQPTNGVGYQPYRVVVLSFELLHAPATVCGPKKSTNLVKNKCVNFNFNGLTGTGVLTESNKKFLPFQQFGRDIADTTDAVRDPQTLEILDITPCSFGGVSVITPGTNTSNQVAVLYQDVNCTEVPVAIHADQLTPTWRVYSTGSNVFQTRAGCLIGAEHVNNSYECDIPIGAGICASYQTQTNSPRRARSVASQSIIAYTMSLGAENSVAYSNNSIAIPTNFTISVTTEILPVSMTKTSVDCTMYICGDSTECSNLLLQYGSFCTQLNRALTGIAVEQDKNTQQVFAQVKQIYKTPPIKDFGGFNFSQILPDPSKPSKRSFIEDLLFNKVTLADAGFIKQYGDCLGDIAARDLICAQKFNGLTVLPPLLTDEMIAQYCSALLAGTITSGWTFGAGAALQIPFAMQMAYRFNGIGVTQNVLYENQKLIANQFNSAIGKIQDSLSSTASALGKLQDVVNQNAQALNTLVKQLSSNFGAISSVLNDILSRLDKVEAEVQIDRLITGRLQSLQTYVTQQLIRAAEIRASANLAATKMSECVLGQSKRVDFCGKGYHLMSFPQCAPHGVVFLHVTYVPAQEKNFTTAPAICHDGKAHFPREGVFVSNGTHWFVTQRNFYEPQIITTDNTFVSGNCDVVIGIVNNTVYDPLQPELDSFKEELDKYFKNHTSPDVDLGDISGINASVVNIQKEIDRLNEVAKNLNESLIDLQELGKYEQYIK

SEQ ID NO: 2580 - protein, 1211 aa, Artificial Sequence
  SARS-CoV-2/France/HF1805/2020__EPI_ISL_414628 spike protein (1-1211)(T874C_S1055C)
MFVFLVLLPLVSSQCVNLTTRTQLPPAYTNSFTRGVYYPDKVFRSSVLHSTQDLFLPFFSNVTWFHAIHVSGTNGTKRFDNPVLPFNDGVYFASTEKSNIIRGWIFGTTLDSKTQSLLIVNNATNVVIKVCEFQFCNDPFLGVYYHKNNKSWMESEFRVYSSANNCTFEYVSQPFLMDLEGKQGNFKNLREFVFKNIDGYFKIYSKHTPINLVRDLPQGFSALEPLVDLPIGINITRFQTLLALHRSYLTPGDSSSGWTAGAAAYYVGYLQPRTFLLKYNENGTITDAVDCALDPLSETKCTLKSFTVEKGIYQTSNFRVQPTESIVRFPNITNLCPFGEVFNATRFASVYAWNRKRISNCVADYSVLYNSASFSTFKCYGVSPTKLNDLCFTNVYADSFVIRGDEVRQIAPGQTGKIADYNYKLPDDFTGCVIAWNSNNLDSKVGGNYNYLYRLFRKSNLKPFERDISTEIYQAGSTPCNGVEGFNCYFPLQSYGFQPTNGVGYQPYRVVVLSFELLHAPATVCGPKKSTNLVKNKCVNFNFNGLTGTGVLTESNKKFLPFQQFGRDIADTTDAVRDPQTLEILDITPCSFGGVSVITPGTNTSNQVAVLYQGVNCTEVPVAIHADQLTPTWRVYSTGSNVFQTRAGCLIGAEHVNNSYECDIPIGAGICASYQTQTNSPRRARSVASQSIIAYTMSLGAENSVAYSNNSIAIPTNFTISVTTEILPVSMTKTSVDCTMYICGDSTECSNLLLQYGSFCTQLNRALTGIAVEQDKNTQEVFAQVKQIYKTPPIKDFGGFNFSQILPDPSKPSKRSFIEDLLFNKVTLADAGFIKQYGDCLGDIAARDLICAQKFNGLTVLPPLLTDEMIAQYCSALLAGTITSGWTFGAGAALQIPFAMQMAYRFNGIGVTQNVLYENQKLIANQFNSAIGKIQDSLSSTASALGKLQDVVNQNAQALNTLVKQLSSNFGAISSVLNDILSRLDKVEAEVQIDRLITGRLQSLQTYVTQQLIRAAEIRASANLAATKMSECVLGQSKRVDFCGKGYHLMSFPQCAPHGVVFLHVTYVPAQEKNFTTAPAICHDGKAHFPREGVFVSNGTHWFVTQRNFYEPQIITTDNTFVSGNCDVVIGVVNNTVYDPLQPELDSFKEELDKYFKNHTSPDVDLGDISGINASVVNIQKEIDRLNEVAKNLNESLIDLQELGKYEQYIK

SEQ ID NO: 2581 - protein, 1211 aa, Artificial Sequence
  SARS-CoV-2/Netherlands/ZuidHolland_9/2020__EPI_ISL_414445 spike protein (1-1211)(T874C_S1055C)
MFVFLVLLPLVSSQCVNLTTRTQLPPAYTNSFTRGVYYPDKVFRSSVLHSTQDLFLPFFSNVTWFHAIHVSGTNGTKRFDNPVLPFNDGVYFASTEKSNIIRGWIFGTTLDSKTQSLLIVNNATNVVIKVCEFQFCNDPFLGVYYHKNNKSWMESEFRVYSSANNCTFEYVSQPFLMDLEGKQGNFKNLREFVFKNIDGYFKIYSKHTPINLVRDLPQGFSALEPLVDLPIGINITRFQTLLALHRSYLTPGDSSSGWTAGAAAYYVGYLQPRTFLLKYNENGTITDAVDCALDPLSETKCTLKSFTVEKGIYQTSNFRVQPTESIVRFPNITNLCPFGEVFNATRFASVYAWNRKRISNCVADYSVLYNSASFSTFKCYGVSPTKLNDLCFTNVYADSFVIRGDEVRQIAPGQTGKIADYNYKLPDDFTGCVIAWNSNNLDSKVGGNYNYLYRLFRKSNLKPFERDISTEIYQAGSTPCNGVEGFNCYFPLQSYGFQPTNGVGYQPYRVVVLSFELLHAPATVCGPKKSTNLVKNKCVNFNFNGLTGTGVLTESNKKFLPFQQFGRDIADTTDAVRDPQTLEILDITPCSFGGVSVITPGTNTSNQVAVLYQGVNCTEVPVAIHADQLTPTWRVYSTGSNVFQTRAGCLIGAEHVNNSYECDIPIGAGICASYQTQTNSPRRARSVASQSIIAYTMSLGAENSVAYSNNSIAIPTNFTISVTTEILPVSMTKTSVDCTMYICGDSTECSNLLLQYGSFCTQLNRALTGIAVEQDKNTQEVFAQVKQIYKTPPIKDFGGFNFSQILPDPSKPSKRSFIEDLLFNKVTLADAGFIKQYGDCLGDIAARDLICVQKFNGLTVLPPLLTDEMIAQYCSALLAGTITSGWTFGAGAALQIPFAMQMAYRFNGIGVTQNVLYENQKLIANQFNSAIGKIQDSLSSTASALGKLQDVVNQNAQALNTLVKQLSSNFGAISSVLNDILSRLDKVEAEVQIDRLITGRLQSLQTYVTQQLIRAAEIRASANLAATKMSECVLGQSKRVDFCGKGYHLMSFPQCAPHGVVFLHVTYVPAQEKNFTTAPAICHDGKAHFPREGVFVSNGTHWFVTQRNFYEPQIITTDNTFVSGNCDVVIGIVNNTVYDPLQPELDSFKEELDKYFKNHTSPDVDLGDISGINASVVNIQKEIDRLNEVAKNLNESLIDLQELGKYEQYIK

SEQ ID NO: 2582 - protein, 1211 aa, Artificial Sequence
  SARS-CoV-2/Finland/FIN03032020A/2020__EPI_ISL_413602 spike protein (1-1211)(T874C_S1055C)
MFVFLVLLPLVSSQCVNLTTRTQLPPAYTNSFTRGVYYPDKVFRSSVLHSTQDLFLPFFSNVTWFHAIHVSGTNGTKRFDNPVLPFNDGVYFASTEKSNIIRGWIFGTTLDSKTQSLLIVNNATNVVIKVCEFQFCNDPFLGVYYHKNNKSWMESEFRVYSSANNCTFEYVSQPFLMDLEGKQGNFKNLREFVFKNIDGYFKIYSKHTPINLVRDLPQGFSALEPLVDLPIGINITRFQTLLALHRSYLTPGDSSSGWTAGAAAYYVGYLQPRTFLLKYNENGTITDAVDCALDPLSETKCTLKSFTVEKGIYQTSNFRVQPTESIVRFPNITNLCPFGEVFNATRFASVYAWNRKRISNCVADYSVLYNSASFSTFKCYGVSPTKLNDLCFTNVYADSFVIRGDEVRQIAPGQTGKIADYNYKLPDDFTGCVISWNSNNLDSKVGGNYNYLYRLFRKSNLKPFERDISTEIYQAGSTPCNGVEGFNCYFPLQSYGFQPTNGVGYQPYRVVVLSFELLHAPATVCGPKKSTNLVKNKCVNFNFNGLTGTGVLTESNKKFLPFQQFGRDIADTTDAVRDPQTLEILDITPCSFGGVSVITPGTNTSNQVAVLYQGVNCTEVPVAIHADQLTPTWRVYSTGSNVFQTRAGCLIGAEHVNNSYECDIPIGAGICASYQTQTNSPRRARSVASQSIIAYTMSLGAENSVAYSNNSIAIPTNFTISVTTEILPVSMTKTSVDCTMYICGDSTECSNLLLQYGSFCTQLNRALTGIAVEQDKNTQEVFAQVKQIYKTPPIKDFGGFNFSQILPDPSKPSKRSFIEDLLFNKVTLADAGFIKQYGDCLGDIAARDLICAQKFNGLTVLPPLLTDEMIAQYCSALLAGTITSGWTFGAGAALQIPFAMQMAYRFNGIGVTQNVLYENQKLIANQFNSAIGKIQDSLSSTASALGKLQDVVNQNAQALNTLVKQLSSNFGAISSVLNDILSRLDKVEAEVQIDRLITGRLQSLQTYVTQQLIRAAEIRASANLAATKMSECVLGQSKRVDFCGKGYHLMSFPQCAPHGVVFLHVTYVPAQEKNFTTAPAICHDGKAHFPREGVFVSNGTHWFVTQRNFYEPQIITTDNTFVSGNCDVVIGIVNNTVYDPLQPELDSFKEELDKYFKNHTSPDVDLGDISGINASVVNIQKEIDRLNEVAKNLNESLIDLQELGKYEQYIK

SEQ ID NO: 2583 - protein, 1211 aa, Artificial Sequence
  SARS-CoV-2/France/GE1977/2020__EPI_ISL_414632 spike protein (1-1211)(T874C_S1055C)
MFVFLVLLPLVSSQCVNLTTRTQLPPAYTNSFTRGVYYPDKVFRSSVLHSTQDLFLPFFSNVTWFHAIHVSGTNGTKRFDNPVLPFNDGVYFASTEKSNIIRGWIFGTTLDSKTQSLLIVNNATNVVIKVCEFQFCNDPFLGVYYHKNNKSWMESEFRVYSSANNCTFEYVSQPFLMDLEGKQGNFKNLREFVFKNIDGYFKIYSKHTPINLVRDLPQGFSALEPLVDLPIGINITRFQTLLALHRSYLTPGDSSSGWTAGAAAYYVGYLQPRTFLLKYNENGTITDAVDCALDPLSETKCTLKSFTVEKGIYQTSNFRVQPTESIVRFPNITNLCPFGEVFNATRFASVYAWNRKRISNCVADYSVLYNSASFSTFKCYGVSPTKLNDLCFTNVYADSFVIRGDEVRQIAPGQTGKIADYNYKLPDDFTGCVIAWNSNNLDSKVGGNYNYLYRLFRKSNLKPFERDISTEIYQAGSTPCNGVEGFNCYFPLQSYGFQPTNGVGYQPYRVVVLSFELLHAPATVCGPKKSTNLVKNKCVNFNFNGLTGTGVLTESNKKFLPFQQFGRDIADTTDAVRDPQTLEILDITPCSFGGVSVITPGTNTSNQVAVLYQGVNCTEVPVAIHADQLTPTWRVYSTGSNVFQTRAGCLIGAEHVNNSYECDIPIGAGICASYQTQTNSPRRARSVASQSIIAYTMSLGAENSVAYSNNSIAIPTNFTISVTTEILPVSMTKTSVDCTMYICGDSTECSNLLLQYGSFCTQLNRALTGIAVEQDKNTQEVFAQVKQIYKTPPIKDFGGFNFSQILPDPSKPSKRSFIEDLLFNKVTLADAGFIKQYGDCLGDIAARDLICAQKFNGLTVLPPLLTDEMIAQYCSALLAGTITSGWTFGAGAALQIPFAMQMAYRFNGIGVTQNVLYENQKLIANQFNSAIGKIQDSLFSTASALGKLQDVVNQNAQALNTLVKQLSSNFGAISSVLNDILSRLDKVEAEVQIDRLITGRLQSLQTYVTQQLIRAAEIRASANLAATKMSECVLGQSKRVDFCGKGYHLMSFPQCAPHGVVFLHVTYVPAQEKNFTTAPAICHDGKAHFPREGVFVSNGTHWFVTQRNFYEPQIITTDNTFVSGNCDVVIGIVNNTVYDPLQPELDSFKEELDKYFKNHTSPDVDLGDISGINASVVNIQKEIDRLNEVAKNLNESLIDLQELGKYEQYIK

SEQ ID NO: 2584 - protein, 1211 aa, Artificial Sequence
  SARS-CoV-2/Finland/FIN-313/2020__EPI_ISL_414641 spike protein (1-1211)(T874C_S1055C)
MFVFLVLLPLVSSQCVNLTTRTQLPPAYTNSFTRGVYYPDKVFRSSVLHSTQDLFLPFFSNVTWFHAIHVSGTNGTKRFDNPVLPFNDGVYFASTEKSNIIRGWIFGTTLDSKTQSLLIVNNATNVVIKVCEFQFCNDPFLGVYYHKNNKSWMESEFRVYSSANNCTFEYVSQPFLMDLEGKQGNFKNLREFVFKNIDGYFKIYSKHTPINLVRDLPQGFSALEPLVDLPIGINITRFKTLLALHRSYLTPGDSSSGWTAGAAAYYVGYLQPRTFLLKYNENGTITDAVDCALDPLSETKCTLKSFTVEKGIYQTSNFRVQPTESIVRFPNITNLCPFGEVFNATRFASVYAWNRKRISNCVADYSVLYNSASFSTFKCYGVSPTKLNDLCFTNVYADSFVIRGDEVRQIAPGQTGKIADYNYKLPDDFTGCVIAWNSNNLDSKVGGNYNYLYRLFRKSNLKPFERDISTEIYQAGSTPCNGVEGFNCYFPLQSYGFQPTNGVGYQPYRVVVLSFELLHAPATVCGPKKSTNLVKNKCVNFNFNGLTGTGVLTESNKKFLPFQQFGRDIADTTDAVRDPQTLEILDITPCSFGGVSVITPGTNTSNQVAVLYQGVNCTEVPVAIHADQLTPTWRVYSTGSNVFQTRAGCLIGAEHVNNSYECDIPIGAGICASYQTQTNSPRRARSVASQSIIAYTMSLGAENSVAYSNNSIAIPTNFTISVTTEILPVSMTKTSVDCTMYICGDSTECSNLLLQYGSFCTQLNRALTGIAVEQDKNTQEVFAQVKQIYKTPPIKDFGGFNFSQILPDPSKPSKRSFIEDLLFNKVTLADAGFIKQYGDCLGDIAARDLICAQKFNGLTVLPPLLTDEMIAQYCSALLAGTITSGWTFGAGAALQIPFAMQMAYRFNGIGVTQNVLYENQKLIANQFNSAIGKIQDSLSSTASALGKLQDVVNQNAQALNTLVKQLSSNFGAISSVLNDILSRLDKVEAEVQIDRLITGRLQSLQTYVTQQLIRAAEIRASANLAATKMSECVLGQSKRVDFCGKGYHLMSFPQCAPHGVVFLHVTYVPAQEKNFTTAPAICHDGKAHFPREGVFVSNGTHWFVTQRNFYEPQIITTDNTFVSGNCDVVIGIVNNTVYDPLQPELDSFKEELDKYFKNHTSPDVDLGDISGINASVVNIQKEIDRLNEVAKNLNESLIDLQELGKYEQYIK

SEQ ID NO: 2585 - protein, 1211 aa, Artificial Sequence
  SARS-CoV-2/Netherlands/ZuidHolland_2/2020__EPI_ISL_414556 spike protein (1-1211)(T874C_S1055C)
MFVFLVLLPLVSSQCVNLTTRTQLPPAYTNSFTRGVYYPDKVFRSSVLHSTQDLFLPFFSNVTWFHAIHVSGTNGTKRFDNPVLPFNDGVYFASTEKSNIIRGWIFGTTLDSKTQSLLIVNNATNVVIKVCEFQFCNDPFLGVYYHKNNKSWMESEFRVYSSANNCTFEYVSQPFLMDLEGKQGNFKNLREFVFKNIDGYFKIYSKHTPINLVRDLPQGFSALEPLVDLPIGINITRFQTLLALHRSYLTPGDSSSGWTAGAAAYYVGYLQPRTFLLKYNENGTITDAVDCALDPLSETKCTLKSFTVEKGIYQTSNFRVQPTESIVRFPNITNLCPFGEVFNATRFASVYAWNRKRISNCVADYSVLYNSASFSTFKCYGVSPTKLNDLCFTNVYADSFVIRGDEVRQIAPGQTGKIADYNYKLPDDFTGCVIAWNSNNLDSKVGGNYNYLYRLFRKSNLKPFERDISTEIYQAGSTPCNGVEGFNCYFPLQSYGFQPTNGVGYQPYRVVVLSFELLHAPATVCGPKKSTNLVKNKCVNFNFNGLTGTGVLTESNKKFLPFQQFGRDIADTTDAVRDPQTLEILDITPCSFGGVSVITPGTNTSNQVAVLYQGVNCTEVPVAIHADQLTPTWRVYSTGSNVFQTRAGCLIGAEHVNNSYECDIPIGAGICASYQTQTNSPRRARSVASQSIIAYTMSLGAENSVAYSNNSIAIPTNFTISVTTEILPVSMTKTSVDCTMYICGDSTECSNLLLQYGSFCTQLNRALTGIALEQDKNTQEVFAQVKQIYKTPPIKDFGGFNFSQILPDPSKPSKRSFIEDLLFNKVTLADAGFIKQYGDCLGDIAARDLICAQKFNGLTVLPPLLTDEMIAQYCSALLAGTITSGWTFGAGAALQIPFAMQMAYRFNGIGVTQNVLYENQKLIANQFNSAIGKIQDSLSSTASALGKLQDVVNQNAQALNTLVKQLSSNFGAISSVLNDILSRLDKVEAEVQIDRLITGRLQSLQTYVTQQLIRAAEIRASANLAATKMSECVLGQSKRVDFCGKGYHLMSFPQCAPHGVVFLHVTYVPAQEKNFTTAPAICHDGKAHFPREGVFVSNGTHWFVTQRNFYEPQIITTDNTFVSGNCDVVIGIVNNTVYDPLQPELDSFKEELDKYFKNHTSPDVDLGDISGINASVVNIQKEIDRLNEVAKNLNESLIDLQELGKYEQYIK

SEQ ID NO: 2586 - protein, 1211 aa, Artificial Sequence
  SARS-CoV-2/USA/WA-UW31/2020__EPI_ISL_414618 spike protein (1-1211)(T874C_S1055C)
MFVFLVLLPLVSSQCVNLTTRTQLPPAYTNSFTRGVYYPDKVFRSSVLHSTQDLFLPFFSNVTWFHAIHVSGTNGTKRFDNPVLPFNDGVYFASTEKSNIIRGWIFGTTLDSKTQSLLIVNNATNVVIKVCEFQFCNDPFLGVYYHKNNKSWMESEFRVYSSANNCTFEYVSQPFLMDLEGKQGNFKNLREFVFKNIDGYFKIYSKHTPINLVRDLPQGFSALEPLVDLPIGINITRFQTLLALHRSYLTPGDSSSGWTAGAAAYYVGYLQPRTFLLKYNENGTITDAVDCALDPLSETKCTLKSFTVEKGIYQTSNFRVQPTESIVRFPNITNLCPFGEVFNATRFASVYAWNRKRISNCVADYSVLYNSASFSTFKCYGVSPTKLNDLCFTNVYADSFVIRGDEVRQIAPGQTGKIADYNYKLPDDFTGCVIAWNSNNLDSKVGGNYNYLYRLFRKSNLKPFERDISTEIYQAGSTPCNGAEGFNCYFPLQSYGFQPTNGVGYQPYRVVVLSFELLHAPATVCGPKKSTNLVKNKCVNFNFNGLTGTGVLTESNKKFLPFQQFGRDIADTTDAVRDPQTLEILDITPCSFGGVSVITPGTNTSNQVAVLYQDVNCTEVPVAIHADQLTPTWRVYSTGSNVFQTRAGCLIGAEHVNNSYECDIPIGAGICASYQTQTNSPRRARSVASQSIIAYTMSLGAENSVAYSNNSIAIPTNFTISVTTEILPVSMTKTSVDCTMYICGDSTECSNLLLQYGSFCTQLNRALTGIAVEQDKNTQEVFAQVKQIYKTPPIKDFGGFNFSQILPDPSKPSKRSFIEDLLFNKVTLADAGFIKQYGDCLGDIAARDLICAQKFNGLTVLPPLLTDEMIAQYCSALLAGTITSGWTFGAGAALQIPFAMQMAYRFNGIGVTQNVLYENQKLIANQFNSAIGKIQDSLSSTASALGKLQDVVNQNAQALNTLVKQLSSNFGAISSVLNDILSRLDKVEAEVQIDRLITGRLQSLQTYVTQQLIRAAEIRASANLAATKMSECVLGQSKRVDFCGKGYHLMSFPQCAPHGVVFLHVTYVPAQEKNFTTAPAICHDGKAHFPREGVFVSNGTHWFVTQRNFYEPQIITTDNTFVSGNCDVVIGIVNNTVYDPLQPELDSFKEELDKYFKNHTSPDVDLGDISGINASVVNIQKEIDRLNEVAKNLNESLIDLQELGKYEQYIK

SEQ ID NO: 2587 - protein, 1211 aa, Artificial Sequence
  SARS-CoV-2/South Korea/SNU01/2020__EPI_ISL_411929 spike protein (1-1211)(T874C_S1055C)
MFVFLVLLPLVSSQCVNLTTRTQLPPAYTNSFTRGVYYPDKVFRSSVLHSTQDLFLPFFSNVTWFHAIHVSGTNGTKRFDNPVLPFNDGVYFASTEKSNIIRGWIFGTTLDSKTQSLLIVNNATNVVIKVCEFQFCNDPFLGVYYHKNNKSWMESEFRVYSSANNCTFEYVSQPFLMDLEGKQGNFKNLREFVFKNIDGYFKIYSKHTPINLVRDLPQGFWALEPLVDLPIGINITRFQTLLALHRSYLTPGDSSSGWTAGAAAYYVGYLQPRTFLLKYNENGTITDAVDCALDPLSETKCTLKSFTVEKGIYQTSNFRVQPTESIVRFPNITNLCPFGEVFNATRFASVYAWNRKRISNCVADYSVLYNSASFSTFKCYGVSPTKLNDLCFTNVYADSFVIRGDEVRQIAPGQTGKIADYNYKLPDDFTGCVIAWNSNNLDSKVGGNYNYLYRLFRKSNLKPFERDISTEIYQAGSTPCNGVEGFNCYFPLQSYGFQPTNGVGYQPYRVVVLSFELLHAPATVCGPKKSTNLVKNKCVNFNFNGLTGTGVLTESNKKFLPFQQFGRDIADTTDAVRDPQTLEILDITPCSFGGVSVITPGTNTSNQVAVLYQDVNCTEVPVAIHADQLTPTWRVYSTGSNVFQTRAGCLIGAEHVNNSYECDIPIGAGICASYQTQTNSPRRARSVASQSIIAYTMSLGAENSVAYSNNSIAIPTNFTISVTTEILPVSMTKTSVDCTMYICGDSTECSNLLLQYGSFCTQLNRALTGIAVEQDKNTQEVFAQVKQIYKTPPIKDFGGFNFSQILPDPSKPSKRSFIEDLLFNKVTLADAGFIKQYGDCLGDIAARDLICAQKFNGLTVLPPLLTDEMIAQYCSALLAGTITSGWTFGAGAALQIPFAMQMAYRFNGIGVTQNVLYENQKLIANQFNSAIGKIQDSLSSTASALGKLQDVVNQNAQALNTLVKQLSSNFGAISSVLNDILSRLDKVEAEVQIDRLITGRLQSLQTYVTQQLIRAAEIRASANLAATKMSECVLGQSKRVDFCGKGYHLMSFPQCAPHGVVFLHVTYVPAQEKNFTTAPAICHDGKAHFPREGVFVSNGTHWFVTQRNFYEPQIITTDNTFVSGNCDVVIGIVNNTVYDPLQPELDSFKEELDKYFKNHTSPDVDLGDISGINASVVNIQKEIDRLNEVAKNLNESLIDLQELGKYEQYIK

SEQ ID NO: 2588 - protein, 1211 aa, Artificial Sequence
  SARS-CoV-2/China/WF0004/2020__EPI_ISL_413694 spike protein (1-1211)(T874C_S1055C)
MFVFLVLLPLVSSQCVNLTTRTQLPPAYTNSFTRGVYYPDKVFRSSVLHSTQDLFLPFFSNVTWFHAIHVSGTNGTKRFDNPVLPFNDGVYFASTEKSNIIRGWIFGTTLDSKTQSLLIVNNATNVVIKVCEFQFCNDPFLGVYYHKNNKSWTESEFRVYSSANNCTFEYVSQPFLMDLEGKQGNFKNLREFVFKNIDGYFKIYSKHTPINLVRDLPQGFSALEPLVDLPIGINITRFQTLLALHRSYLTPGDSSSGWTAGAAAYYVGYLQPRTFLLKYNENGTITDAVDCALDPLSETKCTLKSFTVEKGIYQTSNFRVQPTESIVRFPNITNLCPFGEVFNATRFASVYAWNRKRISNCVADYSVLYNSASFSTFKCYGVSPTKLNDLCFTNVYADSFVIRGDEVRQIAPGQTGKIADYNYKLPDDFTGCVIAWNSNNLDSKVGGNYNYLYRLFRKSNLKPFERDISTEIYQAGSTPCNGVEGFNCYFPLQSYGFQPTNGVGYQPYRVVVLSFELLHAPATVCGPKKSTNLVKNKCVNFNFNGLTGTGVLTESNKKFLPFQQFGRDIADTTDAVRDPQTLEILDITPCSFGGVSVITPGTNTSNQVAVLYQDVNCTEVPVAIHADQLTPTWRVYSTGSNVFQTRAGCLIGAEHVNNSYECDIPIGAGICASYQTQTNSPRRARSVASQSIIAYTMSLGAENSVAYSNNSIAIPTNFTISVTTEILPVSMTKTSVDCTMYICGDSTECSNLLLQYGSFCTQLNRALTGIAVEQDKNTQEVFAQVKQIYKTPPIKDFGGFNFSQILPDPSKPSKRSFIEDLLFNKVTLADAGFIKQYGDCLGDIAARDLICAQKFNGLTVLPPLLTDEMIAQYCSALLAGTITSGWTFGAGAALQIPFAMQMAYRFNGIGVTQNVLYENQKLIANQFNSAIGKIQDSLSSTASALGKLQDVVNQNAQALNTLVKQLSSNFGAISSVLNDILSRLDKVEAEVQIDRLITGRLQSLQTYVTQQLIRAAEIRASANLAATKMSECVLGQSKRFDFCGKGYHLMSFPQCAPHGVVFLHVTYVPAQEKNFTTAPAICHDGKAHFPREGVFVSNGTHWFVTQRNFYEPQIITTDNTFVSGNCDVVIGIVNNTVYDPLQPELDSFKEELDKYFKNHTSPDVDLGDISGINASVVNIQKEIDRLNEVAKNLNESLIDLQELGKYEQYIK

SEQ ID NO: 2589 - protein, 1211 aa, Artificial Sequence
  SARS-CoV-2/China/WF0028/2020__EPI_ISL_413791 spike protein (1-1211)(T874C_S1055C)
MFVFLVLLPLVSSQCVNLTTRTQLPPAYTNSFTRGVYYPDKVFRSSVLHSTQDLFLPFFSNVTWFHAIHVSGTNGTKRFDNPVLPFNDGVYFASTEKSNIIRGWIFGTTLDSKTQSLLIVNNATNVVIKVCEFQFCNDPFLGVYYHKNNKSWMESEFRVYSSANNCTFEYVSQPFLMDLEGKQGNFKNLREFVFKNIDGYFKIYSKHTPINLVRDLPQGFSALEPLVDLPIGINITRFQTLLALHRSYLTPGDSSSGWTAGAAAYYVGYLQPRTFLLKYNENGTITDAVDCALDPLSETKCTLKSFTVEKGIYQTSNFRVQPTESIVRFPNITNLCPFGEVFNATRFASVYAWNRKRISNCVADYSVLYNSASFSTFKCYGVSPTKLNDLCFTNVYADSFVIRGDEVRQIAPGQTGKIADYNYKLPDDFTGCVIAWNSNNLDSKVGGNYNYLYRLFRKSNLKPFERDISTEIYQAGSTPCNGVEGFNCYFPLQSYGFQPTNGVGYQPYRVVVLSFELLHAPATVCGPKKSTNLVKNKCVNFNFNGLTGTGVLTESNKKFLPFQQFGRDIADTTDAVRDPQTLEILDITPCSFGGVSVITPGTNTSNQVAVLYQDVNCTEVPVAIHADQLTPTWRVYSTGSNVFQTRAGCLIGAEHVNNSYECDIPIGAGICASYQTQTNSPRRARSVASQSIIAYTMSLGAENSVAYSNNSIAIPTNFTISVTTEILPVSMTKTSVDCTMYICGDSTECSNLLLQYGSFCTQLNRALTGIAVEQDKNTQEVFAQVKQIYKTPPIKDFGGFNFSQILPDPSKPSKRSFIEDLLFNKVTLADAGFIKQYGDCLGDIAARDLICAQKFNGLTVLPPLLTDEMIAQYCSALLAGTITSGWTFGAGAALQIPFAMQMAYRFNGIGVTQNVLYENQKLIANQFNSAIGKIQDSLSSTASALGKLQDVVNQNAQALNTLVKQLSSNFGAISSVLNDILSRLDKVEAEVQIDRLITGRLQSLQTYVTQQLIRAAEIRASANLAATKMSECVLGQSKRVDFCGKGYHLMSFPQCAPHGVVFLHVTYVPAQEKNFTTAPAICHDGKAHFPREGVFVSNGTHWFVTQRNFYEPQIITTDNTFVSGNCDVVIGIVNNTVYDPLQPELESFKEELDKYFKNHTSPDVDLGDISGINASVVNIQKEIDRLNEVAKNLNESLIDLQELGKYEQYIK

SEQ ID NO: 2590 - protein, 1211 aa, Artificial Sequence
  SARS-CoV-2/2019-nCoV/USA-CruiseA-18/2020__MT159716.1 spike protein (1-1211)(T874C_S1055C)
MFVFLVLLPLVSSQCVNLTTRTQLPPAYTNSFTRGVYYPDKVFRSSVLHSTQDLFLPFFSNVTWFHAIHVSGTNGTKRFDNPVLPFNDGVYFASTEKSNIIRGWIFGTTLDSKTQSLLIVNNATNVVIKVCEFQFCNDPFLGVYYHKNNKSWMESELRVYSSANNCTFEYVSQPFLMDLEGKQGNFKNLREFVFKNIDGYFKIYSKHTPINLVRDLPQGFSALEPLVDLPIGINITRFQTLLALHRSYLTPGDSSSGWTAGAAAYYVGYLQPRTFLLKYNENGTITDAVDCALDPLSETKCTLKSFTVEKGIYQTSNFRVQPTESIVRFPNITNLCPFGEVFNATRFASVYAWNRKRISNCVADYSVLYNSASFSTFKCYGVSPTKLNDLCFTNVYADSFVIRGDEVRQIAPGQTGKIADYNYKLPDDFTGCVIAWNSNNLDSKVGGNYNYLYRLFRKSNLKPFERDISTEIYQAGSTPCNGVEGFNCYFPLQSYGFQPTNGVGYQPYRVVVLSFELLHAPATVCGPKKSTNLVKNKCVNFNFNGLTGTGVLTESNKKFLPFQQFGRDIADTTDAVRDPQTLEILDITPCSFGGVSVITPGTNTSNQVAVLYQDVNCTEVPVAIHADQLTPTWRVYSTGSNVFQTRAGCLIGAEHVNNSYECDIPIGAGICASYQTQTNSPRRARSVASQSIIAYTMSLGAENSVAYSNNSIAIPTNFTISVTTEILPVSMTKTSVDCTMYICGDSTECSNLLLQYGSFCTQLNRALTGIAVEQDKNTQEVFAQVKQIYKTPPIKDFGGFNFSQILPDPSKPSKRSFIEDLLFNKVTLADAGFIKQYGDCLGDIAARDLICAQKFNGLTVLPPLLTDEMIAQYCSALLAGTITSGWTFGAGAALQIPFAMQMAYRFNGIGVTQNVLYENQKLIANQFNSAIGKIQDSLSSTASALGKLQDVVNQNAQALNTLVKQLSSNFGAISSVLNDILSRLDKVEAEVQIDRLITGRLQSLQTYVTQQLIRAAEIRASANLAATKMSECVLGQSKRVDFCGKGYHLMSFPQCAPHGVVFLHVTYVPAQEKNFTTAPAICHDGKAHFPREGVFVSNGTHWFVTQRNFYEPQIITTDNTFVSGNCDVVIGIVNNTVYDPLQPELDSFKEELDKYFKNHTSPDVDLGDISGINASVVNIQKEIDRLNEVAKNLNESLIDLQELGKYEQYIK

SEQ ID NO: 2591 - protein, 1211 aa, Artificial Sequence
  SARS-CoV-2/SARS-CoV-2/Yunnan-01/human/2020/CHN__MT049951.1 spike protein (1-1211)(T874C_S1055C)
MFVFLVLLPLVSSQCVNLTTRTQLPPANTNSFTRGVYYPDKVFRSSVLHSTQDLFLPFFSNVTWFHAIHVSGTNGTKRFDNPVLPFNDGVYFASTEKSNIIRGWIFGTTLDSKTQSLLIVNNATNVVIKVCEFQFCNDPFLGVYYHKNNKSWMESEFRVYSSANNCTFEYVSQPFLMDLEGKQGNFKNLREFVFKNIDGYFKIYSKHTPINLVRDLPQGFSALEPLVDLPIGINITRFQTLLALHRSYLTPGDSSSGWTAGAAAYYVGYLQPRTFLLKYNENGTITDAVDCALDPLSETKCTLKSFTVEKGIYQTSNFRVQPTESIVRFPNITNLCPFGEVFNATRFASVYAWNRKRISNCVADYSVLYNSASFSTFKCYGVSPTKLNDLCFTNVYADSFVIRGDEVRQIAPGQTGKIADYNYKLPDDFTGCVIAWNSNNLDSKVGGNYNYLYRLFRKSNLKPFERDISTEIYQAGSTPCNGVEGFNCYFPLQSYGFQPTNGVGYQPYRVVVLSFELLHAPATVCGPKKSTNLVKNKCVNFNFNGLTGTGVLTESNKKFLPFQQFGRDIADTTDAVRDPQTLEILDITPCSFGGVSVITPGTNTSNQVAVLYQDVNCTEVPVAIHADQLTPTWRVYSTGSNVFQTRAGCLIGAEHVNNSYECDIPIGAGICASYQTQTNSPRRARSVASQSIIAYTMSLGAENSVAYSNNSIAIPTNFTISVTTEILPVSMTKTSVDCTMYICGDSTECSNLLLQYGSFCTQLNRALTGIAVEQDKNTQEVFAQVKQIYKTPPIKDFGGFNFSQILPDPSKPSKRSFIEDLLFNKVTLADAGFIKQYGDCLGDIAARDLICAQKFNGLTVLPPLLTDEMIAQYCSALLAGTITSGWTFGAGAALQIPFAMQMAYRFNGIGVTQNVLYENQKLIANQFNSAIGKIQDSLSSTASALGKLQDVVNQNAQALNTLVKQLSSNFGAISSVLNDILSRLDKVEAEVQIDRLITGRLQSLQTYVTQQLIRAAEIRASANLAATKMSECVLGQSKRVDFCGKGYHLMSFPQCAPHGVVFLHVTYVPAQEKNFTTAPAICHDGKAHFPREGVFVSNGTHWFVTQRNFYEPQIITTDNTFVSGNCDVVIGIVNNTVYDPLQPELDSFKEELDKYFKNHTSPDVDLGDISGINASVVNIQKEIDRLNEVAKNLNESLIDLQELGKYEQYIK

SEQ ID NO: 2592 - protein, 1211 aa, Artificial Sequence
  SARS-CoV-2/USA/WA-UW292/2020__EPI_ISL_418077 spike protein (1-1211)(T874C_S1055C)
MFVFLVLLPLVSSQCVNLTTRTQLPPAYTNSFTRGVYYPDKVFRSSVLHSTQDLFLPFFSNVTWFHAIHVSGTNGTKRFDNPVLPFNDGVYFASTEKSNIIRGWIFGTTLDSKTQSLLIVNNATNVVIKVCEFQFCNDPFLGVYYHKNNKSWMESEFRVYSSANNCTFEYVSQPFLMDLEGKQGNFKNLREFVFKNIDGYFKIYSKHTPINLVRDLPQGFSALEPLVDLPIGINITRFQTLLALHRSYLTPGDSSSGWTAGAAAYYVGYLQPRTFLLKYNENGTITDAVDCALDPLSETKCTLKSFTVEKGIYQTSNFRVQPTESIVRFPNITNLCPFGEVFNATRFASVYAWNRKRISNCVADYSVLYNSASFSTFKCYGVSPTKLNDLCFTNVYADSFVIRGDEVRQIAPGQTGKIADYNYKLPDDFTGCVIAWNSNNLDSKVGGNYNYLYRLFRKSNLKPFERDISTEIYQASSTPCNGVEGFNCYFPLQSYGFQPTNGVGYQPYRVVVLSFELLHAPATVCGPKKSTNLVKNKCVNFNFNGLTGTGVLTESNKKFLPFQQFGRDIADTTDAVRDPQTLEILDITPCSFGGVSVITPGTNTSNQVAVLYQDVNCTEVPVAIHADQLTPTWRVYSTGSNVFQTRAGCLIGAEHVNNSYECDIPIGAGICASYQTQTNSPRRARSVASQSIIAYTMSLGAENSVAYSNNSIAIPTNFTISVTTEILPVSMTKTSVDCTMYICGDSTECSNLLLQYGSFCTQLNRALTGIAVEQDKNTQEVFAQVKQIYKTPPIKDFGGFNFSQILPDPSKPSKRSFIEDLLFNKVTLADAGFIKQYGDCLGDIAARDLICAQKFNGLTVLPPLLTDEMIAQYCSALLAGTITSGWTFGAGAALQIPFAMQMAYRFNGIGVTQNVLYENQKLIANQFNSAIGKIQDSLSSTASALGKLQDVVNQNAQALNTLVKQLSSNFGAISSVLNDILSRLDKVEAEVQIDRLITGRLQSLQTYVTQQLIRAAEIRASANLAATKMSECVLGQSKRVDFCGKGYHLMSFPQCAPHGVVFLHVTYVPAQEKNFTTAPAICHDGKAHFPREGVFVSNGTHWFVTQRNFYEPQIITTDNTFVSGNCDVVIGIVNNTVYDPLQPELDSFKEELDKYFKNHTSPDVDLGDISGINASVVNIQKEIDRLNEVAKNLNESLIDLQELGKYEQYIK

SEQ ID NO: 2593 - protein, 1211 aa, Artificial Sequence
  SARS-CoV-2/Iceland/192/2020__EPI_ISL_417819 spike protein (1-1211)(T874C_S1055C)
MFVFFVLLPLVSSQCVNLTTRTQLPPAYTNSFTRGVYYPDKVFRSSVLHSTQDLFLPFFSNVTWFHAIHVSGTNGTKRFDNPVLPFNDGVYFASTEKSNIIRGWIFGTTLDSKTQSLLIVNNATNVVIKVCEFQFCNDPFLGVYYHKNNKSWMESEFRVYSSANNCTFEYVSQPFLMDLEGKQGNFKNLREFVFKNIDGYFKIYSKHTPINLVRDLPQGFSALEPLVDLPIGINITRFQTLLALHRSYLTPGDSSSGWTAGAAAYYVGYLQPRTFLLKYNENGTITDAVDCALDPLSETKCTLKSFTVEKGIYQTSNFRVQPTESIVRFPNITNLCPFGEVFNATRFASVYAWNRKRISNCVADYSVLYNSASFSTFKCYGVSPTKLNDLCFTNVYADSFVIRGDEVRQIAPGQTGKIADYNYKLPDDFTGCVIAWNSNNLDSKVGGNYNYLYRLFRKSNLKPFERDISTEIYQAGSTPCNGVEGFNCYFPLQSYGFQPTNGVGYQPYRVVVLSFELLHAPATVCGPKKSTNLVKNKCVNFNFNGLTGTGVLTESNKKFLPFQQFGRDIADTTDAVRDPQTLEILDITPCSFGGVSVITPGTNTSNQVAVLYQGVNCTEVPVAIHADQLTPTWRVYSTGSNVFQTRAGCLIGAEHVNNSYECDIPIGAGICASYQTQTNSPRRARSVASQSIIAYTMSLGAENSVAYSNNSIAIPTNFTISVTTEILPVSMTKTSVDCTMYICGDSTECSNLLLQYGSFCTQLNRALTGIAVEQDKNTQEVFAQVKQIYKTPPIKDFGGFNFSQILPDPSKPSKRSFIEDLLFNKVTLADAGFIKQYGDCLGDIAARDLICAQKFNGLTVLPPLLTDEMIAQYCSALLAGTITSGWTFGAGAALQIPFAMQMAYRFNGIGVTQNVLYENQKLIANQFNSAIGKIQDSLSSTASALGKLQDVVNQNAQALNTLVKQLSSNFGAISSVLNDILSRLDKVEAEVQIDRLITGRLQSLQTYVTQQLIRAAEIRASANLAATKMSECVLGQSKRVDFCGKGYHLMSFPQCAPHGVVFLHVTYVPAQEKNFTTAPAICHDGKAHFPREGVFVSNGTHWFVTQRNFYEPQIITTDNTFVSGNCDVVIGIVNNTVYDPLQPELDSFKEELDKYFKNHTSPDVDLGDISGINASVVNIQKEIDRLNEVAKNLNESLIDLQELGKYEQYIK

SEQ ID NO: 2594 - protein, 1211 aa, Artificial Sequence
  SARS-CoV-2/Belgium/ULG-6939/2020__EPI_ISL_417020 spike protein (1-1211)(T874C_S1055C)
MFVFLVLLPLVSSQCVNLTTRTQLPPAYTNSFTRGVYYPDKVFRSSVLHSTQDLFLPFFSNVTWFHAIHVSGTNGTKRFDNPVLPFNDGVYFASTEKSNIIRGWIFGTTLDSKTQSLLIVNNATNVVIKVCEFQFCNDPFLGVYYHKNNKSWMESEFRVYSSANNCTFEYVSQPFLMDLEGKQGNFKNLREFVFKNIDGYFKIYSKHTPINLVRDLPQGFSALEPLVDLPIGINITRFQTLLALHRSYLTPGDSSSGWTAGAAAYYVGYLQPRTFLLKYNENGTITDAVDCALDPLSETKCTLKSFTVEKGIYQTSNFRVQPTESIVRFPNITNLCPFGEVFNATRFASVYAWNRKRISNCVADYSVLYNSASFSTFKCYGVSPTKLNDLCFTNVYADSFVIRGDEVRQIAPGQTGKIADYNYKLPDDFTGCVIAWNSNNLDSKVGGNYNYLYRLFRKSNLKPFERDISTEIYQAGSTPCNGVEGFNCYFPLQSYGFQPTNGVGYQPYRVVVLSFELLHAPATVCGPKKSTNLVKNKCVNFNFNGLTGTGVLTESNKKFLPFQQFGRDIADTTDAVRDPQTLEILDITPCSFGGVSVITPGTNTSNQVAVLYQGVNCTEVPVAIHADQLTPTWRVYSTGSNVFQTRAGCLIGAEHVNNSYECDIPIGAGICASYQTQTNSPRRARSVASQSIIAYTMSLGAENSVVYSNNSIAIPTNFTISVTTEILPVSMTKTSVDCTMYICGDSTECSNLLLQYGSFCTQLNRALTGIAVEQDKNTQEVFAQVKQIYKTPPIKDFGGFNFSQILPDPSKPSKRSFIEDLLFNKVTLADAGFIKQYGDCLGDIAARDLICAQKFNGLTVLPPLLTDEMIAQYCSALLAGTITSGWTFGAGAALQIPFAMQMAYRFNGIGVTQNVLYENQKLIANQFNSAIGKIQDSLSSTASALGKLQDVVNQNAQALNTLVKQLSSNFGAISSVLNDILSRLDKVEAEVQIDRLITGRLQSLQTYVTQQLIRAAEIRASANLAATKMSECVLGQSKRVDFCGKGYHLMSFPQCAPHGVVFLHVTYVPAQEKNFTTAPAICHDGKAHFPREGVFVSNGTHWFVTQRNFYEPQIITTDNTFVSGNCDVVIGIVNNTVYDPLQPELDSFKEELDKYFKNHTSPDVDLGDISGINASVVNIQKEIDRLNEVAKNLNESLIDLQELGKYEQYIK

SEQ ID NO: 2595 - protein, 1211 aa, Artificial Sequence
  SARS-CoV-2/France/HF2496/2020__EPI_ISL_418231 spike protein (1-1211)(T874C_S1055C)
MFVFLVLLPLVSSQCVNLTTRTQLPPAYTNSFTRGVYYPDKVFRSSVLHSTQDLFLPFFSNVTWFHAIHVSGTNGTKRFDNPVLPFNDGVYFASTEKSNIIRGWIFGTTLDSKTQSLLIVNNATNVVIKVCEFQFCNDPFLGVYYHKNNKSWMESEFRVYSSANNCTFEYVSQPFLMDLEGKQGNFKNLREFVFKNIDGYFKIYSKHTPINLVRDLPQGFSALEPLVDLPIGINITRFQTLLALHRSYLTPGDSSSGWTAGAAAYYVGYLQPRTFLLKYNENGTITDAVDCALDPLSETKCTLKSFTVEKGIYQTSNFRVQPTESIVRFPNITNLCPFGEVFNATRFASVYAWNRKRISNCVADYSVLYNSASFSTFKCYGVSPTKLNDLCFTNVYADSFVIRGDEVRQIAPGQTGKIADYNYKLPDDFTGCVIAWNSNNLDSKVGGNYNYLYRLFRKSNLKPFERDISTEIYQAGSTPCNGVEGFNCYFPLQSYGFQPTNGVGYQPYRVVVLSFELLHAPATVCGPKKSTNLVKNKCVNFNFNGLTGTGVLTESNKKFLPFQQFGRDIADTTDAVRDPQTLEILDITPCSFGGVSVITPGTNTSNQVAVLYQGVNCTEVPVAIHADQLTPTWRVYSTGSNVFQTRAGCLIGAEHVNNSYECDIPIGAGICASYQTQTNSPRRARSVASQSIIAYTMSLGAENSVAYSNNSIAIPTNFTISVTTEILPVSMTKTSVDCTMYICGDSTECSNLLLQYGSFCTQLNRALTGIAVEQDKNTQEVFAQVKQIYKTPPIKDFGGFNFSQILPDPSKPSKRSFIEDLLFNKVTLADAGFIKQYGDCLGDIVARDLICAQKFNGLTVLPPLLTDEMIAQYCSALLAGTITSGWTFGAGAALQIPFAMQMAYRFNGIGVTQNVLYENQKLIANQFNSAIGKIQDSLSSTASALGKLQDVVNQNAQALNTLVKQLSSNFGAISSVLNDILSRLDKVEAEVQIDRLITGRLQSLQTYVTQQLIRAAEIRASANLAATKMSECVLGQSKRVDFCGKGYHLMSFPQCAPHGVVFLHVTYVPAQEKNFTTAPAICHDGKAHFPREGVFVSNGTHWFVTQRNFYEPQIITTDNTFVSGNCDVVIGIVNNTVYDPLQPELDSFKEELDKYFKNHTSPDVDLGDISGINASVVNIQKEIDRLNEVAKNLNESLIDLQELGKYEQYIK

SEQ ID NO: 2596 - protein, 1211 aa, Artificial Sequence
  SARS-CoV-2/USA/WA-UW291/2020__EPI_ISL_418076 spike protein (1-1211)(T874C_S1055C)
MFVFLVLLPLVSSQCVNLTTRTQLPPAYTNSFTRGVYYPDKVFRSSVLHSTQDLFLPFFSNVTWFHAIHVSGTNGTKRFDNPVLPFNDGVYFASTEKSNIIRGWIFGTTLDSKTQSLLIVNNATNVVIKVCEFQFCNDPFLGVYYHKNNKSWMESEFRVYSSANNCTFEYVSQPFLMDLEGKQGNFKNLREFVFKNIDGYFKIYSKHTPINLVRDLPQGFSALEPLVDLPIGINITRFQTLLALHRSYLTPGDSSSGWTAGAAAYYVGYLQPRTFLLKYNENGTITDAVDCALDPLSETKCTLKSFTVEKGIYQTSNFRVQPTESIVRFPNITNLCPFGEVFNATRFASVYAWNRKRISNCVADYSVLYNSASFSTFKCYGVSPTKLNDLCFTNVYADSFVIRGDEVRQIAPGQTGKIADYNYKLPDDFTGCVIAWNSNNLDSKVGGNYNYLYRLFRKSNLKPFERDISTEIYQAGSTPCNGVEGFNCYFPLQSYGFQPTNGVGYQPYRVVVLSFELLHAPATVCGPKKSTNLVKNKCVNFNFNGLTGTGVLTESNKKFLPFQQFGRDIADTTDAVRDPQTLEILDITPCSFGGVSVITPGTNTSNQVAVLYQGVNCTEVPVAIHADQLTPTWRVYSTGSNVFQTRAGCLIGAEHVNNSYECDIPIGAGICASYQTQTNSPRRARSVASQSIIAYTMSLGAENSVAYSNNSIAIPTNFTISVTTEILPVSMTKTSVDCTMYICGDSTECSNLLLQYGSFCTQLNRALTGIAVEQDKNTQEVFAQVKQIYKTPPIKDFGGFNFSQILPDPSKPSKRSFIEDLLFNKVTLADAGFIKQYGDCLGDIAARDLICAQKFNGLTVLPPLLTDEMIAQYCSALLAGTITSGWTFGAGAALQIPFAMQMAYRFNGIGVTQNVLYENQKLIANQFNSAIGKIQYSLSSTASALGKLQDVVNQNAQALNTLVKQLSSNFGAISSVLNDILSRLDKVEAEVQIDRLITGRLQSLQTYVTQQLIRAAEIRASANLAATKMSECVLGQSKRVDFCGKGYHLMSFPQCAPHGVVFLHVTYVPAQEKNFTTAPAICHDGKAHFPREGVFVSNGTHWFVTQRNFYEPQIITTDNTFVSGNCDVVIGIVNNTVYDPLQPELDSFKEELDKYFKNHTSPDVDLGDISGINASVVNIQKEIDRLNEVAKNLNESLIDLQELGKYEQYIK

SEQ ID NO: 2597 - protein, 1211 aa, Artificial Sequence; identical to SEQ ID NO: 2560
  SARS-CoV-2/Portugal/PT0034/2020__EPI_ISL_418019 spike protein (1-1211)(T874C_S1055C)

SEQ ID NO: 2598 - protein, 1211 aa, Artificial Sequence
  SARS-CoV-2/Iceland/202/2020__EPI_ISL_417750 spike protein (1-1211)(T874C_S1055C)
MFVFLVLLPLVSSQCVNLTTRTQLPPAYTNSFTRGVYYPDKVFRSSVLHSTQDLFLPFFSNVTWFHAIHVSGTNGTKRFDNPVLPFNDGVYFASTEKSNIIRGWIFGTTLDSKTQSLLIVNNATNVVIKVCEFQFCNDPFLGVYYHKNNKSWMESEFRVYSSANNCTFEYVSQPFLMDLEGKQGNFKNLREFVFKNIDGYFKIYSKHTPINLVRDLPQGFSALEPLVDLPIGINITRFQTLLALHRSYLTPGDSSSGWTAGAAAYYVGYLQPRTFLLKYNENGTITDAVDCALDPLSETKCTLKSFTVEKGIYQTSNFRVQPTESIVRFPNITNLCPFGEVFNATRFASVYAWNRKRISNCVADYSVLYNSASFSTFKCYGVSPTKLNDLCFTNVYADSFVIRGDEVRQIAPGQTGKIADYNYKLPDDFTGCVIAWNSNNLDSKVGGNYNYLYRLFRKSNLKPFERDISTEIYQAGSTPCNGVEGFNCYFPLQSYGFQPTNGVGYQPYRVVVLSFELLHAPATVCGPKKSTNLVKNKCVNFNFNGLTGTGVLTESNKKFLPFQQFGRDIADTTDAVRDPQTLEILDITPCSFGGVSVITPGTNTSNQVAVLYQDVNCTEVPVAIHADQLTPTWRVYSTGSNVFQTRAGCLIGAEHVNNSYECDIPIGAGICASYQTQTNSPRRARSVASQSIIAYTMSLGAENSVAYSNNSIAIPTNFTISVTTEILPVSMTKTSVDCTMYICGDSTECSNLLLQYGSFCTQLNRALTGIAVEQDKNTQEVFAQVKQIYKTPPIKDFGGFNFSQILPDPSKPSKRSFIEDLLFNKVTLADAGFIKQYGDCLGDIAARDLICAQKFNGLTVLPPLLTDEMIAQYCSALLAGTITSGWTFGAGAALQIPFAMQMAYRFNGIGVTQNVLYENQKLIANQFNSAIGKIQDSLSSTASALGKLQDVVNQNAQALNTLVKQLSSNFGAISSVLNDILSRLDKVEAEVQIDRLITGRLQSLQTYVTQQLIRAAEIRASANLAATKMSECVLGQSKRVDFCGKGYHLMSFPQCAPHGVVFLHVTYVPAQEKNFTTAPAICHDGKAHFPREGVFVSNGTHWFVTQRNFYEPQIITTDNTFVSGNCDVVIGIVNNTVYDPLQPELDSFKEELDKYFKNHTSPDVDLGDIPGINASVVNIQKEIDRLNEVAKNLNESLIDLQELGKYEQYIK

SEQ ID NO: 2599 - protein, 1211 aa, Artificial Sequence
  SARS-CoV-2/USA/WA-UW261/2020__EPI_ISL_418046 spike protein (1-1211)(T874C_S1055C)
MFVFLVLLPLVSSQCVNLTTRTQLPPAYTNSFTRGVYYPDKVFRSSVLHSTQDLFLPFFSNVTWFHAIHVSGTNGTKRFDNPVLPFNDGVYFASTEKSNIIRGWIFGTTLDSKTQSLLIVNNATNVVIKVCEFQFCNDPFLGVYYHKNNKSWMESEFRVYSSANNCTFEYVSQPFLMDLEGKQGNFKNLREFVFKNIDGYFKIYSKHTPINLVRDLPQGFSALEPLVDLPIGINITRFQTLLALHRSYLTPGDSSSGWTAGAAAYYVGYLQPRTFLLKYNENGTITDAVDCALDPLSETKCTLKSFTVEKGIYQTSNFRVQPTESIVRFPNITNLCPFGEVFNATRFTSVYAWNRKRISNCVADYSVLYNSASFSTFKCYGVSPTKLNDLCFTNVYADSFVIRGDEVRQIAPGQTGKIADYNYKLPDDFTGCVIAWNSNNLDSKVGGNYNYLYRLFRKSNLKPFERDISTEIYQAGSTPCNGVEGFNCYFPLQSYGFQPTNGVGYQPYRVVVLSFELLHAPATVCGPKKSTNLVKNKCVNFNFNGLTGTGVLTESNKKFLPFQQFGRDIADTTDAVRDPQTLEILDITPCSFGGVSVITPGTNTSNQVAVLYQDVNCTEVPVAIHADQLTPTWRVYSTGSNVFQTRAGCLIGAEHVNNSYECDIPIGAGICASYQTQTNSPRRARSVASQSIIAYTMSLGAENSVAYSNNSIAIPTNFTISVTTEILPVSMTKTSVDCTMYICGDSTECSNLLLQYGSFCTQLNRALTGIAVEQDKNTQEVFAQVKQIYKTPPIKDFGGFNFSQILPDPSKPSKRSFIEDLLFNKVTLADAGFIKQYGDCLGDIAARDLICAQKFNGLTVLPPLLTDEMIAQYCSALLAGTITSGWTFGAGAALQIPFAMQMAYRFNGIGVTQNVLYENQKLIANQFNSAIGKIQDSLSSTASALGKLQDVVNQNAQALNTLVKQLSSNFGAISSVLNDILSRLDKVEAEVQIDRLITGRLQSLQTYVTQQLIRAAEIRASANLAATKMSECVLGQSKRVDFCGKGYHLMSFPQCAPHGVVFLHVTYVPAQEKNFTTAPAICHDGKAHFPREGVFVSNGTHWFVTQRNFYEPQIITTDNTFVSGNCDVVIGIVNNTVYDPLQPELDSFKEELDKYFKNHTSPDVDLGDISGINASVVNIQKEIDRLNEVAKNLNESLIDLQELGKYEQYIK

SEQ ID NO: 2600 - protein, 1211 aa, Artificial Sequence
  SARS-CoV-2/Portugal/PT0035/2020__EPI_ISL_418020 spike protein (1-1211)(T874C_S1055C)
MFVFLVLLPLVSSQCVNLTTRTQLPPAYTNSFTRGVYYPDKVFRSSVLHSTQDLFLPFFSNVTWFHAIHVSGTNGTKRFDNPVLPFNDGVYFASTEKSNIIRGWIFGTTLDSKTQSLLIVNNATNVVIKVCEFQFCNDPFLGVYYHKNNKSWMESEFRVYSSANNCTFEYVSQPFLMDLEGKQGNFKNLREFVFKNIDGYFKIYSKHTPINLVRDLPQGFSALEPLVDLPIGINITRFQTLLALHRSYLTPGDSSSGWTAGAAAYYVGYLQPRTFLLKYNENGTITDAVDCALDPLSETKCTLKSFTVEKGIYQTSNFRVQPTESIVRFPNITNLCPFGEVFNATRFASVYAWNRKRISNCVADYSVLYNSASFSTFKCYGVSPTKLNDLCFTNVYADSFVIRGDEVRQIAPGQTGKIADYNYKLPDDFTGCVIAWNSNNLDSKVGGNYNYLYRLFRKSNLKPFERDISTEIYQAGSTPCNGVEGFNCYFPLQSYGFQPTNGVGYQPYRVVVLSFELLHAPATVCGPKKSTNLVKNKCVNFNFNGLTGTGVLTESNKKFLPFQQFGRDIADTTDAVRDPQTLEILDITPCSFGGVSVITPGTNTSNQVAVLYQDVNCTEVPVAIHADQLTPTWRVYSTGSNVFQTRAGCLIGAEHVNNSYECDIPIGAGICASYQTQTNSPRRARSVASQSIIAYTMSLGAENSVAYSNNSIAIPTNFTISVTTEILPVSMTKTSVDCTMYICGDSTECSNLLLQYGSFCTQLNRALTGIAVEQDKNTQEVFAQVKQIYKTPPIKDFGGFNFSQILPDPSKPSKRSFIEDLLFNKVTLADAGFIKQYGDCLGDISARDLICAQKFNGLTVLPPLLTDEMIAQYCSALLAGTITSGWTFGAGAALQIPFAMQMAYRFNGIGVTQNVLYENQKLIANQFNSAIGKIQDSLSSTASALGKLQDVVNQNAQALNTLVKQLSSNFGAISSVLNDILSRLDKVEAEVQIDRLITGRLQSLQTYVTQQLIRAAEIRASANLAATKMSECVLGQSKRVDFCGKGYHLMSFPQCAPHGVVFLHVTYVPAQEKNFTTAPAICHDGKAHFPREGVFVSNGTHWFVTQRNFYEPQIITTDNTFVSGNCDVVIGIVNNTVYDPLQPELDSFKEELDKYFKNHTSPDVDLGDISGINASVVNIQKEIDRLNEVAKNLNESLIDLQELGKYEQYIK

SEQ ID NO: 2601 - protein, 1211 aa, Artificial Sequence
  SARS-CoV-2/USA/NY-NYUMC7/2020__EPI_ISL_418192 spike protein (1-1211)(T874C_S1055C)
MFVFLVLLPLVSSQCVNLTTRTQLPPAYTNSFTRGVYYPDKVFRSSVLHSTQDLFLPFFSNVTWFHAIHVSGTNGTKRFDNPVLPFNDGVYFASTEKSNIIRGWIFGTTLDSKTQSLLIVNNATNVVIKVCEFQFCNDPFLGVYHHKNNKSWMESEFRVYSSANNCTFEYVSQPFLMDLEGKQGNFKNLREFVFKNIDGYFKIYSKHTPINLVRDLPQGFSALEPLVDLPIGINITRFQTLLALHRSYLTPGDSSSGWTAGAAAYYVGYLQPRTFLLKYNENGTITDAVDCALDPLSETKCTLKSFTVEKGIYQTSNFRVQPTESIVRFPNITNLCPFGEVFNATRFASVYAWNRKRISNCVADYSVLYNSASFSTFKCYGVSPTKLNDLCFTNVYADSFVIRGDEVRQIAPGQTGKIADYNYKLPDDFTGCVIAWNSNNLDSKVGGNYNYLYRLFRKSNLKPFERDISTEIYQAGSTPCNGVEGFNCYFPLQSYGFQPTNGVGYQPYRVVVLSFELLHAPATVCGPKKSTNLVKNKCVNFNFNGLTGTGVLTESNKKFLPFQQFGRDIADTTDAVRDPQTLEILDITPCSFGGVSVITPGTNTSNQVAVLYQGVNCTEVPVAIHADQLTPTWRVYSTGSNVFQTRAGCLIGAEHVNNSYECDIPIGAGICASYQTQTNSPRRARSVASQSIIAYTMSLGAENSVAYSNNSIAIPTNFTISVTTEILPVSMTKTSVDCTMYICGDSTECSNLLLQYGSFCTQLNRALTGIAVEQDKNTQEVFAQVKQIYKTPPIKDFGGFNFSQILPDPSKPSKRSFIEDLLFNKVTLADAGFIKQYGDCLGDIAARDLICAQKFNGLTVLPPLLTDEMIAQYCSALLAGTITSGWTFGAGAALQIPFAMQMAYRFNGIGVTQNVLYENQKLIANQFNSAIGKIQDSLSSTASALGKLQDVVNQNAQALNTLVKQLSSNFGAISSVLNDILSRLDKVEAEVQIDRLITGRLQSLQTYVTQQLIRAAEIRASANLAATKMSECVLGQSKRVDFCGKGYHLMSFPQCAPHGVVFLHVTYVPAQEKNFTTAPAICHDGKAHFPREGVFVSNGTHWFVTQRNFYEPQIITTDNTFVSGNCDVVIGIVNNTVYDPLQPELDSFKEELDKYFKNHTSPDVDLGDISGINASVVNIQKEIDRLNEVAKNLNESLIDLQELGKYEQYIK

SEQ ID NO: 2602 - protein, 1211 aa, Artificial Sequence
  SARS-CoV-2/Iceland/189/2020__EPI_ISL_417709 spike protein (1-1211)(T874C_S1055C)
MFVFLVLLPLVSSQCVNLTTRTQLPPAYTNSFTRGVYYPDKVFRSSVLHSTQDLFLPFFSNVTWFHAIHVSGTNGTKRFDNPVLPFNDGVYFASTEKSNIIRGWIFGTTLDSKTQSLLIVNNATNVVIKVCEFQFCNDPFLGVYYHKNNKSWMESEFRVYSSANNCTFEYVSQPFLMDLEGKQGNFKNLREFVFKNIDGYFKIYSKHTPINLVRDLPQGFSALEPLVDLPIGINITRFQTLLALHRSYLTPGDSSSGWTAGAAAYYVGYLQPRTFLLKYNENGTITDAVDCALDPLSETKCTLKSFTVEKGIYQTSNFRVQPTESIVRFPNITNLCPFGEVFNATRFASVYAWNRKRISNCVADYSVLYNSASFSTFKCYGVSPTKLNDLCFTNVYADSFVIRGDEVRQIAPGQTGKIADYNYKLPDDFTGCVIAWNSNNLDSKVGGNYNYLYRLFRKSNLKPFERDISTEIYQAGSTPCNGVEGFNCYFPLQSYGFQPTNGVGYQPYRVVVLSFELLHAPATVCGPKKSTNLVKNKCVNFNFNGLTGTGVLTESNKKFLPFQQFGRDIADTTDAVRDPQTLEILDITPCSFGGVSVITPGTNTSNQVAVLYQGVNCTEVPVAIHADQLTPTWRVYSTGSNVFQTRAGCLIGAEHVNNSYECDIPIGAGICASYQTQTNSPRRARSVASQSIIAYTMSLGAENSVAYSNNSIAIPTNFTISVTTEILPVSMTKTSVDCTMYICGDSTECSNLLLQYGSFCTQLNRALTGIAVEQDKNTQEVFAQVKQIYKTPPIKDFGGFNFSQILPDPSKPSKRSFIEDLLFNKVTLADAGFTKQYGDCLGDIAARDLICAQKFNGLTVLPPLLTDEMIAQYCSALLAGTITSGWTFGAGAALQIPFAMQMAYRFNGIGVTQNVLYENQKLIANQFNSAIGKIQDSLSSTASALGKLQDVVNQNAQALNTLVKQLSSNFGAISSVLNDILSRLDKVEAEVQIDRLITGRLQSLQTYVTQQLIRAAEIRASANLAATKMSECVLGQSKRVDFCGKGYHLMSFPQCAPHGVVFLHVTYVPAQEKNFTTAPAICHDGKAHFPREGVFVSNGTHWFVTQRNFYEPQIITTDNTFVSGNCDVVIGIVNNTVYDPLQPELDSFKEELDKYFKNHTSPDVDLGDISGINASVVNIQKEIDRLNEVAKNLNESLIDLQELGKYEQYIK

SEQ ID NO: 2603 - protein, 1211 aa, Artificial Sequence
  SARS-CoV-2/Australia/NSW56/2020__EPI_ISL_417408 spike protein (1-1211)(T874C_S1055C)
MFVFLVLLPLVSSQCVNLTTRTQLPPAYTNSFTRGVYYPDKVFRSSVLHSTQDLFLPFFSNVTWFHAIHVSGTNGTKRFDNPVLPFNDGVYFASTEKSNIIRGWIFGTTLDSKTQSLLIVNNATNVVIKVCEFQFCNDPFLGVYYHKNNKSWMESEFRVYSSANNCTFEYVSQPFLMDLEGKQGNFKNLREFVFKNIDGYFKIYSKHTPINLVRDLPQGFSALEPLVDLPIGINITRFQTLLALHRSYLTPGDSSSGWTAGAAAYYVGYLQPRTFLLKYNENGTITDAVDCALDPLSETKCTLKSFTVEKGIYQTSNFRVQPTESIVRFPNITNLCPFGEVFNATRFASVYAWNRKRISNCVADYSVLYNSASFSTFKCYGVSPTKLNDLCFTNVYADSFVIRGDEVRQIAPGQTGKIADYNYKLPDDFTGCVIAWNSNNLDSKVGGNYNYLYRLFRKSNLKPFERDISTEIYQAGSTPCNGVEGFNCYFPLQSYGFQPTNGVGYQPYRVVVLSFELLHAPATVCGPKKSTNLVKNKCVNFNFNGLTGTGVLTESNKKFLPFQQFGRDIADTTDAVRDPQTLEILDITPCSFGGVSVITPGTNTSNQVAVLYQDVNCTEVPVAIHADQLTPTWRVYSTGSNVFQTRAGCLIGAEHVNNSYECDIPIGAGICASYQTQTNSPRRARSVASQSIIAYTMSLGAENSVAYSNNSIAIPTNFTISVTTEILPVSMTKTSVDCTMYICGDSTECSNLLLQYGSFCTQLNRALTGIAVEQDKNTQEVFAQVKQIYKTPPIKDFGGFNFSQILPDSSKPSKRSFIEDLLFNKVTLADAGFIKQYGDCLGDIAARDLICAQKFNGLTVLPPLLTDEMIAQYCSALLAGTITSGWTFGAGAALQIPFAMQMAYRFNGIGVTQNVLYENQKLIANQFNSAIGKIQDSLSSTASALGKLQDVVNQNAQALNTLVKQLSSNFGAISSVLNDILSRLDKVEAEVQIDRLITGRLQSLQTYVTQQLIRAAEIRASANLAATKMSECVLGQSKRVDFCGKGYHLMSFPQCAPHGVVFLHVTYVPAQEKNFTTAPAICHDGKAHFPREGVFVSNGTHWFVTQRNFYEPQIITTDNTFVSGNCDVVIGIVNNTVYDPLQPELDSFKEELDKYFKNHTSPDVDLGDISGINASVVNIQKEIDRLNEVAKNLNESLIDLQELGKYEQYIK

SEQ ID NO: 2604 - protein, 1211 aa, Artificial Sequence
  SARS-CoV-2/Iceland/280/2020__EPI_ISL_417608 spike protein (1-1211)(T874C_S1055C)
MFVFLVLLPLVSSQCVNLTTRTQLPPAYTNSFTRGVYYPDKVFRSSVLHSTQDLFLPFFSNVTWFHAIHVSGTNGTKRFDNPVLPFNDGVYFASTEKSNIIRGWIFGTTLDSKTQSLLIVNNATNVVIKVCEFQFCNDPFLGVYYHKNNKSWMESEFRVYSSANNCTFEYVSQPFLMDLEGKQGNFKNLREFVFKNIDGYFKIYSKHTPINLVRDLPQGFSALEPLVDLPIGINITRFQTLLALHRSYLTPGDSSSGWTAGAAAYYVGYLQPRTFLLKYNENGTITDAVDCALDPLSETKCTLKSFTVEKGIYQTSNFRVQPTESIVRFPNITNLCPFGEVFNATRFASVYAWNRKRISNCVADYSVLYNSASFSTFKCYGVSPTKLNDLCFTNVYADSFVIRGDEVRQIAPGQTGKIADYNYKLPDDFTGCVIAWNSNNLDSKVGGNYNYLYRLFRKSNLKPFERDISTEIYQAGSTPCNGVEGFNCYFPLQSYGFQPTNGVGYQPYRVVVLSFELLHAPATVCGPKKSTNLVKNKCVNFNFNGLTGTGVLTESNKKFLPFQQFGRDIADTTDAVRDPQTLEILDITPCSFGGVSVITPGTNTSNQVAVLYQGVNCTEVPVAIHADQLTPTWRVYSTGSNVFQTRAGCLIGAEHVNNSYECDIPIGAGICASYHTQTNSPRRARSVASQSIIAYTMSLGAENSVAYSNNSIAIPTNFTISVTTEILPVSMTKTSVDCTMYICGDSTECSNLLLQYGSFCTQLNRALTGIAVEQDKNTQEVFAQVKQIYKTPPIKDFGGFNFSQILPDPSKPSKRSFIEDLLFNKVTLADAGFIKQYGDCLGDIAARDLICAQKFNGLTVLPPLLTDEMIAQYCSALLAGTITSGWTFGAGAALQIPFAMQMAYRFNGIGVTQNVLYENQKLIANQFNSAIGKIQDSLSSTASALGKLQDVVNQNAQALNTLVKQLSSNFGAISSVLNDILSRLDKVEAEVQIDRLITGRLQSLQTYVTQQLIRAAEIRASANLAATKMSECVLGQSKRVDFCGKGYHLMSFPQCAPHGVVFLHVTYVPAQEKNFTTAPAICHDGKAHFPREGVFVSNGTHWFVTQRNFYEPQIITTDNTFVSGNCDVVIGIVNNTVYDPLQPELDSFKEELDKYFKNHTSPDVDLGDISGINASVVNIQKEIDRLNEVAKNLNESLIDLQELGKYEQYIK

SEQ ID NO: 2605 - protein, 1211 aa, Artificial Sequence; identical to SEQ ID NO: 2560
  SARS-CoV-2/Iceland/247/2020__EPI_ISL_417575 spike protein (1-1211)(T874C_S1055C)

SEQ ID NO: 2606 - protein, 1211 aa, Artificial Sequence
  SARS-CoV-2/Iceland/238/2020__EPI_ISL_417566 spike protein (1-1211)(T874C_S1055C)
MFVFLVLLPLVSSQCVNLTTRTQLPPAYTNSFTRGVYYPDKVFRSSVLHSTQDLFLPFFSNVTWFHAIHVSGTNGTKRFDNPVLPFNDGVYFASTEKSNIIRGWIFGTTLDSKTQSLLIVNNATNVVIKVCEFQFCNDPFLGVYYHKNNKSWMESEFRVYSSANNCTFEYVSQPFLMDLEGKQGNFKNLREFVFKNIDGYFKIYSKHTPINLVRDLPQGFSALEPLVDLPIGINITRFQTLLALHRSYLTPGDSSSGWTAGAAAYYVGYLQPRTFLLKYNENGTITDAVDCALDPLSETKCTLKSFTVEKGIYQTSNFRVQPTESIVRFPNITNLCPFGEVFNATRFASVYAWNRKRISNCVADYSVLYNSASFSTFKCYGVSPTKLNDLCFTNVYADSFVIRGDEVRQIAPGQTGKIADYNYKLPDDFTGCVIAWNSNNLDSKVGGNYNYLYRLFRKSNLKPFERDISTEIYQAGSTPCNGVEGFNCYFPLQSYGFQPTNGVGYQPYRVVVLSFELLHAPATVCGPKKSTNLVKNKCVNFNFNGLTGTGVLTESNKKFLPFQQFGRDIADTTDAVRDPQTLEILDITPCSFGGVSVITPGTNTSNQVAVLYQGVNCTEVPVAIHADQLTPTWRVYSTGSNVFQTRAGCLIGAEHVNNSYECDIPIGAGICASYQTQTNSPRRARSVASQSIIAYTMSLGAENSVAYSNNSIAIPTNFTISVTTEILPVSMTKTSVDCTMYICGDSTECSNLLLQYGSFCTQLNRALTGIAVEQDKNTQEVFAQVKQIYKTPPIKDFGGFNFSQILPDPSKPSKRSFIEDLLFNKVTLADVGFIKQYGDCLGDIAARDLICAQKFNGLTVLPPLLTDEMIAQYCSALLAGTITSGWTFGAGAALQIPFAMQMAYRFNGIGVTQNVLYENQKLIANQFNSAIGKIQDSLSSTASALGKLQDVVNQNAQALNTLVKQLSSNFGAISSVLNDILSRLDKVEAEVQIDRLITGRLQSLQTYVTQQLIRAAEIRASANLAATKMSECVLGQSKRVDFCGKGYHLMSFPQCAPHGVVFLHVTYVPAQEKNFTTAPAICHDGKAHFPREGVFVSNGTHWFVTQRNFYEPQIITTDNTFVSGNCDVVIGIVNNTVYDPLQPELDSFKEELDKYFKNHTSPDVDLGDISGINASVVNIQKEIDRLNEVAKNLNESLIDLQELGKYEQYIK

SEQ ID NO: 2607 - protein, 1211 aa, Artificial Sequence
  SARS-CoV-2/Greece/16/2020__EPI_ISL_418265 spike protein (1-1211)(T874C_S1055C)
MFVFLVLLPLVSSQCVNLTTRTQLPPAYTNSFTRGVYYPDKVFRSSVLHSTQDLFLPFFSNVTWFHAIHVSGTNGTKRFDNPVLPFNDGVYFASTEKSNIIRGWIFGTTLDSKTQSLLIVNNATNVVIKVCEFQFCNDPFLGVYYHKNNKSWMESEFRVYSSANNCTFEYVSQPFLMDLEGKQGNFKNLREFVFKNVDGYFKIYSKHTPINLVRDLPQGFSALEPLVDLPIGINITRFQTLLALHRSYLTPGDSSSGWTAGAAAYYVGYLQPRTFLLKYNENGTITDAVDCALDPLSETKCTLKSFTVEKGIYQTSNFRVQPTESIVRFPNITNLCPFGEVFNATRFASVYAWNRKRISNCVADYSVLYNSASFSTFKCYGVSPTKLNDLCFTNVYADSFVIRGDEVRQIAPGQTGKIADYNYKLPDDFTGCVIAWNSNNLDSKVGGNYNYLYRLFRKSNLKPFERDISTEIYQAGSTPCNGVEGFNCYFPLQSYGFQPTNGVGYQPYRVVVLSFELLHAPATVCGPKKSTNLVKNKCVNFNFNGLTGTGVLTESNKKFLPFQQFGRDIADTTDAVRDPQTLEILDITPCSFGGVSVITPGTNTSNQVAVLYQDVNCTEVPVAIHADQLTPTWRVYSTGSNVFQTRAGCLIGAEHVNNSYECDIPIGAGICASYQTQTNSPRRARSVASQSIIAYTMSLGAENSVAYSNNSIAIPTNFTISVTTEILPVSMTKTSVDCTMYICGDSTECSNLLLQYGSFCTQLNRALTGIAVEQDKNTQEVFAQVKQIYKTPPIKDFGGFNFSQILPDPSKPSKRSFIEDLLFNKVTLADAGFIKQYGDCLGDIAARDLICAQKFNGLTVLPPLLTDEMIAQYCSALLAGTITSGWTFGAGAALQIPFAMQMAYRFNGIGVTQNVLYENQKLIANQFNSAIGKIQDSLSSTASALGKLQDVVNQNAQALNTLVKQLSSNFGAISSVLNDILSRLDKVEAEVQIDRLITGRLQSLQTYVTQQLIRAAEIRASANLAATKMSECVLGQSKRVDFCGKGYHLMSFPQCAPHGVVFLHVTYVPAQEKNFTTAPAICHDGKAHFPREGVFVSNGTHWFVTQRNFYEPQIITTDNTFVSGNCDVVIGIVNNTVYDPLQPELDSFKEELDKYFKNHTSPDVDLGDISGINASVVNIQKEIDRLNEVAKNLNESLIDLQELGKYEQYIK

SEQ ID NO: 2608 - protein, 1211 aa, Artificial Sequence
  SARS-CoV-2/Iceland/319/2020__EPI_ISL_417648 spike protein (1-1211)(T874C_S1055C)
MFVFLVLLPLVSSQCVNLTTRTQLPPAYTNSFTRGVYYPDKVFRSSVLHSTQDLFLPFFSNVTWFHAIHVSGTNGTKRFDNPVLPFNDGVYFASTEKSNIIRGWIFGTTLDSKTQSLLIVNNATNVVIKVCEFQFCNDPFLGVYYHKNNKSWMESEFRVYSSANNCTFEYVSQPFLIDLEGKQGNFKNLREFVFKNIDGYFKIYSKHTPINLVRDLPQGFSALEPLVDLPIGINITRFQTLLALHRSYLTPGDSSSGWTAGAAAYYVGYLQPRTFLLKYNENGTITDAVDCALDPLSETKCTLKSFTVEKGIYQTSNFRVQPTESIVRFPNITNLCPFGEVFNATRFASVYAWNRKRISNCVADYSVLYNSASFSTFKCYGVSPTKLNDLCFTNVYADSFVIRGDEVRQIAPGQTGKIADYNYKLPDDFTGCVIAWNSNNLDSKVGGNYNYLYRLFRKSNLKPFERDISTEIYQAGSTPCNGVEGFNCYFPLQSYGFQPTNGVGYQPYRVVVLSFELLHAPATVCGPKKSTNLVKNKCVNFNFNGLTGTGVLTESNKKFLPFQQFGRDIADTTDAVRDPQTLEILDITPCSFGGVSVITPGTNTSNQVAVLYQGVNCTEVPVAIHADQLTPTWRVYSTGSNVFQTRAGCLIGAEHVNNSYECDIPIGAGICASYQTQTNSPRRARSVASQSIIAYTMSLGAENSVAYSNNSIAIPTNFTISVTTEILPVSMTKTSVDCTMYICGDSTECSNLLLQYGSFCTQLNRALTGIAVEQDKNTQEVFAQVKQIYKTPPIKDFGGFNFSQILPDPSKPSKRSFIEDLLFNKVTLADAGFIKQYGDCLGDIAARDLICAQKFNGLTVLPPLLTDEMIAQYCSALLAGTITSGWTFGAGAALQIPFAMQMAYRFNGIGVTQNVLYENQKLIANQFNSAIGKIQDSLSSTASALGKLQDVVNQNAQALNTLVKQLSSNFGAISSVLNDILSRLDKVEAEVQIDRLITGRLQSLQTYVTQQLIRAAEIRASANLAATKMSECVLGQSKRVDFCGKGYHLMSFPQCAPHGVVFLHVTYVPAQEKNFTTAPAICHDGKAHFPREGVFVSNGTHWFVTQRNFYEPQIITTDNTFVSGNCDVVIGIVNNTVYDPLQPELDSFKEELDKYFKNHTSPDVDLGDISGINASVVNIQKEIDRLNEVAKNLNESLIDLQELGKYEQYIK

SEQ ID NO: 2609 - protein, 1211 aa, Artificial Sequence
  SARS-CoV-2/Congo/94/2020__EPI_ISL_417947 spike protein (1-1211)(T874C_S1055C)
MFVFLVLLPLVSSQCVNLTTRTQLPPAYTNSFTRGVYYPDKVFRSSVLHSTQDLFLPFFSNVTWFHAIHVSGTNGTKRFDNPVLPFNDGVYFASTEKSNIIRGWIFGTTLDSKTQSLLIVNNATNVVIKVCEFQFCNDPFLGVYYHKNNKSWMESEFRVYSSANNCTFEYVSQPFLMDLEGKQGNFKNLREFVFKNIDGYFKIYSKHTPINLVRDLPQGFSALEPLVDLPIGINITRFQTLLALHRSYLTPGDSSSGWTAGAAAYYVGYLQPRTFLLKYNENGTITDAVDCALDPLSETKCTLKSFTVEKGIYQTSNFRVQPTESIVRFPNITNLCPFGEVFNATRFASVYAWNRKRISNCVADYSVLYNSASFSTFKCYGVSPTKLNDLCFTNVYADSFVIRGDEVRQIAPGQTGKIADYNYKLPDDFTGCVIAWNSNNLDSKVGGNYNYLYRLFRKSNLKPFERDISTEIYQAGSTPCNGVEGFNCYFPLQSYGFQPTNGVGYQPYRVVVLSFELLHAPATVCGPKKSTNLVKNKCVNFNFNGLTGTGVLTESNKKFLPFQQFGRDIADTTDAVRDPQTLEILDITPCSFGGVSVITPGTNTSNQVAVLYQGVNCTEVPVAIHADQLTPTWRVYSTGSNVFQTRAGCLIGAEHVNNSYECDIPIGAGICASYQTQTNSPRRARSVASQSIIAYTMSLGAENSVAYSNNSIAIPTNFTISVTTEILPVSMTKTSVDCTMYICGDSTECSNLLLQYGSFCTQLNRALTGIAVEQDKNTQEVFAQVKQIYKTPPIKDFGGFNFSQILPDPSKPSKRSFIEDILFNKVTLADAGFIKQYGDCLGDIAARDLICAQKFNGLTVLPPLLTDEMIAQYCSALLAGTITSGWTFGAGAALQIPFAMQMAYRFNGIGVTQNVLYENQKLIANQFNSAIGKIQDSLSSTASALGKLQDVVNQNAQALNTLVKQLSSNFGAISSVLNDILSRLDKVEAEVQIDRLITGRLQSLQTYVTQQLIRAAEIRASANLAATKMSECVLGQSKRVDFCGKGYHLMSFPQCAPHGVVFLHVTYVPAQEKNFTTAPAICHDGKAHFPREGVFVSNGTHWFVTQRNFYEPQIITTDNTFVSGNCDVVIGIVNNTVYDPLQPELDSFKEELDKYFKNHTSPDVDLGDISGINASVVNIQKEIDRLNEVAKNLNESLIDLQELGKYEQYIK

SEQ ID NO: 2610 - protein, 1211 aa, Artificial Sequence
  SARS-CoV-2/Congo/158/2020__EPI_ISL_417950 spike protein (1-1211)(T874C_S1055C)
MFVFLVLLPLVSSQCVNLTTRTQLPPAYTNSFTRGVYYPDKVFRSSVLHSTQDLFLPFFSNVTWFHAIHVSGTNGTKRFDNPVLPFNDGVYFASTEKSNIIRGWIFGTTLDSKTQSLLIVNNATNVVIKVCEFQFCNDPFLGVYYHKNNKSWMESEFRVYSSANNCTFEYVSQPFLMDLEGKQGNFKNLREFVFKNIDGYFKIYSKHTPINLVRDLPQGFSALEPLVDLPIGINITRFQTLLALHRSYLTPGDSSSGWTAGAAAYYVGYLQPRTFLLKYNENGTITDAVDCALDPLSETKCTLKSFTVEKGIYQTSNFRVQPTESIVRFPNITNLCPFGEVFNATRFASVYAWNRKRISNCVADYSVLYNSASFSTFKCYGVSPTKLNDLCFTNVYADSFVIRGDEVRQIAPGQTGKIADYNYKLPDDFTGCVIAWNSNNLDSKVGGNYNYLYRLFRKSNLKPFERDISTEIYQAGSTPCNGVEGFNCYFPLQSYGFQPTNGVGYQPYRVVVLSFELLHAPATVCGPKKSTNLVKNKCVNFNFNGLTGTGVLTESNKKFLPFQQFGRDIADTTDAVRDPQTLEILDITPCSFGGVSVITPGTNTSNQVAVLYQDVNCTEVPVAIHADQLTPTWRVYSTGSNVFQTRAGCLIGAEHVNNSYECDIPIGAGICASYQTQTNSPRRARSVASQSIIAYTMSLGAENSVAYSNNSIAIPTNFTISVTTEILPVSMTKTSVDCTMYICGDSTECSNLLLQYGSFCTQLNRALTGIAVEQDKNTQEVFAQVKQIYKTPPIKDFGGFNFSQILPDPSKPSKRSFIEDLLFNKVTLADAGFIKQYGDCLGDIAARDLICAQKFNGLTVLPPLLTDEMIAQYCSALLAGTITSGWTFGAGAALQIPFAMQMAYRFNGIGVTQNVLYENQKLIANQFNSAIGKIQDSLSSTASALGKLQDVVNQNAQALNTLVKQLSSNFGAISSVLNDILSRLDKVEAEVQIDRLITGRLQSLQTYVTQQLIRAAEIRASANLAATKMSECVLGQSKRVDFCGKGYHLMSFPQCAPHGVVFLHVTYVPAQEKNFTTAPAICHDGKAHFPREGVFVSNGTHWFVTQRNFYEPQIITTDNTFLSGNCDVVIGIVNNTVYDPLQPELDSFKEELDKYFKNHTSPDVDLGDISGINASVVNIQKEIDRLNEVAKNLNESLIDLQELGKYEQYIK

SEQ ID NO: 2611 - protein, 1211 aa, Artificial Sequence
  SARS-CoV-2/USA/UT-00034/2020__EPI_ISL_417977 spike protein (1-1211)(T874C_S1055C)
MFVFLVLLPLVSSQCVNLTTRTQLPPAYTNSFTRGVYYPDKVFRSSVLHSTQDLFLPFFSNVTWFHAIHVSGTNGTKRFDNPVLPFNDGVYFASTEKSNIIRGWIFGTTLDSKTQSLLIVNNATNVVIKVCEFQFCNDPFLGVYYYKNNKSWMESEFRVYSSANNCTFEYVSQPFLMDLEGKQGNFKNLREFVFKNIDGYFKIYSKHTPINLVRDLPQGFSALEPLVDLPIGINITRFQTLLALHRSYLTPGDSSSGWTAGAAAYYVGYLQPRTFLLKYNENGTITDAVDCALDPLSETKCTLKSFTVEKGIYQTSNFRVQPTESIVRFPNITNLCPFGEVFNATRFASVYAWNRKRISNCVADYSVLYNSASFSTFKCYGVSPTKLNDLCFTNVYADSFVIRGDEVRQIAPGQTGKIADYNYKLPDDFTGCVIAWNSNNLDSKVGGNYNYLYRLFRKSNLKPFERDISTEIYQAGSTPCNGVEGFNCYFPLQSYGFQPTNGVGYQPYRVVVLSFELLHAPATVCGPKKSTNLVKNKCVNFNFNGLTGTGVLTESNKKFLPFQQFGRDIADTTDAVRDPQTLEILDITPCSFGGVSVITPGTNTSNQVAVLYQGVNCTEVPVAIHADQLTPTWRVYSTGSNVFQTRAGCLIGAEHVNNSYECDIPIGAGICASYQTQTNSPRRARSVASQSIIAYTMSLGAENSVAYSNNSIAIPTNFTISVTTEILPVSMTKTSVDCTMYICGDSTECSNLLLQYGSFCTQLNRALTGIAVEQDKNTQEVFAQVKQIYKTPPIKDFGGFNFSQILPDPSKPSKRSFIEDLLFNKVTLADAGFIKQYGDCLGDIAARDLICAQKFNGLTVLPPLLTDEMIAQYCSALLAGTITSGWTFGAGAALQIPFAMQMAYRFNGIGVTQNVLYENQKLIANQFNSAIGKIQDSLSSTASALGKLQDVVNQNAQALNTLVKQLSSNFGAISSVLNDILSRLDKVEAEVQIDRLITGRLQSLQTYVTQQLIRAAEIRASANLAATKMSECVLGQSKRVDFCGKGYHLMSFPQCAPHGVVFLHVTYVPAQEKNFTTAPAICHDGKAHFPREGVFVSNGTHWFVTQRNFYEPQIITTDNTFVSGNCDVVIGIVNNTVYDPLQPELDSFKEELDKYFKNHTSPDVDLGDISGINASVVNIQKEIDRLNEVAKNLNESLIDLQELGKYEQYIK

SEQ ID NO: 2612 - protein, 1211 aa, Artificial Sequence
  SARS-CoV-2/USA/UT-00033/2020__EPI_ISL_417976 spike protein (1-1211)(T874C_S1055C)
MFVFLVLLPLVSSQCVNLTTRTQLPPAYTNSFTRGVYYPDKVFRSSVLHSTQDLFLPFFSNVTWFHAIHVSGTNGTKRFDNPVLPFNDGVYFASTEKSNIIRGWIFGTTLDSKTQSLLIVNNATNVVIKVCEFQFCNDPFLGVYYHKNNKSWMESEFRVYSSANNCTFEYVSQPFLMDLEGKQGNFKNLREFVFKNIDGYFKIYSKHTPINLVRDLPQGFSALEPLVDLPIGINITRFQTLLALHRSYLTPGDSSSGLTAGAAAYYVGYLQPRTFLLKYNENGTITDAVDCALDPLSETKCTLKSFTVEKGIYQTSNFRVQPTESIVRFPNITNLCPFGEVFNATRFASVYAWNRKRISNCVADYSVLYNSASFSTFKCYGVSPTKLNDLCFTNVYADSFVIRGDEVRQIAPGQTGKIADYNYKLPDDFTGCVIAWNSNNLDSKVGGNYNYLYRLFRKSNLKPFERDISTEIYQAGSTPCNGVEGFNCYFPLQSYGFQPTNGVGYQPYRVVVLSFELLHAPATVCGPKKSTNLVKNKCVNFNFNGLTGTGVLTESNKKFLPFQQFGRDIADTTDAVRDPQTLEILDITPCSFGGVSVITPGTNTSNQVAVLYQGVNCTEVPVAIHADQLTPTWRVYSTGSNVFQTRAGCLIGAEHVNNSYECDIPIGAGICASYQTQTNSPRRARSVASQSIIAYTMSLGAENSVAYSNNSIAIPTNFTISVTTEILPVSMTKTSVDCTMYICGDSTECSNLLLQYGSFCTQLNRALTGIAVEQDKNTQEVFAQVKQIYKTPPIKDFGGFNFSQILPDPSKPSKRSFIEDLLFNKVTLADAGFIKQYGDCLGDIAARDLICAQKFNGLTVLPPLLTDEMIAQYCSALLAGTITSGWTFGAGAALQIPFAMQMAYRFNGIGVTQNVLYENQKLIANQFNSAIGKIQDSLSSTASALGKLQDVVNQNAQALNTLVKQLSSNFGAISSVLNDILSRLDKVEAEVQIDRLITGRLQSLQTYVTQQLIRAAEIRASANLAATKMSECVLGQSKRVDFCGKGYHLMSFPQCAPHGVVFLHVTYVPAQEKNFTTAPAICHDGKAHFPREGVFVSNGTHWFVTQRNFYEPQIITTDNTFVSGNCDVVIGIVNNTVYDPLQPELDSFKEELDKYFKNHTSPDVDLGDISGINASVVNIQKEIDRLNEVAKNLNESLIDLQELGKYEQYIK

SEQ ID NO: 2613 - protein, 1211 aa, Artificial Sequence
  SARS-CoV-2/USA/WI-13/2020__EPI_ISL_417516 spike protein (1-1211)(T874C_S1055C)
MFVFLVLLPLVSSQCVNLTTRTQLPPAYTNSFTRGVYYPDKVFRSSVLHSTQDLFLPFFSNVTWFHAIHVSGTNGTKRFDNPVLPFNDGVYFASTEKSNIIRGWIFGTTLDSKTQSLLIVNNATNVVIKVCEFQFCNDPFLGVYYHKNNKSWMESEFRVYSSANNCTFEYVSQPFLMDLEGKQGNFKNLREFVFKNIDGYFKIYSKHTPINLVRDLPQGFSALEPLVDLPIGINITRFQTLLALHRSYLTPGDSSSGWTAGAAAYYVGYLQPRTFLLKYNENGTITDAVDCALDPLSETKCTLKSFTVEKGIYQTSNFRVLPTESIVRFPNITNLCPFGEVFNATRFASVYAWNRKRISNCVADYSVLYNSASFSTFKCYGVSPTKLNDLCFTNVYADSFVIRGDEVRQIAPGQTGKIADYNYKLPDDFTGCVIAWNSNNLDSKVGGNYNYLYRLFRKSNLKPFERDISTEIYQAGSTPCNGVEGFNCYFPLQSYGFQPTNGVGYQPYRVVVLSFELLHAPATVCGPKKSTNLVKNKCVNFNFNGLTGTGVLTESNKKFLPFQQFGRDIADTTDAVRDPQTLEILDITPCSFGGVSVITPGTNTSNQVAVLYQGVNCTEVPVAIHADQLTPTWRVYSTGSNVFQTRAGCLIGAEHVNNSYECDIPIGAGICASYQTQTNSPRRARSVASQSIIAYTMSLGAENSVAYSNNSIAIPTNFTISVTTEILPVSMTKTSVDCTMYICGDSTECSNLLLQYGSFCTQLNRALTGIAVEQDKNTQEVFAQVKQIYKTPPIKDFGGFNFSQILPDPSKPSKRSFIEDLLFNKVTLADAGFIKQYGDCLGDIAARDLICAQKFNGLTVLPPLLTDEMIAQYCSALLAGTITSGWTFGAGAALQIPFAMQMAYRFNGIGVTQNVLYENQKLIANQFNSAIGKIQDSLSSTASALGKLQDVVNQNAQALNTLVKQLSSNFGAISSVLNDILSRLDKVEAEVQIDRLITGRLQSLQTYVTQQLIRAAEIRASANLAATKMSECVLGQSKRVDFCGKGYHLMSFPQCAPHGVVFLHVTYVPAQEKNFTTAPAICHDGKAHFPREGVFVSNGTHWFVTQRNFYEPQIITTDNTFVSGNCDVVIGIVNNTVYDPLQPELDSFKEELDKYFKNHTSPDVDLGDISGINASVVNIQKEIDRLNEVAKNLNESLIDLQELGKYEQYIK

SEQ ID NO: 2614 - protein, 1210 aa, Artificial Sequence
  SARS-CoV-2/India/1-27/2020__EPI_ISL_413522 spike protein (1-1210)(T873C_S1054C)
MFVFLVLLPLVSSQCVNLTTRTQLPPAYTNSFTRGVYYPDKVFRSSVLHSTQDLFLPFFSNVTWFHAIHVSGTNGTKRFDNPVLPFNDGVYFASTEKSNIIRGWIFGTTLDSKTQSLLIVNNATNVVIKVCEFQFCNDPFLGVYHKNNKSWMESEFRVYSSANNCTFEYVSQPFLMDLEGKQGNFKNLREFVFKNIDGYFKIYSKHTPINLVRDLPQGFSALEPLVDLPIGINITRFQTLLALHRSYLTPGDSSSGWTAGAAAYYVGYLQPRTFLLKYNENGTITDAVDCALDPLSETKCTLKSFTVEKGIYQTSNFRVQPTESIVRFPNITNLCPFGEVFNATRFASVYAWNRKRISNCVADYSVLYNSASFSTFKCYGVSPTKLNDLCFTNVYADSFVIRGDEVIQIAPGQTGKIADYNYKLPDDFTGCVIAWNSNNLDSKVGGNYNYLYRLFRKSNLKPFERDISTEIYQAGSTPCNGVEGFNCYFPLQSYGFQPTNGVGYQPYRVVVLSFELLHAPATVCGPKKSTNLVKNKCVNFNFNGLTGTGVLTESNKKFLPFQQFGRDIADTTDAVRDPQTLEILDITPCSFGGVSVITPGTNTSNQVAVLYQDVNCTEVPVAIHADQLTPTWRVYSTGSNVFQTRAGCLIGAEHVNNSYECDIPIGAGICASYQTQTNSPRRARSVASQSIIAYTMSLGAENSVAYSNNSIAIPTNFTISVTTEILPVSMTKTSVDCTMYICGDSTECSNLLLQYGSFCTQLNRALTGIAVEQDKNTQEVFAQVKQIYKTPPIKDFGGFNFSQILPDPSKPSKRSFIEDLLFNKVTLADAGFIKQYGDCLGDIAARDLICAQKFNGLTVLPPLLTDEMIAQYCSALLAGTITSGWTFGAGAALQIPFAMQMAYRFNGIGVTQNVLYENQKLIANQFNSAIGKIQDSLSSTASALGKLQDVVNQNAQALNTLVKQLSSNFGAISSVLNDILSRLDKVEAEVQIDRLITGRLQSLQTYVTQQLIRAAEIRASANLAATKMSECVLGQSKRVDFCGKGYHLMSFPQCAPHGVVFLHVTYVPAQEKNFTTAPAICHDGKAHFPREGVFVSNGTHWFVTQRNFYEPQIITTDNTFVSGNCDVVIGIVNNTVYDPLQPELDSFKEELDKYFKNHTSPDVDLGDISGINASVVNIQKEIDRLNEVAKNLNESLIDLQELGKYEQYIK

SEQ ID NO: 2615 - protein, 1205 aa, Artificial Sequence
  SARS-CoV-2/pangolin/Guangxi/P4L/2017__EPI_ISL_410538 spike protein (1-1205)(T868C_S1049C)
MFVFLFVLPLVSSQCVNLTTRTGIPPGYTNSSTRGVYYPDKVFRSSILHLTQDLFLPFFSNVTWFNTINYQGGFKKFDNPVLPFNDGVYFASTEKSNIIRGWIFGTTLDARTQSLLIVNNATNVVIKVCEFQFCTDPFLGVYYHNNNKTWVENEFRVYSSANNCTFEYISQPFLMDLEGKQGNFKNLREFVFKNVDGYFKIYSKHTPIDLVRDLPRGFAALEPLVDLPIGINITRFQTLLALHRSYLTPGNLESGWTTGAAAYYVGYLQQRTFLLSYNQNGTITDAVDCSLDPLSETKCTLKSLTVEKGIYQTSNFRVQPTISIVRFPNITNLCPFGEVFNASKFASVYAWNRKRISNCVADYSVLYNSTSFSTFKCYGVSPTKLNDLCFTNVYADSFVVKGDEVRQIAPGQTGVIADYNYKLPDDFTGCVIAWNSVKQDALTGGNYGYLYRLFRKSKLKPFERDISTEIYQAGSTPCNGQVGLNCYYPLERYGFHPTTGVNYQPFRVVVLSFELLNGPATVCGPKLSTTLVKDKCVNFNFNGLTGTGVLTTSKKQFLPFQQFGRDISDTTDAVRDPQTLEILDITPCSFGGVSVITPGTNTSNQVAVLYQDVNCTEVPMAIHAEQLTPAWRVYSAGANVFQTRAGCLVGAEHVNNSYECDIPVGAGICASYHSMSSLRSVNQRSIIAYTMSLGAENSVAYSNNSIAIPTNFTISVTTEILPVSMTKTSVDCTMYICGDSIECSNLLLQYGSFCTQLNRALTGIAVEQDKNTQEVFAQVKQIYKTPPIKDFGGFNFSQILPDPSKPSKRSFIEDLLFNKVTLADAGFIKQYGDCLGDIAARDLICAQKFNGLTVLPPLLTDEMIAQYCSALLAGTITSGWTFGAGAALQIPFAMQMAYRFNGIGVTQNVLYENQKLIANQFNSAIGKIQDSLSSTASALGKLQDVVNQNAQALNTLVKQLSSNFGAISSVLNDILSRLDKVEAEVQIDRLITGRLQSLQTYVTQQLIRAAEIRASANLAATKMSECVLGQSKRVDFCGKGYHLMSFPQCAPHGVVFLHVTYVPAQEKNFTTAPAICHEGKAHFPREGVFVSNGTHWFITQRNFYEPQIITTDNTFVSGSCDVVIGIVNNTVYDPLQPELDSFKEELDKYFKNHTSPDVDLGDISGINASVVNIQKEIDRLNEVAKNLNESPIDLQELGKYEQYIK

SEQ ID NO: 2616 - protein, 1205 aa, Artificial Sequence
  SARS-CoV-2/pangolin/Guangxi/P5L/2017__EPI_ISL_410540 spike protein (1-1205)(T868C_S1049C)
MFVFLFVLPLVSSQCVNLTTRTGIPPGYTNSSTRGVYYPDKVFRSSILHLTQDLFLPFFSNVTWFNTINYQGGFKKFDNPVLPFNDGVYFASTEKSNIIRGWIFGTTLDARTQSLLIVNNATNVVIKVCEFQFCTDPFLGVYYHNNNKTWVENEFRVYSSANNCTFEYISQPFLMDLEGKQGNFKNLREFVFKNVDGYFKIYSKHTPIDLVRDLPRGFAALEPLVDLPIGINITRFQTLLALHRSYLTPGKLESGWTTGAAAYYVGYLQQRTFLLSYNQNGTITDAVDCSLDPLSETKCTLKSLTVEKGIYQTSNFRVQPTISIVRFPNITNLCPFGEVFNASKFASVYAWNRKRISNCVADYSVLYNSTSFSTFKCYGVSPTKLNDLCFTNVYADSFVVKGDEVRQIAPGQTGVIADYNYKLPDDFTGCVIAWNSVKQDALTGGNYGYLYRLFRKSKLKPFERDISTEIYQAGSTPCNGQVGLNCYYPLERYGFHPTTGVNYQPFRVVVLSFELLNGPATVCGPKLSTTLVKDKCVNFNFNGLTGTGVLTTSKKQFLPFQQFGRDISDTTDAVRDPQTLEILDITPCSFGGVSVITPGTNTSNQVAVLYQDVNCTEVPMAIHAEQLTPAWRVYSAGANVFQTRAGCLVGAEHVNNSYECDIPVGAGICASYHSMSSFRSVNQRSIIAYTMSLGAENSVAYSNNSIAIPTNFTISVTTEILPVSMTKTSVDCTMYICGDSIECSNLLLQYGSFCTQLNRALTGIAVEQDKNTQEVFAQVKQIYKTPPIKDFGGFNFSQILPDPSKPSKRSFIEDLLFNKVTLADAGFIKQYGDCLGDIAARDLICAQKFNGLTVLPPLLTDEMIAQYCSALLAGTITSGWTFGAGAALQIPFAMQMAYRFNGIGVTQNVLYENQKLIANQFNSAIGKIQDSLSSTASALGKLQDVVNQNAQALNTLVKQLSSNFGAISSVLNDILSRLDKVEAEVQIDRLITGRLQSLQTYVTQQLIRAAEIRASANLAATKMSECVLGQSKRVDFCGKGYHLMSFPQCAPHGVVFLHVTYVPAQEKNFTTAPAICHEGKAHFPREGVFVSNGTHWFITQRNFYEPQIITTDNTFVSGSCDVVIGIVNNTVYDPLQPELDSFKEELDKYFKNHTSPDVDLGDISGINASVVNIQKEIDRLNEVAKNLNESLIDLQELGKYEQYIK

SEQ ID NO: 2617 - protein, 1205 aa, Artificial Sequence
  SARS-CoV-2/pangolin/Guangxi/P5E/2017__EPI_ISL_410541 spike protein (1-1205)(T868C_S1049C)
MFVFLFVLPLVSSQCVNLTTRTGIPPGYTNSSTRGVYYPDKVFRSSILHLTQDLFLPFFSNVTWFNTITYQGGSKKFDNPVLPFNDGVYFASTEKSNIIRGWIFGTTLDARTQSLLIVNNATNVVIKVCEFQFCTDPFLGVYYHNNNKTWVENEFRVYSSANNCTFEYISQPFLMDLEGKQGNFKNLREFVFKNVDGYFKIYSKHTPIDLVRDLPRGFAALEPLVDLPIGINITRFQTLLALHRSYLTPGKLESGWTTGAAAYYVGYLQQRTFLLSYNQNGTITDAVDCSLDPLSETKCTLKSLTVEKGIYQTSNFRVQPTISIVRFPNITNLCPFGEVFNASKFASVYAWNRKRISNCVADYSVLYNSTSFSTFKCYGVSPTKLNDLCFTNVYADSFVVKGDEVRQIAPGQTGVIADYNYKLPDDFTGCVIAWNSVKQDALTGDNYGYLYRLFRKSKLKPFERDISTEIYQAGSTPCNGQVGLNCYYPLERYGFHPTTGVNYQPFRVVVLSFELLNGPATVCGPKLSTTLVKDKCVNFNFNGLTGTGVLTTSKKQFLPFQQFGRDISDTTDAVRDPQTLEILDITPCSFGGVSVITPGTNTSNQVAVLYQDVNCTEVPMAIHAEQLTPAWRVYSAGANVFQTRAGCLVGAEHVNNSYECDIPVGAGICASYHSMSSFRSVNQRSIIAYTMSLGAENSVAYSNNSIAIPTNFTISVTTEILPVSMTKTSVDCTMYICGDSIECSNLLLQYGSFCTQLNRALTGIAVEQDKNTQEVFAQVKQIYKTPPIKDFGGFNFSQILPDPSKPSKRSFIEDLLFNKVTLADAGFIKQYGDCLGDIAARDLICAQKFNGLTVLPPLLTDEMIAQYCSALLAGTITSGWTFGAGAALQIPFAMQMAYRFNGIGVTQNVLYENQKLIANQFNSAIGKIQDSLSSTASALGKLQDVVNQNAQALNTLVKQLSSNFGAISSVLNDILSRLDKVEAEVQIDRLITGRLQSLQTYVTQQLIRAAEIRASANLAATKMSECVLGQSKRVDFCGKGYHLMSFPQCAPHGVVFLHVTYVPAQEKNFTTAPAICHEGKAHFPREGVFVSNGTHWFITQRNFYEPQIITTDNTFVSGSCDVVIGIVNNTVYDPLQPELDSFKEELDKYFKNHTSPDVDLGDISGINASVVNIQKEIDRLNEVAKNLNESLIDLQELGKYEQYIK

SEQ ID NO: 2618 - protein, 1203 aa, Artificial Sequence
  SARS-CoV-2/pangolin/Guangxi/P1E/2017__EPI_ISL_410539 spike protein (1-1203)(T866C_S1047C)
MFVFLFVLPLVSSQCVNLTTRTGIQPGYTNSSTRGVYYPDKVFRSSILHLTQDLFLPFFSNVTWFNTINYQGGFKKFDNPVLPFNDGVYFASTEKSNIIRGWIFGTTLDARTQSLLIVNNATNVVIKVCEFQFCTDPFLGVYYHNNNKTWVENEFRVYSSANNCTFEYISQPFLMDLEGKQGNFKNLREFVFKNVDGYFKIYSKHTPIDLVRDLPRGFAALEPLVDLPIGINITRFQTLLALHRSYLTPGKLESGWTTGAAAYYVGYLQQRTFLLSYNQNGTITDAVDCSLDPLSETKCTLKSLTVEKGIYQTSNFRVQPTISIVRFPNITNLCPFGEVFNASKFASVYAWNRKRISNCVADYSVLYNSTSFSTFKCYGVSPTKLNDLCFTNVYADSFVVKGDEVRQIAPGQTGVIADYNYKLPDDFTGCVIAWNSVKQDALTGGNYLYRLFRKSKLKPFERDISTEIYQAGSTPCNGQVGLNCYYPLERYGFHPTTGVNYQPFRVVVLSFELLNGPATVCGPKLSTTLVKDKCVNFNFNGLTGTGVLTTSKKQFLPFQQFGRDISDTTDAVRDPQTLEILDITPCSFGGVSVITPGTNTSNQVAVLYQDVNCTEVPMAIHAEQLTPAWRVYSAGANVFQTRAGCLVGAEHVNNSYECDIPVGAGICASYHSMSSLRSVNQRSIIAYTMSLGAENSVAYSNNSIAIPTNFTISVTTEILPVSMTKTSVDCTMYICGDSIECSNLLLQYGSFCTQLNRALTGIAVEQDKNTQEVFAQVKQIYKTPPIKDFGGFNFSQILPDPSKPSKRSFIEDLLFNKVTLADAGFIKQYGDCLGDIAARDLICAQKFNGLTVLPPLLTDEMIAQYCSALLAGTITSGWTFGAGAALQIPFAMQMAYRFNGIGVTQNVLYENQKLIANQFNSAIGKIQDSLSSTASALGKLQDVVNQNAQALNTLVKQLSSNFGAISSVLNDILSRLDKVEAEVQIDRLITGRLQSLQTYVTQQLIRAAEIRASANLAATKMSECVLGQSKRVDFCGKGYHLMSFPQCAPHGVVFLHVTYVPAQEKNFTTAPAICHEGKAHFPREGVFVSNGTHWFITQRNFYEPQIITTDNTFVSGSCDVVIGIVNNTVYDPLQPELDSFKEELDKYFKNHTSPDVDLGDISGINASVVNIQKEIDRLNEVAKNLNESLIDLQELGKYEQYIK

SEQ ID NO: 2619 - protein, 1147 aa, Artificial Sequence
  SARS-CoV-2/Wuhan/WIV05/2019__EPI_ISL_402128 spike protein (1-1147)
MFVFLVLLPLVSSQCVNLTTRTQLPPAYTNSFTRGVYYPDKVFRSSVLHSTQDLFLPFFSNVTWFHAIHVSGTNGTKRFDNPVLPFNDGVYFASTEKSNIIRGWIFGTTLDSKTQSLLIVNNATNVVIKVCEFQFCNDPFLGVYYHKNNKSWMESEFRVYSSANNCTFEYVSQPFLMDLEGKQGNFKNLREFVFKNIDGYFKIYSKHTPINLVRDLPQGFSALEPLVDLPIGINITRFQTLLALHRSYLTPGDSSSGWTAGAAAYYVGYLQPRTFLLKYNENGTITDAVDCALDPLSETKCTLKSFTVEKGIYQTSNFRVQPTESIVRFPNITNLCPFGEVFNATRFASVYAWNRKRISNCVADYSVLYNSASFSTFKCYGVSPTKLNDLCFTNVYADSFVIRGDEVRQIAPGQTGKIADYNYKLPDDFTGCVIAWNSNNLDSKVGGNYNYLYRLFRKSNLKPFERDISTEIYQAGSTPCNGVEGFNCYFPLQSYGFQPTNGVGYQPYRVVVLSFELLHAPATVCGPKKSTNLVKNKCVNFNFNGLTGTGVLTESNKKFLPFQQFGRDIADTTDAVRDPQTLEILDITPCSFGGVSVITPGTNTSNQVAVLYQDVNCTEVPVAIHADQLTPTWRVYSTGSNVFQTRAGCLIGAEHVNNSYECDIPIGAGICASYQTQTNSPRRARSVASQSIIAYTMSLGAENSVAYSNNSIAIPTNFTISVTTEILPVSMTKTSVDCTMYICGDSTECSNLLLQYGSFCTQLNRALTGIAVEQDKNTQEVFAQVKQIYKTPPIKDFGGFNFSQILPDPSKPSKRSFIEDLLFNKVTLADAGFIKQYGDCLGDIAARDLICAQKFNGLTVLPPLLTDEMIAQYTSALLAGTITSGWTFGAGAALQIPFAMQMAYRFNGIGVTQNVLYENQKLIANQFNSAIGKIQDSLSSTASALGKLQDVVNQNAQALNTLVKQLSSNFGAISSVLNDILSRLDKVEAEVQIDRLITGRLQSLQTYVTQQLIRAAEIRASANLAATKMSECVLGQSKRVDFCGKGYHLMSFPQSAPHGVVFLHVTYVPAQEKNFTTAPAICHDGKAHFPREGVFVSNGTHWFVTQRNFYEPQIITTDNTFVSGNCDVVIGIVNNTVYDPLQPELDS

SEQ ID NO: 2620 - protein, 1143 aa, Artificial Sequence
  SARS-CoV-2/bat/Yunnan/RaTG13/2013__EPI_ISL_402131 spike protein (1-1143)
MFVFLVLLPLVSSQCVNLTTRTQLPPAYTNSSTRGVYYPDKVFRSSVLHLTQDLFLPFFSNVTWFHAIHVSGTNGIKRFDNPVLPFNDGVYFASTEKSNIIRGWIFGTTLDSKTQSLLIVNNATNVVIKVCEFQFCNDPFLGVYYHKNNKSWMESEFRVYSSANNCTFEYVSQPFLMDLEGKQGNFKNLREFVFKNIDGYFKIYSKHTPINLVRDLPPGFSALEPLVDLPIGINITRFQTLLALHRSYLTPGDSSSGWTAGAAAYYVGYLQPRTFLLKYNENGTITDAVDCALDPLSETKCTLKSFTVEKGIYQTSNFRVQPTDSIVRFPNITNLCPFGEVFNATTFASVYAWNRKRISNCVADYSVLYNSTSFSTFKCYGVSPTKLNDLCFTNVYADSFVITGDEVRQIAPGQTGKIADYNYKLPDDFTGCVIAWNSKHIDAKEGGNFNYLYRLFRKANLKPFERDISTEIYQAGSKPCNGQTGLNCYYPLYRYGFYPTDGVGHQPYRVVVLSFELLNAPATVCGPKKSTNLVKNKCVNFNFNGLTGTGVLTESNKKFLPFQQFGRDIADTTDAVRDPQTLEILDITPCSFGGVSVITPGTNASNQVAVLYQDVNCTEVPVAIHADQLTPTWRVYSTGSNVFQTRAGCLIGAEHVNNSYECDIPIGAGICASYQTQTNSRSVASQSIIAYTMSLGAENSVAYSNNSIAIPTNFTISVTTEILPVSMTKTSVDCTMYICGDSTECSNLLLQYGSFCTQLNRALTGIAVEQDKNTQEVFAQVKQIYKTPPIKDFGGFNFSQILPDPSKPSKRSFIEDLLFNKVTLADAGFIKQYGDCLGDIAARDLICAQKFNGLTVLPPLLTDEMIAQYTSALLAGTITSGWTFGAGAALQIPFAMQMAYRFNGIGVTQNVLYENQKLIANQFNSAIGKIQDSLSSTASALGKLQDVVNQNAQALNTLVKQLSSNFGAISSVLNDILSRLDKVEAEVQIDRLITGRLQSLQTYVTQQLIRAAEIRASANLAATKMSECVLGQSKRVDFCGKGYHLMSFPQSAPHGVVFLHVTYVPAQEKNFTTAPAICHDGKAHFPREGVFVSNGTHWFVTQRNFYEPQIITTDNTFVSGSCDVVIGIVNNTVYDPLQPELDS

SEQ ID NO: 2621 - protein, 1147 aa, Artificial Sequence
  SARS-CoV-2/Wuhan/HBCDC-HB-01/2019__EPI_ISL_402132 spike protein (1-1147)
MFVFLVLLPLVSSQCVNLTTRTQLPPAYTNSITRGVYYPDKVFRSSVLHSTQDLFLPFFSNVTWFHAIHVSGTNGTKRFDNPVLPFNDGVYFASTEKSNIIRGWIFGTTLDSKTQSLLIVNNATNVVIKVCEFQFCNDPFLGVYYHKNNKSWMESEFRVYSSANNCTFEYVSQPFLMDLEGKQGNFKNLREFVFKNIDGYFKIYSKHTPINLVRDLPQGFSALEPLVDLPIGINITRFQTLLALHRSYLTPGDSSSGWTAGAAAYYVGYLQPRTFLLKYNENGTITDAVDCALDPLSETKCTLKSFTVEKGIYQTSNFRVQPTESIVRFPNITNLCPFGEVFNATRFASVYAWNRKRISNCVADYSVLYNSASFSTFKCYGVSPTKLNDLCFTNVYADSFVIRGDEVRQIAPGQTGKIADYNYKLPDDFTGCVIAWNSNNLDSKVGGNYNYLYRLFRKSNLKPFERDISTEIYQAGSTPCNGVEGFNCYFPLQSYGFQPTNGVGYQPYRVVVLSFELLHAPATVCGPKKSTNLVKNKCVNFNFNGLTGTGVLTESNKKFLPFQQFGRDIADTTDAVRDPQTLEILDITPCSFGGVSVITPGTNTSNQVAVLYQDVNCTEVPVAIHADQLTPTWRVYSTGSNVFQTRAGCLIGAEHVNNSYECDIPIGAGICASYQTQTNSPRRARSVASQSIIAYTMSLGAENSVAYSNNSIAIPTNFTISVTTEILPVSMTKTSVDCTMYICGDSTECSNLLLQYGSFCTQLNRALTGIAVEQDKNTQEVFAQVKQIYKTPPIKDFGGFNFSQILPDPSKPSKRSFIEDLLFNKVTLADAGFIKQYGDCLGDIAARDLICAQKFNGLTVLPPLLTDEMIAQYTSALLAGTITSGWTFGAGAALQIPFAMQMAYRFNGIGVTQNVLYENQKLIANQFNSAIGKIQDSLSSTASALGKLQDVVNQNAQALNTLVKQLSSNFGAISSVLNDILSRLDKVEAEVQIDRLITGRLQSLQTYVTQQLIRAAEIRASANLAATKMSECVLGQSKRVDFCGKGYHLMSFPQSAPHGVVFLHVTYVPAQEKNFTTAPAICHDGKAHFPREGVFVSNGTHWFVTQRNFYEPQIITTDNTFVSGNCDVVIGIVNNTVYDPLQPELDS

SEQ ID NO: 2622 - protein, 1147 aa, Artificial Sequence
  SARS-CoV-2/Guangdong/20SF028/2020__EPI_ISL_403936 spike protein (1-1147)
MFVFLVLLPLVSSQCVNLTTRTQLPPAYTNSFTRGVYYPDKVFRSSVLYSTQDLFLPFFSNVTWFHAIHVSGTNGTKRFDNPVLPFNDGVYFASTEKSNIIRGWIFGTTLDSKTQSLLIVNNATNVVIKVCEFQFCNDPFLGVYYHKNNKSWMESEFRVYSSANNCTFEYVSQPFLMDLEGKQGNFKNLREFVFKNIDGYFKIYSKHTPINLVRDLPQGFSALEPLVDLPIGINITRFQTLLALHRSYLTPGDSSSGWTAGAAAYYVGYLQPRTFLLKYNENGTITDAVDCALDPLSETKCTLKSFTVEKGIYQTSNFRVQPTESIVRFPNITNLCPFGEVFNATRFASVYAWNRKRISNCVADYSVLYNSASFSTFKCYGVSPTKLNDLCFTNVYADSFVIRGDEVRQIAPGQTGKIADYNYKLPDDFTGCVIAWNSNNLDSKVGGNYNYLYRLFRKSNLKPFERDISTEIYQAGSTPCNGVEGFNCYFPLQSYGFQPTNGVGYQPYRVVVLSFELLHAPATVCGPKKSTNLVKNKCVNFNFNGLTGTGVLTESNKKFLPFQQFGRDIADTTDAVRDPQTLEILDITPCSFGGVSVITPGTNTSNQVAVLYQDVNCTEVPVAIHADQLTPTWRVYSTGSNVFQTRAGCLIGAEHVNNSYECDIPIGAGICASYQTQTNSPRRARSVASQSIIAYTMSLGAENSVAYSNNSIAIPTNFTISVTTEILPVSMTKTSVDCTMYICGDSTECSNLLLQYGSFCTQLNRALTGIAVEQDKNTQEVFAQVKQIYKTPPIKDFGGFNFSQILPDPSKPSKRSFIEDLLFNKVTLADAGFIKQYGDCLGDIAARDLICAQKFNGLTVLPPLLTDEMIAQYTSALLAGTITSGWTFGAGAALQIPFAMQMAYRFNGIGVTQNVLYENQKLIANQFNSAIGKIQDSLSSTASALGKLQDVVNQNAQALNTLVKQLSSNFGAISSVLNDILSRLDKVEAEVQIDRLITGRLQSLQTYVTQQLIRAAEIRASANLAATKMSECVLGQSKRVDFCGKGYHLMSFPQSAPHGVVFLHVTYVPAQEKNFTTAPAICHDGKAHFPREGVFVSNGTHWFVTQRNFYEPQIITTDNTFVSGNCDVVIGIVNNTVYDPLQPELDS

SEQ ID NO: 2623 - protein, 1147 aa, Artificial Sequence
  SARS-CoV-2/Shenzhen/SZTH-001/2020__EPI_ISL_406592 spike protein (1-1147)
MFVFLVLLPLVSSQCVNLTTRTQLPPAYTNSFTRGVYYPDKVFRSSVLHSTQDLFLPFFSNVTWFHAIHVSGTNGTKRFDNPVLPFNDGVYFASTEKSNIIRGWIFGTTLDSKTQSLLIVNNATNVVIKVCEFQFCNDPFLGVYYHKNNKSWMESEFRVYSSANNCTFEYVSQPFLMDLEGKQGNFKNLREFVFKNIDGYFKIYSKHTPINLVRDLPQGFSALEPLVDLPIGINITRFQTLLALHRSYLTPGDSSSGWTAGAAAYYVGYLQPRTFLLKYNENGTITDAVDCALDPLSETKCTLKSFTVEKGIYQTSNFRVQPTESIVRFPNITNLCPFGEVFNATRFASVYAWNRKRISNCVADYSVLYNSASFSTFKCYGVSPTKLNDLCFTNVYADSFVIRGDEVRQIAPGQTGKIADYNYKLPDDFTGCVIAWNSNNLDSKVGGNYNYLYRLFRKSNLKPFERDISTEIYQAGSTPCNGVEGFNCYFPLQSYGFQPTNGVGYQPYRVVVLSFELLHAPATVCGPKKSTNLVKNKCVNFNFNGLTGTGVLTESNKKFLPFQQFGRDIADTTDAVRDPQTLEILDITPCSFGGVSVITPGTNTSNQVAVLYQDVNCTEVPVAIHADQLTPTWRVYSTGSNVFQTRAGCLIGAEHVNNSYECDIPIGAGICASYQTQTNSPRRARSVASQSIIAYTMSLGAENSVAYSNNSIAIPTNFTISVTTEILPVSMTKTSVDCTMYICGDSTECSNLLLQYGSFCTQLNRALTGIAVEQDKNTQEVFAQVKQIYKTPPIKDFGGFNFSQILPDPSKPSKRSFIEDLLFNKVTLADAGFIKQYGDCLGDIAARDLICAQKFNGLTVLPPLLTDEMIAQYTSALLAGTITSGWTFGAGAALQIPFAMQMAYRFNGIGVTQNVLYENQKLIANQFNSAIGKIQDSLSSTASALGKLQDVVNQNAQALNTLVKQLSSNFGAISSVLNDILSRLDKVEAEVQIDRLITGRLQSLQTYVTQQLIRAAEIRASANLAATKMSECVLGQSKRVDFCGKGYHLMSFPQSAPHGVVFLHVTYVPAQEKNFTTAPAICHDGKAHFPREGVFVSNGTHWFVTQRNFYEPQIITTDNTFVSGNCDVLIGIVNNTVYDPLQPELDS

SEQ ID NO: 2624 - protein, 1147 aa, Artificial Sequence
  SARS-CoV-2/Shenzhen/SZTH-004/2020__EPI_ISL_406595 spike protein (1-1147)
MFVFLVLLPLVSSQCVNLTTRTQLPPAYTNSFTRGVYYPDKVFRSSVLHSTQDLFLPFFSNVTWFHAIHVSGTNGTKRFDNPVLPFNDGVYFASTEKSNIIRGWIFGTTLDSKTQSLLIVNNATNVVIKVCEFQFCNDPFLGVYYHKNNKSWMESEFRVYSSANNCTFEYVSQPFLMDLEGKQGNFKNLREFVFKNIDGYFKIYSKHTPINLVRDLPQGFSALEPLVDLPIGINITRFQTLLALHRSYLTPGDSSSGWTAGAAAYYVGYLQPRTFLLKYNENGTITDAVDCALDPLSETKCTLKSFTVEKGIYQTSNFRVQPTESIVRFPNITNLCPFGEVFNATRFASVYAWDRKRISNCVAYYSVLYNSASFSTFKCYGVSPTKLNDLCFTNVYADSFVIRGDEVRQIAPGQTGKIADYNYKLPDDFTGCVIAWNSNNLDSKVGGNYNYLYRLFRKSNLKPFERDISTEIYQAGSTPCNGVEGFNCYFPLQSYGFQPTNGVGYQPYRVVVLSFELLHAPATVCGPKKSTNLVKNKCVNFNFNGLTGTGVLTESNKKFLPFQQFGRDIADTTDAVRDPQTLEILDITPCSFGGVSVITPGTNTSNQVAVLYQDVNCTEVPVAIHADQLTPTWRVYSTGSNVFQTRAGCLIGAEHVNNSYECDIPIGAGICASYQTQTNSPRRARSVASQSIIAYTMSLGAENSVAYSNNSIAIPTNFTISVTTEILPVSMTKTSVDCTMYICGDSTECSNLLLQYGSFCTQLNRALTGIAVEQDKNTQEVFAQVKQIYKTPPIKDFGGFNFSQILPDPSKPSKRSFIEDLLFNKVTLADAGFIKQYGDCLGDIAARDLICAQKFNGLTVLPPLLTDEMIAQYTSALLAGTITSGWTFGAGAALQIPFAMQMAYRFNGIGVTQNVLYENQKLIANQFNSAIGKIQDSLSSTASALGKLQDVVNQNAQALNTLVKQLSSNFGAISSVLNDILSRLDKVEAEVQIDRLITGRLQSLQTYVTQQLIRAAEIRASANLAATKMSECVLGQSKRVDFCGKGYHLMSFPQSAPHGVVFLHVTYVPAQEKNFTTAPAICHDGKAHFPREGVFVSNGTHWFVTQRNFYEPQIITTDNTFVSGNCDVVIGIVNNTVYDPLQPELDS

SEQ ID NO: 2625 - protein, 1147 aa, Artificial Sequence
  SARS-CoV-2/France/IDF0372/2020__EPI_ISL_406596 spike protein (1-1147)
MFVFLVLLPLVSSQCVNLTTRTQLPPAYTNSFTRGVYYPDKVFRSSVLHSTQDLFLPFFSNVTWFHAIHVSGTNGTKRFDNPVLPFNDGVYFASTEKSNIIRGWIFGTTLDSKTQSLLIVNNATNVVIKVCEFQFCNDPFLGVYYHKNNKSWMESEFRVYSSANNCTFEYVSQPFLMDLEGKQGNFKNLREFVFKNIDGYFKIYSKHTPINLVRDLPQGFSALEPLVDLPIGINITRFQTLLALHRSYLTPGDSSSGWTAGAAAYYVGYLQPRTFLLKYNENGTITDAVDCALDPLSETKCTLKSFTVEKGIYQTSNFRVQPTESIVRFPNITNLCPFGEVFNATRFASVYAWNRKRISNCVADYSFLYNSASFSTFKCYGVSPTKLNDLCFTNVYADSFVIRGDEVRQIAPGQTGKIADYNYKLPDDFTGCVIAWNSNNLDSKVGGNYNYLYRLFRKSNLKPFERDISTEIYQAGSTPCNGVEGFNCYFPLQSYGFQPTNGVGYQPYRVVVLSFELLHAPATVCGPKKSTNLVKNKCVNFNFNGLTGTGVLTESNKKFLPFQQFGRDIADTTDAVRDPQTLEILDITPCSFGGVSVITPGTNTSNQVAVLYQDVNCTEVPVAIHADQLTPTWRVYSTGSNVFQTRAGCLIGAEHVNNSYECDIPIGAGICASYQTQTNSPRRARSVASQSIIAYTMSLGAENSVAYSNNSIAIPTNFTISVTTEILPVSMTKTSVDCTMYICGDSTECSNLLLQYGSFCTQLNRALTGIAVEQDKNTQEVFAQVKQIYKTPPIKDFGGFNFSQILPDPSKPSKRSFIEDLLFNKVTLADAGFIKQYGDCLGDIAARDLICAQKFNGLTVLPPLLTDEMIAQYTSALLAGTITSGWTFGAGAALQIPFAMQMAYRFNGIGVTQNVLYENQKLIANQFNSAIGKIQDSLSSTASALGKLQDVVNQNAQALNTLVKQLSSNFGAISSVLNDILSRLDKVEAEVQIDRLITGRLQSLQTYVTQQLIRAAEIRASANLAATKMSECVLGQSKRVDFCGKGYHLMSFPQSAPHGVVFLHVTYVPAQEKNFTTAPAICHDGKAHFPREGVFVSNGTHWFVTQRNFYEPQIITTDNTFVSGNCDVVIGIVNNTVYDPLQPELDS

SEQ ID NO: 2626 - protein, 1147 aa, Artificial Sequence
  SARS-CoV-2/Australia/VIC01/2020__EPI_ISL_406844 spike protein (1-1147)
MFVFLVLLPLVSSQCVNLTTRTQLPPAYTNSFTRGVYYPDKVFRSSVLHSTQDLFLPFFSNVTWFHAIHVSGTNGTKRFDNPVLPFNDGVYFASTEKSNIIRGWIFGTTLDSKTQSLLIVNNATNVVIKVCEFQFCNDPFLGVYYHKNNKSWMESEFRVYSSANNCTFEYVSQPFLMDLEGKQGNFKNLREFVFKNIDGYFKIYSKHTPINLVRDLPQGFSALEPLVDLPIGINITRFQTLLALHRRYLTPGDSSSGWTAGAAAYYVGYLQPRTFLLKYNENGTITDAVDCALDPLSETKCTLKSFTVEKGIYQTSNFRVQPTESIVRFPNITNLCPFGEVFNATRFASVYAWNRKRISNCVADYSVLYNSASFSTFKCYGVSPTKLNDLCFTNVYADSFVIRGDEVRQIAPGQTGKIADYNYKLPDDFTGCVIAWNSNNLDSKVGGNYNYLYRLFRKSNLKPFERDISTEIYQAGSTPCNGVEGFNCYFPLQSYGFQPTNGVGYQPYRVVVLSFELLHAPATVCGPKKSTNLVKNKCVNFNFNGLTGTGVLTESNKKFLPFQQFGRDIADTTDAVRDPQTLEILDITPCSFGGVSVITPGTNTSNQVAVLYQDVNCTEVPVAIHADQLTPTWRVYSTGSNVFQTRAGCLIGAEHVNNSYECDIPIGAGICASYQTQTNSPRRARSVASQSIIAYTMSLGAENSVAYSNNSIAIPTNFTISVTTEILPVSMTKTSVDCTMYICGDSTECSNLLLQYGSFCTQLNRALTGIAVEQDKNTQEVFAQVKQIYKTPPIKDFGGFNFSQILPDPSKPSKRSFIEDLLFNKVTLADAGFIKQYGDCLGDIAARDLICAQKFNGLTVLPPLLTDEMIAQYTSALLAGTITSGWTFGAGAALQIPFAMQMAYRFNGIGVTQNVLYENQKLIANQFNSAIGKIQDSLSSTASALGKLQDVVNQNAQALNTLVKQLSSNFGAISSVLNDILSRLDKVEAEVQIDRLITGRLQSLQTYVTQQLIRAAEIRASANLAATKMSECVLGQSKRVDFCGKGYHLMSFPQSAPHGVVFLHVTYVPAQEKNFTTAPAICHDGKAHFPREGVFVSNGTHWFVTQRNFYEPQIITTDNTFVSGNCDVVIGIVNNTVYDPLQPELDS

SEQ ID NO: 2627 - protein, 1147 aa, Artificial Sequence
  SARS-CoV-2/Germany/BavPat1/2020__EPI_ISL_406862 spike protein (1-1147)
MFVFLVLLPLVSSQCVNLTTRTQLPPAYTNSFTRGVYYPDKVFRSSVLHSTQDLFLPFFSNVTWFHAIHVSGTNGTKRFDNPVLPFNDGVYFASTEKSNIIRGWIFGTTLDSKTQSLLIVNNATNVVIKVCEFQFCNDPFLGVYYHKNNKSWMESEFRVYSSANNCTFEYVSQPFLMDLEGKQGNFKNLREFVFKNIDGYFKIYSKHTPINLVRDLPQGFSALEPLVDLPIGINITRFQTLLALHRSYLTPGDSSSGWTAGAAAYYVGYLQPRTFLLKYNENGTITDAVDCALDPLSETKCTLKSFTVEKGIYQTSNFRVQPTESIVRFPNITNLCPFGEVFNATRFASVYAWNRKRISNCVADYSVLYNSASFSTFKCYGVSPTKLNDLCFTNVYADSFVIRGDEVRQIAPGQTGKIADYNYKLPDDFTGCVIAWNSNNLDSKVGGNYNYLYRLFRKSNLKPFERDISTEIYQAGSTPCNGVEGFNCYFPLQSYGFQPTNGVGYQPYRVVVLSFELLHAPATVCGPKKSTNLVKNKCVNFNFNGLTGTGVLTESNKKFLPFQQFGRDIADTTDAVRDPQTLEILDITPCSFGGVSVITPGTNTSNQVAVLYQGVNCTEVPVAIHADQLTPTWRVYSTGSNVFQTRAGCLIGAEHVNNSYECDIPIGAGICASYQTQTNSPRRARSVASQSIIAYTMSLGAENSVAYSNNSIAIPTNFTISVTTEILPVSMTKTSVDCTMYICGDSTECSNLLLQYGSFCTQLNRALTGIAVEQDKNTQEVFAQVKQIYKTPPIKDFGGFNFSQILPDPSKPSKRSFIEDLLFNKVTLADAGFIKQYGDCLGDIAARDLICAQKFNGLTVLPPLLTDEMIAQYTSALLAGTITSGWTFGAGAALQIPFAMQMAYRFNGIGVTQNVLYENQKLIANQFNSAIGKIQDSLSSTASALGKLQDVVNQNAQALNTLVKQLSSNFGAISSVLNDILSRLDKVEAEVQIDRLITGRLQSLQTYVTQQLIRAAEIRASANLAATKMSECVLGQSKRVDFCGKGYHLMSFPQSAPHGVVFLHVTYVPAQEKNFTTAPAICHDGKAHFPREGVFVSNGTHWFVTQRNFYEPQIITTDNTFVSGNCDVVIGIVNNTVYDPLQPELDS

SEQ ID NO: 2628 - protein, 1147 aa, Artificial Sequence
  SARS-CoV-2/Wuhan/HBCDC-HB-02/2020__EPI_ISL_412978 spike protein (1-1147)
MFVFLVLLPLVSSQCVNLTTRTQLPPAYTNSFTRGVYYPDKVFRSSVLHSTQDLFLPFFSNVTWFHAIHVSGTNGTKRFDNPVLPFNDGVYFASTEKSNIIRGWIFGTTLDSKTQSLLIVNNATNVVIKVCEFQFCNDPFLGVYYHKNNKSWMESEFRVYSSANNCTFEYVSQPFLMDLEGKQGNFKNLREFVFKNIDGYFKIYSKHTPINLVRDLPQGFSALEPLVDLPIGINITRFQTLLALHRSYLTPGDSSSGWTAGAAAYYVGYLQPRTFLLKYNENGTITDAVDCALDPLSETKCTLKSFTVEKGIYQTSNFRVQPTESIVRFPNITNLCPFGEVFNATRFASVYAWNRKRISNCVADYSVLYNSASFSTFKCYGVSPTKLNDLCFTNVYADSFVIRGDEVRQIAPGQTGKIADYNYKLPDDFTGCVIAWNSNNLDSKVGGNYNYLYRLFRKSNLKPFERDISTEIYQAGSTPCNGVEGFNCYFPLQSYGFQPTNGVGYQPYRVVVLSFELLHAPATVCGPKKSTNLVKNKCVNFNFNGLTGTGVLTESNKKFLPFQQFGRDIADTTDAVRDPQTLEILDITPCSFGGVSVITPGTNTSNQVAVLYQDVNCTEVPVAIHADQLTPTWRVYSTGSNVFQTRAGCLIGAEHVNNSYECDIPIGAGICASYQTQTNSPRRARSVASQSIIAYTMSLGAENSVAYSNNSIAIPTNFTISVTTEILPVSMTKTSVDCTMYICGDSTECSNFLLQYGSFCTQLNRALTGIAVEQDKNTQEVFAQVKQIYKTPPIKDFGGFNFSQILPDPSKPSKRSFIEDLLFNKVTLADAGFIKQYGDCLGDIAARDLICAQKFNGLTVLPPLLTDEMIAQYTSALLAGTITSGWTFGAGAALQIPFAMQMAYRFNGIGVTQNVLYENQKLIANQFNSAIGKIQDSLSSTASALGKLQDVVNQNAQALNTLVKQLSSNFGAISSVLNDILSRLDKVEAEVQIDRLITGRLQSLQTYVTQQLIRAAEIRASANLAATKMSECVLGQSKRVDFCGKGYHLMSFPQSAPHGVVFLHVTYVPAQEKNFTTAPAICHDGKAHFPREGVFVSNGTHWFVTQRNFYEPQIITTDNTFVSGNCDVVIGIVNNTVYDPLQPELDS

SEQ ID NO: 2629 - protein, 1147 aa, Artificial Sequence
  SARS-CoV-2/Australia/QLD02/2020__EPI_ISL_407896 spike protein (1-1147)
MFVFLVLLPLVSSQCVNLTTRTQLPPAYTNSFTRGVYYPDKVFRSSVLHSTQDLFLPFFSNVTWFHAIHVSGTNGTKRFDNPVLPFNDGVYFASTEKSNIIRGWIFGTTLDSKTQSLLIVNNATNVVIKVCEFQFCNDPFLGVYYHKNNKSWMESEFRVYSSANNCTFEYVSQPFLMDLEGKQGNFKNLREFVFKNIDGYFKIYSKHTPINLVRDLPQGFSALEPLVDLPIGINITRFQTLLALHRSYLTPGDSSSGWTAGAAAYYVGYLQPRTFLLKYNENGTITDAVDCALDPLSETKCTLKSFTVEKGIYQTSNFRVQPTESIVRFPNITNLCPFGEVFNATRFASVYAWNRKRISNCVADYSVLYNSASFSTFKCYGVSPTKLNDLCFTNVYADSFVIRGDEVRQIAPGQTGKIADYNYKLPDDFTGCVIAWNSNNLDSKVGGNYNYLYRLFRKSNLKPFERDISTEIYQAGSTPCNGVEGFNCYFPLQSYGFQPTNGVGYQPYRVVVLSFELLHAPATVCGPKKSTNLVKNKCVNFNFNGLTGTGVLTESNKKFLPFQQFGRDIADTTDAVRDPQTLEILDITPCSFGGVSVITPGTNTSNQVAVLYQDVNCTEVPVAIHADQLTPTWRVYSTGSNVFQTRAGCLIGAEHVNNSYECDIPIGAGICASYQTQTNSPRRARSVASQSIIAYTMSLGAENSVAYSNNSIAIPTNFTISVTTEILPVSMTKTSVDCTMYICGDSTECSNLLLQYGSFCTQLNRALTGIAVEQDKNTQEVFAQVKQIYKTPPIKDFGGFNFSQILPDPSKPSKRSFIEDLLFNKVTLADAGFIKQYGDCLGDIAARDLICAQKFNGLTVLPPLLTDEMIAQYTSALLAGTITSGWTFGAGAALQIPFAMQMAYRFNGIGVTQNVLYENQKLIANQFNSAIGKIQDSLSSTASALGKLQDVVNQNAQALNTLVKQLSSNFGAISSVLNDILSRLDKVEAEVQIDRLITGRLQSLQTYVTQQLIRAAEIRASANLAATKMSECVLGQSKRVDFCGKGYHLMSFPQSAPHGVVFLHVTYVPAQEKNFTTAPAICHDGKAHFPREGVFVSNGTHWFVTQRNFYEPQIITTDNTFVSGNCDVVIGIVNNTVYDPLQLELDS

SEQ ID NO: 2630 - protein, 1147 aa, Artificial Sequence
  SARS-CoV-2/India/1-31/2020__EPI_ISL_413523 spike protein (1-1147)
MFVFLVLLPLVSSQCVNLTTRTQLPPAYTNSFTRGVYYPDKVFRSSVLHSTQDLFLPFFSNVTWFHAIHVSGTNGTKRFDNPVLPFNDGVYFASTEKSNIIRGWIFGTTLDSKTQSLLIVNNATNVVIKVCEFQFCNDPFLGVYYHKNNKSWMESEFRVYSSANNCTFEYVSQPFLMDLEGKQGNFKNLREFVFKNIDGYFKIYSKHTPINLVRDLPQGFSALEPLVDLPIGINITRFQTLLALHRSYLTPGDSSSGWTAGAAAYYVGYLQPRTFLLKYNENGTITDAVDCALDPLSETKCTLKSFTVEKGIYQTSNFRVQPTESIVRFPNITNLCPFGEVFNATRFASVYAWNRKRISNCVADYSVLYNSASFSTFKCYGVSPTKLNDLCFTNVYADSFVIRGDEVRQIAPGQTGKIADYNYKLPDDFTGCVIAWNSNNLDSKVGGNYNYLYRLFRKSNLKPFERDISTEIYQAGSTPCNGVEGFNCYFPLQSYGFQPTNGVGYQPYRVVVLSFELLHAPATVCGPKKSTNLVKNKCVNFNFNGLTGTGVLTESNKKFLPFQQFGRDIADTTDAVRDPQTLEILDITPCSFGGVSVITPGTNTSNQVAVLYQDVNCTEVPVAIHADQLTPTWRVYSTGSNVFQTRAGCLIGAEHVNNSYECDIPIGAGICASYQTQTNSPRRARSVASQSIIAYTMSLGAENSVAYSNNSIAIPTNFTISVTTEILPVSMTKTSVDCTMYICGDSTECSNLLLQYGSFCTQLNRALTGIAVEQDKNTQEVFAQVKQIYKTPPIKDFGGFNFSQILPDPSKPSKRSFIEDLLFNKVTLADAGFIKQYGDCLGDIAARDLICAQKFNGLTVLPPLLTDEMIAQYTSALLAGTITSGWTFGAGAALQIPFAMQMAYRFNGIGVTQNVLYENQKLIANQFNSVIGKIQDSLSSTASALGKLQDVVNQNAQALNTLVKQLSSNFGAISSVLNDILSRLDKVEAEVQIDRLITGRLQSLQTYVTQQLIRAAEIRASANLAATKMSECVLGQSKRVDFCGKGYHLMSFPQSAPHGVVFLHVTYVPAQEKNFTTAPAICHDGKAHFPREGVFVSNGTHWFVTQRNFYEPQIITTDNTFVSGNCDVVIGIVNNTVYDPLQPELDS

SEQ ID NO: 2631 - protein, 1147 aa, Artificial Sequence
  SARS-CoV-2/Guangdong/GD2020087-P0008/2020__EPI_ISL_413863 spike protein (1-1147)
MFVFLVLLPLVSSQCVNLTTRTQLPPAYTNSFTRGVYYPDKVFRSSVLHSTQDLFLPFFSNVTWFHAIHVSGTNGTKRFDNPVLPFNDGVYFASTEKSNIIRGWIFGTTLDSKTQSLLIVNNATNVVIKVCEFQFCNDPFLGVYYHKNNKSWMESEFRVYSSANNCTFEYVSQPFLMDLEGKQGNFKNLREFVFKNIDGYFKIYSKHTPINLVRDLPQGFSALEPLVDLPIGINITRFQTLLALHRSYLTPGDSSSGWTAGAAAYYVGYLQPRTFLLKYNENGTITDAVDCALDPLSETKCTLKSFTVEKGIYQTSNFRVQPTESIVRFPNITNLCPFGEVFNATRFASVYAWNRKRISNCVADYSVLYNSASFSTFKCYGVSPTKLNDLCFTNVYADSFVIRGDEVREIAPGQTGKIADYNYKLPDDFTGCVIAWNSNNLDSKVGGNYNYLYRLFRKSNLKPFERDISTEIYQAGSTPCNGVEGFNCYFPLQSYGFQPTNGVGYQPYRVVVLSFELLHAPATVCGPKKSTNLVKNKCVNFNFNGLTGTGVLTESNKKFLPFQQFGRDIADTTDAVRDPQTLEILDITPCSFGGVSVITPGTNTSNQVAVLYQDVNCTEVPVAIHADQLTPTWRVYSTGSNVFQTRAGCLIGAEHVNNSYECDIPIGAGICASYQTQTNSPRRARSVASQSIIAYTMSLGAENSVAYSNNSIAIPTNFTISVTTEILPVSMTKTSVDCTMYICGDSTECSNLLLQYGSFCTQLNRALTGIAVEQDKNTQEVFAQVKQIYKTPPIKDFGGFNFSQILPDPSKPSKRSFIEDLLFNKVTLADAGFIKQYGDCLGDIAARDLICAQKFNGLTVLPPLLTDEMIAQYTSALLAGTITSGWTFGAGAALQIPFAMQMAYRFNGIGVTQNVLYENQKLIANQFNSAIGKIQDSLSSTASALGKLQDVVNQNAQALNTLVKQLSSNFGAISSVLNDILSRLDKVEAEVQIDRLITGRLQSLQTYVTQQLIRAAEIRASANLAATKMSECVLGQSKRVDFCGKGYHLMSFPQSAPHGVVFLHVTYVPAQEKNFTTAPAICHDGKAHFPREGVFVSNGTHWFVTQRNFYEPQIITTDNTFVSGNCDVVIGIVNNTVYDPLQPELDS

SEQ ID NO: 2632 - protein, 1147 aa, Artificial Sequence
  SARS-CoV-2/Sweden/01/2020__EPI_ISL_411951 spike protein (1-1147)
MFVFLVLLPLVSSQCVNLTTRTQLPPAYTNSFTRGVYYPDKVFRSSVLHSTQDLFLPFFSNVTWFHAIHVSGTNGTKRFDNPVLPFNDGVYFASTEKSNIIRGWIFGTTLDSKTQSLLIVNNATNVVIKVCEFQFCNDPFLGVYYHKNNKSWMESEFRVYSSANNCTFEYVSQPFLMDLEGKQGNFKNLREFVFKNIDGYFKIYSKHTPINLVRDLPQGFSALEPLVDLPIGINITRFQTLLALHRSYLTPGDSSSGWTAGAAAYYVGYLQPRTFLLKYNENGTITDAVDCALDPLSETKCTLKSFTVEKGIYQTSNFRVQPTESIVRFPNITNLCPFGEVFNATRFASVYAWNRKRISNCVADYSVLYNSASFSTFKCYGVSPTKLNDLCFTNVYADSFVIRGDEVRQIAPGQTGKIADYNYKLPDDFTGCVIAWNSNNLDSKVGGNYNYLYRLFRKSNLKPFERDISTEIYQAGSTPCNGVEGFNCYFPLQSYGFQPTNGVGYQPYRVVVLSFELLHAPATVCGPKKSTNLVKNKCVNFNFNGLTGTGVLTESNKKFLPFQQFGRDIADTTDAVRDPQTLEILDITPCSFGGVSVITPGTNTSNQVAVLYQDVNCTEVPVAIHADQLTPTWRVYSTGSNVFQTRAGCLIGAEHVNNSYECDIPIGAGICASYQTQTNSPRRARSVASQSIIAYTMSLGAENSVAYSNNSIAIPTNFTISVTTEILPVSMTKTSVDCTMYICGDSTECSNLLLQYGSFCTQLNRALTGIAVEQDKNTQEVFAQVKQIYKTPPIKDCGGFNFSQILPDPSKPSKRSFIEDLLFNKVTLADAGFIKQYGDCLGDIAARDLICAQKFNGLTVLPPLLTDEMIAQYTSALLAGTITSGWTFGAGAALQIPFAMQMAYRFNGIGVTQNVLYENQKLIANQFNSAIGKIQDSLSSTASALGKLQDVVNQNAQALNTLVKQLSSNFGAISSVLNDILSRLDKVEAEVQIDRLITGRLQSLQTYVTQQLIRAAEIRASANLAATKMSECVLGQSKRVDFCGKGYHLMSFPQSAPHGVVFLHVTYVPAQEKNFTTAPAICHDGKAHFPREGVFVSNGTHWFVTQRNFYEPQIITTDNTFVSGNCDVVIGIVNNTVYDPLQPELDS

SEQ ID NO: 2633 - protein, 1147 aa, Artificial Sequence
  SARS-CoV-2/Tianmen/HBCDC-HB-07/2020__EPI_ISL_412983 spike protein (1-1147)
MFVFLVLLPLVSSQCVNLTTRTQLPPAYTNSFTRGVYYPDKVFRSSVLHSTQDLFLPFFSNVTWFHAIHVSGTNGTKRFDNPVLPFNDGVYFASTEKSNIIRGWIFGTTLDSKTQSLLIVNNATNVVIKVCEFQFCNDPFLGVYYHKNNKSWMESEFRVYSSANNCTFEYVSQPFLMDLEGKQGNFKNLREFVFKNIDGYFKIYSKHTPINLVRDLPQGFSALEPLVDLPIGINITRFQTLLALHRSYLTPGDSSSGWTAGAAAYYVGYLQPRTFLLKYNENGTITDAVDCALDPLSETKCTLKSFTVEKGIYQTSNFRVQPTESIVRFPNITNLCPFGEVFNATRFASVYAWNRKRISNCVADYSVLYNSASFSTFKCYGVSPTKLNDLCFTNVYADSFVIRGDEVRQIAPGQTGKIADYNYKLPDDFTGCVIAWNSNNLDSKVGGNYNYLYRLFRKSNLKPFERDISTEIYQAGSTPCNGVEGFNCYFPLQSYGFQPTNGVGYQPYRVVVLSFELLHAPATVCGPKKSTNLVKNKCVNFNFNGLTGTGVLTESNKKFLPFQQFGRDIADTTDAVRDPQTLEILDITPCSFGGVSVITPGTNTSNQVAVLYQDLNCTEVPVAIHADQLTPTWRVYSTGSNVFQTRAGCLIGAEHVNNSYECDIPIGAGICASYQTQTNSPRRARSVASQSIIAYTMSLGAENSVAYSNNSIAIPTNFTISVTTEILPVSMTKTSVDCTMYICGDSTECSNLLLQYGSFCTQLNRALTGIAVEQDKNTQEVFAQVKQIYKTPPIKDFGGFNFSQILPDPSKPSKRSFIEDLLFNKVTLADAGFIKQYGDCLGDIAARDLICAQKFNGLTVLPPLLTDEMIAQYTSALLAGTITSGWTFGAGAALQIPFAMQMAYRFNGIGVTQNVLYENQKLIANQFNSAIGKIQDSLSSTASALGKLQDVVNQNAQALNTLVKQLSSNFGAISSVLNDILSRLDKVEAEVQIDRLITGRLQSLQTYVTQQLIRAAEIRASANLAATKMSECVLGQSKRVDFCGKGYHLMSFPQSAPHGVVFLHVTYVPAQEKNFTTAPAICHDGKAHFPREGVFVSNGTHWFVTQRNFYEPQIITTDNTFVSGNCDVVIGIVNNTVYDPLQPELDS

SEQ ID NO: 2634 - protein, 1147 aa, Artificial Sequence
  SARS-CoV-2/Hong Kong/case42_VM20002493/2020__EPI_ISL_414527 spike protein (1-1147)
MFVFLVLLPLVSSQCVNLTTRTQLPPAYTNSFTRGVYYPDKVFRSSVLHSTQDLFLPFFSNVTWFHAIHVSGTNGTKRFDNPVLPFNDGVYFASTEKSNIIRGWIFGTTLDSKTQSLLIVNNATNVVIKVCEFQFCNDPFLGVYYHKNNKSWMESEFRVYSSANNCTFEYVSQPFLMDLEGKQGNFKNLREFVFKNIDGYFKIYSKHTPINLVRDLPQGFSALEPLVDLPIGINITRFQTLLALHRSYLTPGDSSSGWTAGAAAYYVGYLQPRTFLLKYNENGTITDAVDCALDPLSETKCTLKSFTVEKGIYQTSNFRVQPTESIVRFPNITNLCPFGEVFNATRFASVYAWNRKRISNCVADYSVLYNSASFSTFKCYGVSPTKLNDLCFTNVYADSFVIRGDEVRQIAPGQTGKIADYNYKLPDDFTGCVIAWNSNNLDSKVGGNYNYLYRLFRKSNLKPFERDISTEIYQAGSTPCNGVEGFNCYFPLQSYGFQPTNGVGYQPYRVVVLSFELLHAPATVCGPKKSTNLVKNKCVNFNFNGLTGTGVLTESNKKFLPFQQFGRDIADTTDAVRDPQTLEILDITPCSFGGVSVITPGTNTSNQVAVLYQDVNCTEVPVAIHADQLTPTWRVYSTGSNVFQTRAGCLIGAEHVNNSYECDIPIGAGICASYQTQTNSPRRARSVASQSIIAYTMSLGAENSVAYSNNSIAIPTNFAISVTTEILPVSMTKTSVDCTMYICGDSTECSNLLLQYGSFCTQLNRALTGIAVEQDKNTQEVFAQVKQIYKTPPIKDFGGFNFSQILPDPSKPSKRSFIEDLLFNKVTLADAGFIKQYGDCLGDIAARDLICAQKFNGLTVLPPLLTDEMIAQYTSALLAGTITSGWTFGAGAALQIPFAMQMAYRFNGIGVTQNVLYENQKLIANQFNSAIGKIQDSLSSTASALGKLQDVVNQNAQALNTLVKQLSSNFGAISSVLNDILSRLDKVEAEVQIDRLITGRLQSLQTYVTQQLIRAAEIRASANLAATKMSECVLGQSKRVDFCGKGYHLMSFPQSAPHGVVFLHVTYVPAQEKNFTTAPAICHDGKAHFPREGVFVSNGTHWFVTQRNFYEPQIITTDNTFVSGNCDVVIGIVNNTVYDPLQPELDS

SEQ ID NO: 2635 - protein, 1147 aa, Artificial Sequence
  SARS-CoV-2/USA/CruiseA-23/2020__EPI_ISL_414482 spike protein (1-1147)
MFVFLVLLPLVSSQCVNLTTRTQLPPAYTNSFTRGVYYPDKVFRSSVLHSTQDLFLPFFSNVTWFHAIHVSGTNGTKRFDNPVLPFNDGVYFASTEKSNIIRGWIFGTTLDSKTQSLLIVNNATNVVIKVCEFQFCNDPFLGVYYHKNNKSWMESEFRVYSSANNCTFEYVSQPFLMDLEVKQGNFKNLREFVFKNIDGYFKIYSKHTPINLVRDLPQGFSALEPLVDLPIGINITRFQTLLALHRSYLTPGDSSSGWTAGAAAYYVGYLQPRTFLLKYNENGTITDAVDCALDPLSETKCTLKSFTVEKGIYQTSNFRVQPTESIVRFPNITNLCPFGEVFNATRFASVYAWNRKRISNCVADYSVLYNSASFSTFKCYGVSPTKLNDLCFTNVYADSFVIRGDEVRQIAPGQTGKIADYNYKLPDDFTGCVIAWNSNNLDSKVGGNYNYLYRLFRKSNLKPFERDISTEIYQAGSTPCNGVEGFNCYFPLQSYGFQPTNGVGYQPYRVVVLSFELLHAPATVCGPKKSTNLVKNKCVNFNFNGLTGTGVLTESNKKFLPFQQFGRDIADTTDAVRDPQTLEILDITPCSFGGVSVITPGTNTSNQVAVLYQDVNCTEVPVAIHADQLTPTWRVYSTGSNVFQTRAGCLIGAEHVNNSYECDIPIGAGICASYQTQTNSPRRARSVASQSIIAYTMSLGAENSVAYSNNSIAIPTNFTISVTTEILPVSMTKTSVDCTMYICGDSTECSNLLLQYGSFCTQLNRALTGIAVEQDKNTQEVFAQVKQIYKTPPIKDFGGFNFSQILPDPSKPSKRSFIEDLLFNKVTLADAGFIKQYGDCLGDIAARDLICAQKFNGLTVLPPLLTDEMIAQYTSALLAGTITSGWTFGAGAALQIPFAMQMAYRFNGIGVTQNVLYENQKLIANQFNSAIGKIQDSLSSTASALGKLQDVVNQNAQALNTLVKQLSSNFGAISSVLNDILSRLDKVEAEVQIDRLITGRLQSLQTYVTQQLIRAAEIRASANLAATKMSECVLGQSKRVDFCGKGYHLMSFPQSAPHGVVFLHVTYVPAQEKNFTTAPAICHDGKAHFPREGVFVSNGTHWFVTQRNFYEPQIITTDNTFVSGNCDVVIGIVNNTVYDPLQPELDS

SEQ ID NO: 2636 - protein, 1147 aa, Artificial Sequence
  SARS-CoV-2/Hong Kong/case85_VM20002868/2020__EPI_ISL_414519 spike protein (1-1147)
MFVFLVLVPLVSSQCVNLTTRTQLPPAYTNSFTRGVYYPDKVFRSSVLHSTQDLFLPFFSNVTWFHAIHVSGTNGTKRFDNPVLPFNDGVYFASTEKSNIIRGWIFGTTLDSKTQSLLIVNNATNVVIKVCEFQFCNDPFLGVYYHKNNKSWMESEFRVYSSANNCTFEYVSQPFLMDLEGKQGNFKNLREFVFKNIDGYFKIYSKHTPINLVRDLPQGFSALEPLVDLPIGINITRFQTLLALHRSYLTPGDSSSGWTAGAAAYYVGYLQPRTFLLKYNENGTITDAVDCALDPLSETKCTLKSFTVEKGIYQTSNFRVQPTESIVRFPNITNLCPFGEVFNATRFASVYAWNRKRISNCVADYSVLYNSASFSTFKCYGVSPTKLNDLCFTNVYADSFVIRGDEVRQIAPGQTGKIADYNYKLPDDFTGCVIAWNSNNLDSKVGGNYNYLYRLFRKSNLKPFERDISTEIYQAGSTPCNGVEGFNCYFPLQSYGFQPTNGVGYQPYRVVVLSFELLHAPATVCGPKKSTNLVKNKCVNFNFNGLTGTGVLTESNKKFLPFQQFGRDIADTTDAVRDPQTLEILDITPCSFGGVSVITPGTNTSNQVAVLYQDVNCTEVPVAIHADQLTPTWRVYSTGSNVFQTRAGCLIGAEHVNNSYECDIPIGAGICASYQTQTNSPRRARSVASQSIIAYTMSLGAENSVAYSNNSIAIPTNFTISVTTEILPVSMTKTSVDCTMYICGDSTECSNLLLQYGSFCTQLNRALTGIAVEQDKNTQEVFAQVKQIYKTPPIKDFGGFNFSQILPDPSKPSKRSFIEDLLFNKVTLADAGFIKQYGDCLGDIAARDLICAQKFNGLTVLPPLLTDEMIAQYTSALLAGTITSGWTFGAGAALQIPFAMQMAYRFNGIGVTQNVLYENQKLIANQFNSAIGKIQDSLSSTASALGKLQDVVNQNAQALNTLVKQLSSNFGAISSVLNDILSRLDKVEAEVQIDRLITGRLQSLQTYVTQQLIRAAEIRASANLAATKMSECVLGQSKRVDFCGKGYHLMSFPQSAPHGVVFLHVTYVPAQEKNFTTAPAICHDGKAHFPREGVFVSNGTHWFVTQRNFYEPQIITTDNTFVSGNCDVVIGIVNNTVYDPLQPELDS

SEQ ID NO: 2637 - protein, 1147 aa, Artificial Sequence; identical to SEQ ID NO: 2627
  SARS-CoV-2/England/200990660/2020__EPI_ISL_414523 spike protein (1-1147)

SEQ ID NO: 2638 - protein, 1147 aa, Artificial Sequence
  SARS-CoV-2/Australia/NSW09/2020__EPI_ISL_413595 spike protein (1-1147)
MFVFLVLLPLVSSQCVNLTTRTQLPPAYTNSFTRGVYYPDKVFRSSVLHSTQDLFLPFFSNVTWFHAIHVSGTNGTKRFDNPVLPFNDGVYFASTEKSNIIRGWIFGTTLDSKTQSLLIVNNATNVVIKVCEFQFCNDPFLGVYYHKNNKSWMESEFRVYSSANNCTFEYVSQPFLMDLEGKQGNFKNLREFVFKNIDGYFKIYSKHTPINLVRDLPQGFSALEPLVDLPIGINITRFQTLLALHRSYLTPGDSSSGWTAGAAAYYVGYLQPRTFLLKYNENGTITDAVDCALDPLSETKCTLKSFTVEKGIYQTSNFRVQPTESIVRFPNITNLCPFGEVFNATRFASVYAWNRKRISNCVADYSVLYNSASFSTFKCYGVSPTKLNDLCFTNVYADSFVIRGDEVRQIAPGQTGKIADYNYKLPDDFTGCVIAWNSNNLDSKVGGNYNYLYRLFRKSNLKPFERDISTEIYQAGSTPCNGVEGFNCYFPLQSYGFQPTNGVGYQPYRVVVLSFELLHAPATVCGPKKSTNLVKNKCVNFNFNGLTGTGVLTESNKKFLPFQQFGRDIADTTDAVRDPQTLEILDITPCSFGGVSVITPGTNTSNQVAVLYQDVNCTEVPVAIHADQLTPTWRVYSTGSNVFQTRAGCLIGAEHVNNSYECDIPIGAGICASYQTQTNSPRRARSVASQSIIAYTMSLGAENSVAYSNNSIAIPTNFTISVTTEILPVSMTKTSVDCTMYICGDSTECSNLLLQYGSFCTQLNRALTGIAVEQDKNTQEVFAQVKQIYKTPPIKDFGGFNFSQILPDPSKPSKRSFIEDLLFNKVTLADAGFIKQYGDCLGDIAARDLICAQKFNGLTVLPPLLTDEMIAQYTSALLAGTITSGWTFGAGAALQIPFAMQMAYRFNGIGVTQNVLYENQKLIANQFNSAIGKIQDSLSFTASALGKLQDVVNQNAQALNTLVKQLSSNFGAISSVLNDILSRLDKVEAEVQIDRLITGRLQSLQTYVTQQLIRAAEIRASANLAATKMSECVLGQSKRVDFCGKGYHLMSFPQSAPHGVVFLHVTYVPAQEKNFTTAPAICHDGKAHFPREGVFVSNGTHWFVTQRNFYEPQIITTDNTFVSGNCDVVIGIVNNTVYDPLQPELDS

SEQ ID NO: 2639 - protein, 1147 aa, Artificial Sequence; identical to SEQ ID NO: 2619
  SARS-CoV-2/Australia/NSW10/2020__EPI_ISL_413596 spike protein (1-1147)

SEQ ID NO: 2640 - protein, 1147 aa, Artificial Sequence
  SARS-CoV-2/Switzerland/1000477797/2020__EPI_ISL_413023 spike protein (1-1147)
MFVFLVLLPLVSSQCVNLTTRTQLPPAYTNSFTRGVYYPDKVFRSSVLHSTQDLFLPFFSNVTWFHAIHVSGTNGTKRFDNPVLPFNDGVYFASTEKSNIIRGWIFGTTLDSKTQSLLIVNNATNVVIKVCEFQFCNDPFLGVYYHKNNKSWMESEFRVYSSANNCTFEYVSQPFLMDLEGKQGNFKNLREFVFKNIDGYFNIYSKHTPINLVRDLPQGFSALEPLVDLPIGINITRFQTLLALHRSYLTPGDSSSGWTAGAAAYYVGYLQPRTFLLKYNENGTITDAVDCALDPLSETKCTLKSFTVEKGIYQTSNFRVQPTESIVRFPNITNLCPFGEVFNATRFASVYAWNRKRISNCVADYSVLYNSASFSTFKCYGVSPTKLNDLCFTNVYADSFVIRGDEVRQIAPGQTGKIADYNYKLPDDFTGCVIAWNSNNLDSKVGGNYNYLYRLFRKSNLKPFERDISTEIYQAGSTPCNGVEGFNCYFPLQSYGFQPTNGVGYQPYRVVVLSFELLHAPATVCGPKKSTNLVKNKCVNFNFNGLTGTGVLTESNKKFLPFQQFGRDIADTTDAVRDPQTLEILDITPCSFGGVSVITPGTNTSNQVAVLYQGVNCTEVPVAIHADQLTPTWRVYSTGSNVFQTRAGCLIGAEHVNNSYECDIPIGAGICASYQTQTNSPRRARSVASQSIIAYTMSLGAENSVAYSNNSIAIPTNFTISVTTEILPVSMTKTSVDCTMYICGDSTECSNLLLQYGSFCTQLNRALTGIAVEQDKNTQEVFAQVKQIYKTPPIKDFGGFNFSQILPDPSKPSKRSFIEDLLFNKVTLADAGFIKQYGDCLGDIAARDLICAQKFNGLTVLPPLLTDEMIAQYTSALLAGTITSGWTFGAGAALQIPFAMQMAYRFNGIGVTQNVLYENQKLIANQFNSAIGKIQDSLSSTASALGKLQDVVNQNAQALNTLVKQLSSNFGAISSVLNDILSRLDKVEAEVQIDRLITGRLQSLQTYVTQQLIRAAEIRASANLAATKMSECVLGQSKRVDFCGKGYHLMSFPQSAPHGVVFLHVTYVPAQEKNFTTAPAICHDGKAHFPREGVFVSNGTHWFVTQRNFYEPQIITTDNTFVSGNCDVVIGIVNNTVYDPLQPELDS

SEQ ID NO: 2641 - protein, 1147 aa, Artificial Sequence
  SARS-CoV-2/Belgium/BA-02291/2020__EPI_ISL_415159 spike protein (1-1147)
MFVFLVLLPLVSSQCVNLTTRTQLPPAYTNSFTRGVYYPDKVFRSSVLHSTQDLFLPFFSNVTWFHAIHVSGTNGTKRFDNPVLPFNDGVYFASTEKSNIIRGWIFGTTLDSKTQSLLIVNNATNVVIKVCEFQFCNDPFLGVYYHKNNKSWMESEFRVYSSANNCTFEYVSQPFLMDLEGKQGNFKNLREFVFKNIDGYFKIYSKHTPINLVRDLPQGFSALEPLVDLPIGINITRFQTLLALHRSYLTPGDSSSGWTAGAAAYYVGYLQPRTFLLKYNENGTITDAVDCALDPLSETKCTLKSFTVEKGIYQTSNFRVQPTESIVRFPNITNLCPFGEVFNATRFASVYAWNRKRISNCVADYSVLYNSASFSTFKCYGVSPTKLNDLCFTNVYADSFVIRGDEVRQIAPGQTGKIADYNYKLPDDFTGCVIAWNSNNLDSKVGGNYNYLYRLFRRSNLKPFERDISTEIYQAGSTPCNGVEGFNCYFPLQSYGFQPTNGVGYQPYRVVVLSFELLPAPATVCGPKKSTNLVKNKCVNFNFNGLTGTGVLTESNKKFLPFQQFGRDIADTTDAVRDPQTLEILDITPCSFGGVSVITPGTNTSNQVAVLYQGVNCTEVPVAIHADQLTPTWRVYSTGSNVFQTRAGCLIGAEHVNNSYECDIPIGAGICASYQTQTNSPRRARSVASQSIIAYTMSLGAENSVAYSNNSIAIPTNFTISVTTEILPVSMTKTSVDCTMYICGDSTECSNLLLQYGSFCTQLNRALTGIAVEQDKNTQEVFAQVKQIYKTPPIKDFGGFNFSQILPDPSKPSKRSFIEDLLFNKVTLADAGFIKQYGDCLGDIAARDLICAQKFNGLTVLPPLLTDEMIAQYTSALLAGTITSGWTFGAGAALQIPFAMQMAYRFNGIGVTQNVLYENQKLIANQFNSAIGKIQDSLSSAAPALGKLQDVVNQNAQALNTLVKQLSSNFGAISSVLNDILSRLDKVEAEVQIDRLITGRLQSLQTYVTQQLIRAAEIRASANLAATKMSECVLGQSKRVDFCGKGYHLMSFPQSAPHGVVFLHVTYVPAQEKNFTTAPAICHDGKAHFPREGVFVSNGTHWFVTQRNFYEPQIITTDNTFVSGNCDVVIGIVNNTVYDPLQPELDS

SEQ ID NO: 2642 - protein, 1147 aa, Artificial Sequence
  SARS-CoV-2/USA/WA8-UW5/2020__EPI_ISL_413486 spike protein (1-1147)
MFVFLVLLPLVSSQCVNLTTRTQLPPAYTNSFTRGVYYPDKVFRSSVLHSTQDLFLPFFSNVTWFHAIHVSGTNGTKRFDNPVLPFNDGVYFASTEKSNIIRGWIFGTTLDSKTQSLLIVNNATNVVIKVCEFQFCNDPFLGVYYHKNNKSWMESEFRVYSSANNCTFEYVSQPFLMDLEGKQGNFKNLREFVFKNIDGYFKIYSKHTPINLVRDLPQGFSALEPLVDLPIGINITRFQTLLALHRSYLTPGDSSSGWTAGAAAYYVGYLQPRTFLLKYNENGTITDAVDCALDPLSETKCTLKSFTVEKGIYQTSNFRVQPTESIVRFPNITNLCPFGEVFNATRFASVYAWNRKRISNCVADYSVLYNSASFSTFKCYGVSPTKLNDLCFTNVYADSFVIRGDEVRQIAPGQTGKIADYNYKLPDDFTGCVIAWNSNNLDSKVGGNYNYLYRLFRKSNLKPFERDISTEIYQAGSTPCNGVEGFNCYFPLQSYGFQPTNGVGYQPYRVVVLSFELLHAPATVCGPKKSTNLVKNKCVNFNFNGLTGTGVLTESNKKFLPFQQFGRDIADTTDAVRDPQTLEILDITPCSFGGVSVITPGTNTSNQVAVLYQDVNCTEVPVAIHADQLTPTWRVYSTGSNVFQTRAGCLIGAEYVNNSYECDIPIGAGICASYQTQTNSPRRARSVASQSIIAYTMSLGAENSVAYSNNSIAIPTNFTISVTTEILPVSMTKTSVDCTMYICGDSTECSNLLLQYGSFCTQLNRALTGIAVEQDKNTQEVFAQVKQIYKTPPIKDFGGFNFSQILPDPSKPSKRSFIEDLLFNKVTLADAGFIKQYGDCLGDIAARDLICAQKFNGLTVLPPLLTDEMIAQYTSALLAGTITSGWTFGAGAALQIPFAMQMAYRFNGIGVTQNVLYENQKLIANQFNSAIGKIQDSLSSTASALGKLQDVVNQNAQALNTLVKQLSSNFGAISSVLNDILSRLDKVEAEVQIDRLITGRLQSLQTYVTQQLIRAAEIRASANLAATKMSECVLGQSKRVDFCGKGYHLMSFPQSAPHGVVFLHVTYVPAQEKNFTTAPAICHDGKAHFPREGVFVSNGTHWFVTQRNFYEPQIITTDNTFVSGNCDVVIGIVNNTVYDPLQPELDS

SEQ ID NO: 2643 - protein, 1147 aa, Artificial Sequence
  SARS-CoV-2/England/20102000506/2020__EPI_ISL_415147 spike protein (1-1147)
MFVFLVLLPLVSSQCVNLTTRTQLPPAYTNSFTRGVYYPDKVFRSSVLHSTQDLFLPFFSNVTWFHAIHVSGTNGTKRFDNPVLPFNDGVYFASTEKSNIIRGWIFGTTLDSKTQSLLIVNNATNVVIKVCEFQFCNDPFLGVYYHKNNKSWMESEFRVYSSANNCTFEYVSQPFLMDLEGKQGNFKNLREFVFKNIDGYFKIYSKHTPINLVRDLPQGFSALEPLVDLPIGINITRFQTLLALHRSYLTPGDSSSGWTAGAAAYYVGYLQPRTFLLKYNENGTITDAVDCALDPLSETKCTLKSFTVEKGIYQTSNFRVQPTESIVRFPNITNLCPFGEVFNATRFASVYAWNRKRISNCVADYSVLYNSASFSTFKCYGVSPTKLNDLCFTNVYADSFVIRGDEVRQIAPGQTGKIADYNYKLPDDFTGCVIAWNSNNLDSKVGGNYNYLYRLFRKSNLKPFERDISTEIYQAGSTPCNGVEGFNCYFPLQSYGFQPTNGVGYQPYRVVVLSFELLHAPATVCGPKKSTNLVKNKCVNFNFNGLTGTGVLTESNKKFLPFQQFGRDIADTTDAVRDPQTLEILDITPCSFGGVSVITPGTNTSNQVAVLYQGVNCTEVPVAIHADQLTPTWRVYSTGSNVFQTRAGCLIGAEHVNNSYECDIPIGAGICASYQTQTNSPRRARSVASQSIIAYTMSLGAENSVAYSNNSIAIPTNFTISVTTEILPVSMTKTSVDCTMYICGDSTECSNLLLQYGSFCTQLNRALTGIAVEQDKNTQEVFAQVKQIYKTPPIKDFGGFNFSQILPDPSKPSKRSFIEDLLFNKVTLADAGFIKQYGYCLGDIAARDLICAQKFNGLTVLPPLLTDEMIAQYTSALLAGTITSGWTFGAGAALQIPFAMQMAYRFNGIGVTQNVLYENQKLIANQFNSAIGKIQDSLSSTASALGKLQDVVNQNAQALNTLVKQLSSNFGAISSVLNDILSRLDKVEAEVQIDRLITGRLQSLQTYVTQQLIRAAEIRASANLAATKMSECVLGQSKRVDFCGKGYHLMSFPQSAPHGVVFLHVTYVPAQEKNFTTAPAICHDGKAHFPREGVFVSNGTHWFVTQRNFYEPQIITTDNTFVSGNCDVVIGIVNNTVYDPLQPELDS

SEQ ID NO: 2644 - protein, 1147 aa, Artificial Sequence
  SARS-CoV-2/Belgium/VAG-03013/2020__EPI_ISL_415155 spike protein (1-1147)
MFVFLVLLPLVSSQCVNLTTRTQLPPAYTNSFTRGVYYPDKVFRSSVLHSTQDLFLPFFSNVTWFHAIHVSGTNGTKRFDNPVLPFNDGVYFASTEKSNIIRGWIFGTTLDSKTQSLLIVNNATNVVIKVCEFQFCNDPFLGVYYHKNNKSWMESEFRVYSSANNCTFEYVSQPFLMDLEGKQGNFKNLREFVFKNIDGYFKIYSKHTPINLVRDLPQGFSALEPLVDLPIGINITRFQTLLALHRSYLTPGDSSSGWTAGAAAYYVGYLQPRTFLLKYNENGTITDAVDCALDPLSETKCTLKSFTVEKGIYQTSNFRVQPTESIVRFPNITNLCPFGEVFNATRFASVYAWNRKRISNCVADYSVLYNSASFSTFKCYGVSPTKLNDLCFTNVYADSFVIRGDEVRQIAPGQTGKIADYNYKLPDDFTGCVIAWNSNNLDSKVGGNYNYLYRLFRKSNLKPFERDISTEIYQAGSTPCNGVEGFNCYFPLQSYGFQPTNGVGYQPYRVVVLSFELLHAPATVCGPKKSTNLVKNKCVNFNFNGLTGTGVLTESNKKFLPFQQFGRDIADTTDAVRDPQTLEILDITPCSFGGVSVITPGTNTSNQVAVLYQGVNCTEVPVAIHADQLTPTWRVYSTGSNVFQTRAGCLIGAEHVNNSYECDIPIGAGICASYQTQTNSPRRARSVASQSIIAYTMSLGAENSVAYSNNSIAIPTNFTISVTTEILPVSMTKTSVDCTMYICGDSTECSNLLLQYGSFCTQLNRALTGIAVEQDKNTQEVFAQVKQIYKTPPIKDFGGFNFSQILPDPSKPSKRSFIEDLLFNKVTLADAGFIKQYGDCLGDIAARDLICAQKFNGLTVLPPLLTDEMIAQYTSALLAGTITSGWTFGAGAALQIPFAMQMAYRFNGIGVTQNVLYENQKLIANQFNSAIGKIQDSLSSTATALGKLQDVVNQNAQALNTLVKQLSSNFGAISSVLNDILSRLDKVEAEVQIDRLITGRLQSLQTYVTQQLIRAAEIRASANLAATKMSECVLGQSKRVDFCGKGYHLMSFPQSAPHGVVFLHVTYVPAQEKNFTTAPAICHDGKAHFPREGVFVSNGTHWFVTQRNFYEPQIITTDNTFVSGNCDVVIGIVNNTVYDPLQPELDS

SEQ ID NO: 2645 - protein, 1147 aa, Artificial Sequence
  SARS-CoV-2/Belgium/BC-03016/2020__EPI_ISL_415157 spike protein (1-1147)
MFVFLVLLPLVSSQCVNLTTRTQLPPAYTNSFTRGVYYPDKVFRSSVLHSTQDLFLPFFSNVTWFHAIHVSGTNGTKRFDNPVLPFNDGVYFASTEKSNIIRGWIFGTTLDSKTQSLLIVNNATNVVIKVCEFQFCNDPFLGVYYHKNNKSWMESEFRVYSSANNCTFEYVSQPFLMDLEGKQGNFKNLREFVFKNIDGYFKIYSKHTPINLVRDLPQGFSALEPLVDLPIGINITRFQTLLALHRSYLTPGDSSSGWTAGAAAYYVGYLQPRTFLLKYNENGTITDAVDCALDPLSETKCTLKSFTVEKGIYQTSNFRVQPTESIVRFPNITNLCPFGEVFNATRFASVYAWNRKRISNCVADYSVLYNSASFSTFKCYGVSPTKLNDLCFTNVYADSFVIRGDEVRQIAPGQTGKIADYNYKLPDDFTGCVIAWNSNNLDSKVGGNYNYLYRLFRKSNLKPFERDISTEIYQAGSTPCNGVEGFNCYFPLQSYGFQPTNGVGYQPYRVVVLSFELLHAPATVCGPKKSTNLVKNKCVNFNFNGLTGTGVLTESNKKFLPFQQFGRDIADTTDAVRDPQTLEILDITPCSFGGVSVITPGTNTSNQVAVLYQGVNCTEVPVAIHADQLTPTWRVYSTGSNVFQTRAGCLIGAEHVNNSYECDIPIGAGICASYQTQTNSPRRARSVASQSIIAYTMSLGAENSVAYSNNSIAIPTNFTISVTTEILPVSMTKTSVDCTMYICGDSTECSNLLLQYGSFCTQLNRALTGIAVEQDKNTQEVFAQVKQIYKTPPIKDFGGFNFSQILPDPSKPSKRSFIEDLLFNKVTLADAGFIKQYGDCLGDIAARDLICAQKFNGLTVLPPLLTDEMIAQYTSALLAGTITSGWTFGAGAALQIPFAMQMAYRFNGIGVTQNVLYENQKLIANQFNSAIGKIQDSLSSTAPALGKLQDVVNQNAQALNTLVKQLSSNFGAISSVLNDILSRLDKVEAEVQIDRLITGRLQSLQTYVTQQLIRAAEIRASANLAATKMSECVLGQSKRVDFCGKGYHLMSFPQSAPHGVVFLHVTYVPAQEKNFTTAPAICHDGKAHFPREGVFVSNGTHWFVTQRNFYEPQIITTDNTFVSGNCDVVIGIVNNTVYDPLQPELDS

SEQ ID NO: 2646 - protein, 1147 aa, Artificial Sequence
  SARS-CoV-2/Germany/BavPat3/2020__EPI_ISL_414521 spike protein (1-1147)
MFVFLVLLPLVSSQCVNLTTRTQLPPAYTNSFTRGVYYPDKVFRSSVLHSTQDLFLPFFSNVTWFHAIHVSGTNGTKRFDNPVLPFNDGVYFASTEKSNIIRGWIFGTTLDSKTQSLLIVNNATNVVIKVCEFQFCNDPFLGVYYHKNNKSWMESEFRVYSSANNCTFEYVSQPFLMDLEGKQGNFKNLREFVFKNIDGYFKIYSKHTPINLVRDLPQGFSALEPLVDLPIGINITRFQTLLALHRSYLTPGDSSSGWTAGAAAYYVGYLQPRTFLLKYNENGTITDAVDCALDPLSETKCTLKSFTVEKGIYQTSNFRVQPTESIVRFPNITNLCPFGEVFNATRFASVYAWNRKRISNCVADYSVLYNSASFSTFKCYGVSPTKLNDLCFTNVYADSFVIRGDEVRQIAPGQTGKIADYNYKLPDDFTGCVIAWNSNNLDSKVGGNYNYLYRLFRKSNLKPFERDISTEIYQAGSTPCNGVEGFNCYFPLQSYGFQPTNGVGYQPYRVVVLSFELLHAPATVCGPKKSTNLVKNKCVNFNFNGLTGTGVLTESNKKFLPFQQFGRDIADTTDAVRDPQTLEILDITPCSFGGVSVITPGTNTSNQVAVLYQDVNCTEVPVAIHADQLTPTWRVYSTGSNVFQTRAGCLIGAEHVNNSYECDIPIGAGICASYQTQTNSPRRARSVASQSIIAYTMSLGAENSVAYSNNSIAIPTNFTISVTTEILPVSMTKTSVDCTMYICGDSTECSNLLLQYGSFCTQLNRALTGIAVEQDKNTQQVFAQVKQIYKTPPIKDFGGFNFSQILPDPSKPSKRSFIEDLLFNKVTLADAGFIKQYGDCLGDIAARDLICAQKFNGLTVLPPLLTDEMIAQYTSALLAGTITSGWTFGAGAALQIPFAMQMAYRFNGIGVTQNVLYENQKLIANQFNSAIGKIQDSLSSTASALGKLQDVVNQNAQALNTLVKQLSSNFGAISSVLNDILSRLDKVEAEVQIDRLITGRLQSLQTYVTQQLIRAAEIRASANLAATKMSECVLGQSKRVDFCGKGYHLMSFPQSAPHGVVFLHVTYVPAQEKNFTTAPAICHDGKAHFPREGVFVSNGTHWFVTQRNFYEPQIITTDNTFVSGNCDVVIGIVNNTVYDPLQPELDS

SEQ ID NO: 2647 - protein, 1147 aa, Artificial Sequence
  SARS-CoV-2/France/HF1805/2020__EPI_ISL_414628 spike protein (1-1147)
MFVFLVLLPLVSSQCVNLTTRTQLPPAYTNSFTRGVYYPDKVFRSSVLHSTQDLFLPFFSNVTWFHAIHVSGTNGTKRFDNPVLPFNDGVYFASTEKSNIIRGWIFGTTLDSKTQSLLIVNNATNVVIKVCEFQFCNDPFLGVYYHKNNKSWMESEFRVYSSANNCTFEYVSQPFLMDLEGKQGNFKNLREFVFKNIDGYFKIYSKHTPINLVRDLPQGFSALEPLVDLPIGINITRFQTLLALHRSYLTPGDSSSGWTAGAAAYYVGYLQPRTFLLKYNENGTITDAVDCALDPLSETKCTLKSFTVEKGIYQTSNFRVQPTESIVRFPNITNLCPFGEVFNATRFASVYAWNRKRISNCVADYSVLYNSASFSTFKCYGVSPTKLNDLCFTNVYADSFVIRGDEVRQIAPGQTGKIADYNYKLPDDFTGCVIAWNSNNLDSKVGGNYNYLYRLFRKSNLKPFERDISTEIYQAGSTPCNGVEGFNCYFPLQSYGFQPTNGVGYQPYRVVVLSFELLHAPATVCGPKKSTNLVKNKCVNFNFNGLTGTGVLTESNKKFLPFQQFGRDIADTTDAVRDPQTLEILDITPCSFGGVSVITPGTNTSNQVAVLYQGVNCTEVPVAIHADQLTPTWRVYSTGSNVFQTRAGCLIGAEHVNNSYECDIPIGAGICASYQTQTNSPRRARSVASQSIIAYTMSLGAENSVAYSNNSIAIPTNFTISVTTEILPVSMTKTSVDCTMYICGDSTECSNLLLQYGSFCTQLNRALTGIAVEQDKNTQEVFAQVKQIYKTPPIKDFGGFNFSQILPDPSKPSKRSFIEDLLFNKVTLADAGFIKQYGDCLGDIAARDLICAQKFNGLTVLPPLLTDEMIAQYTSALLAGTITSGWTFGAGAALQIPFAMQMAYRFNGIGVTQNVLYENQKLIANQFNSAIGKIQDSLSSTASALGKLQDVVNQNAQALNTLVKQLSSNFGAISSVLNDILSRLDKVEAEVQIDRLITGRLQSLQTYVTQQLIRAAEIRASANLAATKMSECVLGQSKRVDFCGKGYHLMSFPQSAPHGVVFLHVTYVPAQEKNFTTAPAICHDGKAHFPREGVFVSNGTHWFVTQRNFYEPQIITTDNTFVSGNCDVVIGVVNNTVYDPLQPELDS

SEQ ID NO: 2648 - protein, 1147 aa, Artificial Sequence
  SARS-CoV-2/Netherlands/ZuidHolland_9/2020__EPI_ISL_414445 spike protein (1-1147)
MFVFLVLLPLVSSQCVNLTTRTQLPPAYTNSFTRGVYYPDKVFRSSVLHSTQDLFLPFFSNVTWFHAIHVSGTNGTKRFDNPVLPFNDGVYFASTEKSNIIRGWIFGTTLDSKTQSLLIVNNATNVVIKVCEFQFCNDPFLGVYYHKNNKSWMESEFRVYSSANNCTFEYVSQPFLMDLEGKQGNFKNLREFVFKNIDGYFKIYSKHTPINLVRDLPQGFSALEPLVDLPIGINITRFQTLLALHRSYLTPGDSSSGWTAGAAAYYVGYLQPRTFLLKYNENGTITDAVDCALDPLSETKCTLKSFTVEKGIYQTSNFRVQPTESIVRFPNITNLCPFGEVFNATRFASVYAWNRKRISNCVADYSVLYNSASFSTFKCYGVSPTKLNDLCFTNVYADSFVIRGDEVRQIAPGQTGKIADYNYKLPDDFTGCVIAWNSNNLDSKVGGNYNYLYRLFRKSNLKPFERDISTEIYQAGSTPCNGVEGFNCYFPLQSYGFQPTNGVGYQPYRVVVLSFELLHAPATVCGPKKSTNLVKNKCVNFNFNGLTGTGVLTESNKKFLPFQQFGRDIADTTDAVRDPQTLEILDITPCSFGGVSVITPGTNTSNQVAVLYQGVNCTEVPVAIHADQLTPTWRVYSTGSNVFQTRAGCLIGAEHVNNSYECDIPIGAGICASYQTQTNSPRRARSVASQSIIAYTMSLGAENSVAYSNNSIAIPTNFTISVTTEILPVSMTKTSVDCTMYICGDSTECSNLLLQYGSFCTQLNRALTGIAVEQDKNTQEVFAQVKQIYKTPPIKDFGGFNFSQILPDPSKPSKRSFIEDLLFNKVTLADAGFIKQYGDCLGDIAARDLICVQKFNGLTVLPPLLTDEMIAQYTSALLAGTITSGWTFGAGAALQIPFAMQMAYRFNGIGVTQNVLYENQKLIANQFNSAIGKIQDSLSSTASALGKLQDVVNQNAQALNTLVKQLSSNFGAISSVLNDILSRLDKVEAEVQIDRLITGRLQSLQTYVTQQLIRAAEIRASANLAATKMSECVLGQSKRVDFCGKGYHLMSFPQSAPHGVVFLHVTYVPAQEKNFTTAPAICHDGKAHFPREGVFVSNGTHWFVTQRNFYEPQIITTDNTFVSGNCDVVIGIVNNTVYDPLQPELDS

SEQ ID NO: 2649 - protein, 1147 aa, Artificial Sequence
  SARS-CoV-2/Finland/FIN03032020A/2020__EPI_ISL_413602 spike protein (1-1147)
MFVFLVLLPLVSSQCVNLTTRTQLPPAYTNSFTRGVYYPDKVFRSSVLHSTQDLFLPFFSNVTWFHAIHVSGTNGTKRFDNPVLPFNDGVYFASTEKSNIIRGWIFGTTLDSKTQSLLIVNNATNVVIKVCEFQFCNDPFLGVYYHKNNKSWMESEFRVYSSANNCTFEYVSQPFLMDLEGKQGNFKNLREFVFKNIDGYFKIYSKHTPINLVRDLPQGFSALEPLVDLPIGINITRFQTLLALHRSYLTPGDSSSGWTAGAAAYYVGYLQPRTFLLKYNENGTITDAVDCALDPLSETKCTLKSFTVEKGIYQTSNFRVQPTESIVRFPNITNLCPFGEVFNATRFASVYAWNRKRISNCVADYSVLYNSASFSTFKCYGVSPTKLNDLCFTNVYADSFVIRGDEVRQIAPGQTGKIADYNYKLPDDFTGCVISWNSNNLDSKVGGNYNYLYRLFRKSNLKPFERDISTEIYQAGSTPCNGVEGFNCYFPLQSYGFQPTNGVGYQPYRVVVLSFELLHAPATVCGPKKSTNLVKNKCVNFNFNGLTGTGVLTESNKKFLPFQQFGRDIADTTDAVRDPQTLEILDITPCSFGGVSVITPGTNTSNQVAVLYQGVNCTEVPVAIHADQLTPTWRVYSTGSNVFQTRAGCLIGAEHVNNSYECDIPIGAGICASYQTQTNSPRRARSVASQSIIAYTMSLGAENSVAYSNNSIAIPTNFTISVTTEILPVSMTKTSVDCTMYICGDSTECSNLLLQYGSFCTQLNRALTGIAVEQDKNTQEVFAQVKQIYKTPPIKDFGGFNFSQILPDPSKPSKRSFIEDLLFNKVTLADAGFIKQYGDCLGDIAARDLICAQKFNGLTVLPPLLTDEMIAQYTSALLAGTITSGWTFGAGAALQIPFAMQMAYRFNGIGVTQNVLYENQKLIANQFNSAIGKIQDSLSSTASALGKLQDVVNQNAQALNTLVKQLSSNFGAISSVLNDILSRLDKVEAEVQIDRLITGRLQSLQTYVTQQLIRAAEIRASANLAATKMSECVLGQSKRVDFCGKGYHLMSFPQSAPHGVVFLHVTYVPAQEKNFTTAPAICHDGKAHFPREGVFVSNGTHWFVTQRNFYEPQIITTDNTFVSGNCDVVIGIVNNTVYDPLQPELDS

SEQ ID NO: 2650 - protein, 1147 aa, Artificial Sequence
  SARS-CoV-2/France/GE1977/2020__EPI_ISL_414632 spike protein (1-1147)
MFVFLVLLPLVSSQCVNLTTRTQLPPAYTNSFTRGVYYPDKVFRSSVLHSTQDLFLPFFSNVTWFHAIHVSGTNGTKRFDNPVLPFNDGVYFASTEKSNIIRGWIFGTTLDSKTQSLLIVNNATNVVIKVCEFQFCNDPFLGVYYHKNNKSWMESEFRVYSSANNCTFEYVSQPFLMDLEGKQGNFKNLREFVFKNIDGYFKIYSKHTPINLVRDLPQGFSALEPLVDLPIGINITRFQTLLALHRSYLTPGDSSSGWTAGAAAYYVGYLQPRTFLLKYNENGTITDAVDCALDPLSETKCTLKSFTVEKGIYQTSNFRVQPTESIVRFPNITNLCPFGEVFNATRFASVYAWNRKRISNCVADYSVLYNSASFSTFKCYGVSPTKLNDLCFTNVYADSFVIRGDEVRQIAPGQTGKIADYNYKLPDDFTGCVIAWNSNNLDSKVGGNYNYLYRLFRKSNLKPFERDISTEIYQAGSTPCNGVEGFNCYFPLQSYGFQPTNGVGYQPYRVVVLSFELLHAPATVCGPKKSTNLVKNKCVNFNFNGLTGTGVLTESNKKFLPFQQFGRDIADTTDAVRDPQTLEILDITPCSFGGVSVITPGTNTSNQVAVLYQGVNCTEVPVAIHADQLTPTWRVYSTGSNVFQTRAGCLIGAEHVNNSYECDIPIGAGICASYQTQTNSPRRARSVASQSIIAYTMSLGAENSVAYSNNSIAIPTNFTISVTTEILPVSMTKTSVDCTMYICGDSTECSNLLLQYGSFCTQLNRALTGIAVEQDKNTQEVFAQVKQIYKTPPIKDFGGFNFSQILPDPSKPSKRSFIEDLLFNKVTLADAGFIKQYGDCLGDIAARDLICAQKFNGLTVLPPLLTDEMIAQYTSALLAGTITSGWTFGAGAALQIPFAMQMAYRFNGIGVTQNVLYENQKLIANQFNSAIGKIQDSLFSTASALGKLQDVVNQNAQALNTLVKQLSSNFGAISSVLNDILSRLDKVEAEVQIDRLITGRLQSLQTYVTQQLIRAAEIRASANLAATKMSECVLGQSKRVDFCGKGYHLMSFPQSAPHGVVFLHVTYVPAQEKNFTTAPAICHDGKAHFPREGVFVSNGTHWFVTQRNFYEPQIITTDNTFVSGNCDVVIGIVNNTVYDPLQPELDS

SEQ ID NO: 2651 - protein, 1147 aa, Artificial Sequence
  SARS-CoV-2/Finland/FIN-313/2020__EPI_ISL_414641 spike protein (1-1147)
MFVFLVLLPLVSSQCVNLTTRTQLPPAYTNSFTRGVYYPDKVFRSSVLHSTQDLFLPFFSNVTWFHAIHVSGTNGTKRFDNPVLPFNDGVYFASTEKSNIIRGWIFGTTLDSKTQSLLIVNNATNVVIKVCEFQFCNDPFLGVYYHKNNKSWMESEFRVYSSANNCTFEYVSQPFLMDLEGKQGNFKNLREFVFKNIDGYFKIYSKHTPINLVRDLPQGFSALEPLVDLPIGINITRFKTLLALHRSYLTPGDSSSGWTAGAAAYYVGYLQPRTFLLKYNENGTITDAVDCALDPLSETKCTLKSFTVEKGIYQTSNFRVQPTESIVRFPNITNLCPFGEVFNATRFASVYAWNRKRISNCVADYSVLYNSASFSTFKCYGVSPTKLNDLCFTNVYADSFVIRGDEVRQIAPGQTGKIADYNYKLPDDFTGCVIAWNSNNLDSKVGGNYNYLYRLFRKSNLKPFERDISTEIYQAGSTPCNGVEGFNCYFPLQSYGFQPTNGVGYQPYRVVVLSFELLHAPATVCGPKKSTNLVKNKCVNFNFNGLTGTGVLTESNKKFLPFQQFGRDIADTTDAVRDPQTLEILDITPCSFGGVSVITPGTNTSNQVAVLYQGVNCTEVPVAIHADQLTPTWRVYSTGSNVFQTRAGCLIGAEHVNNSYECDIPIGAGICASYQTQTNSPRRARSVASQSIIAYTMSLGAENSVAYSNNSIAIPTNFTISVTTEILPVSMTKTSVDCTMYICGDSTECSNLLLQYGSFCTQLNRALTGIAVEQDKNTQEVFAQVKQIYKTPPIKDFGGFNFSQILPDPSKPSKRSFIEDLLFNKVTLADAGFIKQYGDCLGDIAARDLICAQKFNGLTVLPPLLTDEMIAQYTSALLAGTITSGWTFGAGAALQIPFAMQMAYRFNGIGVTQNVLYENQKLIANQFNSAIGKIQDSLSSTASALGKLQDVVNQNAQALNTLVKQLSSNFGAISSVLNDILSRLDKVEAEVQIDRLITGRLQSLQTYVTQQLIRAAEIRASANLAATKMSECVLGQSKRVDFCGKGYHLMSFPQSAPHGVVFLHVTYVPAQEKNFTTAPAICHDGKAHFPREGVFVSNGTHWFVTQRNFYEPQIITTDNTFVSGNCDVVIGIVNNTVYDPLQPELDS

SEQ ID NO: 2652 - protein, 1147 aa, Artificial Sequence
  SARS-CoV-2/Netherlands/ZuidHolland_2/2020__EPI_ISL_414556 spike protein (1-1147)
MFVFLVLLPLVSSQCVNLTTRTQLPPAYTNSFTRGVYYPDKVFRSSVLHSTQDLFLPFFSNVTWFHAIHVSGTNGTKRFDNPVLPFNDGVYFASTEKSNIIRGWIFGTTLDSKTQSLLIVNNATNVVIKVCEFQFCNDPFLGVYYHKNNKSWMESEFRVYSSANNCTFEYVSQPFLMDLEGKQGNFKNLREFVFKNIDGYFKIYSKHTPINLVRDLPQGFSALEPLVDLPIGINITRFQTLLALHRSYLTPGDSSSGWTAGAAAYYVGYLQPRTFLLKYNENGTITDAVDCALDPLSETKCTLKSFTVEKGIYQTSNFRVQPTESIVRFPNITNLCPFGEVFNATRFASVYAWNRKRISNCVADYSVLYNSASFSTFKCYGVSPTKLNDLCFTNVYADSFVIRGDEVRQIAPGQTGKIADYNYKLPDDFTGCVIAWNSNNLDSKVGGNYNYLYRLFRKSNLKPFERDISTEIYQAGSTPCNGVEGFNCYFPLQSYGFQPTNGVGYQPYRVVVLSFELLHAPATVCGPKKSTNLVKNKCVNFNFNGLTGTGVLTESNKKFLPFQQFGRDIADTTDAVRDPQTLEILDITPCSFGGVSVITPGTNTSNQVAVLYQGVNCTEVPVAIHADQLTPTWRVYSTGSNVFQTRAGCLIGAEHVNNSYECDIPIGAGICASYQTQTNSPRRARSVASQSIIAYTMSLGAENSVAYSNNSIAIPTNFTISVTTEILPVSMTKTSVDCTMYICGDSTECSNLLLQYGSFCTQLNRALTGIALEQDKNTQEVFAQVKQIYKTPPIKDFGGFNFSQILPDPSKPSKRSFIEDLLFNKVTLADAGFIKQYGDCLGDIAARDLICAQKFNGLTVLPPLLTDEMIAQYTSALLAGTITSGWTFGAGAALQIPFAMQMAYRFNGIGVTQNVLYENQKLIANQFNSAIGKIQDSLSSTASALGKLQDVVNQNAQALNTLVKQLSSNFGAISSVLNDILSRLDKVEAEVQIDRLITGRLQSLQTYVTQQLIRAAEIRASANLAATKMSECVLGQSKRVDFCGKGYHLMSFPQSAPHGVVFLHVTYVPAQEKNFTTAPAICHDGKAHFPREGVFVSNGTHWFVTQRNFYEPQIITTDNTFVSGNCDVVIGIVNNTVYDPLQPELDS

SEQ ID NO: 2653 - protein, 1147 aa, Artificial Sequence
  SARS-CoV-2/USA/WA-UW31/2020__EPI_ISL_414618 spike protein (1-1147)
MFVFLVLLPLVSSQCVNLTTRTQLPPAYTNSFTRGVYYPDKVFRSSVLHSTQDLFLPFFSNVTWFHAIHVSGTNGTKRFDNPVLPFNDGVYFASTEKSNIIRGWIFGTTLDSKTQSLLIVNNATNVVIKVCEFQFCNDPFLGVYYHKNNKSWMESEFRVYSSANNCTFEYVSQPFLMDLEGKQGNFKNLREFVFKNIDGYFKIYSKHTPINLVRDLPQGFSALEPLVDLPIGINITRFQTLLALHRSYLTPGDSSSGWTAGAAAYYVGYLQPRTFLLKYNENGTITDAVDCALDPLSETKCTLKSFTVEKGIYQTSNFRVQPTESIVRFPNITNLCPFGEVFNATRFASVYAWNRKRISNCVADYSVLYNSASFSTFKCYGVSPTKLNDLCFTNVYADSFVIRGDEVRQIAPGQTGKIADYNYKLPDDFTGCVIAWNSNNLDSKVGGNYNYLYRLFRKSNLKPFERDISTEIYQAGSTPCNGAEGFNCYFPLQSYGFQPTNGVGYQPYRVVVLSFELLHAPATVCGPKKSTNLVKNKCVNFNFNGLTGTGVLTESNKKFLPFQQFGRDIADTTDAVRDPQTLEILDITPCSFGGVSVITPGTNTSNQVAVLYQDVNCTEVPVAIHADQLTPTWRVYSTGSNVFQTRAGCLIGAEHVNNSYECDIPIGAGICASYQTQTNSPRRARSVASQSIIAYTMSLGAENSVAYSNNSIAIPTNFTISVTTEILPVSMTKTSVDCTMYICGDSTECSNLLLQYGSFCTQLNRALTGIAVEQDKNTQEVFAQVKQIYKTPPIKDFGGFNFSQILPDPSKPSKRSFIEDLLFNKVTLADAGFIKQYGDCLGDIAARDLICAQKFNGLTVLPPLLTDEMIAQYTSALLAGTITSGWTFGAGAALQIPFAMQMAYRFNGIGVTQNVLYENQKLIANQFNSAIGKIQDSLSSTASALGKLQDVVNQNAQALNTLVKQLSSNFGAISSVLNDILSRLDKVEAEVQIDRLITGRLQSLQTYVTQQLIRAAEIRASANLAATKMSECVLGQSKRVDFCGKGYHLMSFPQSAPHGVVFLHVTYVPAQEKNFTTAPAICHDGKAHFPREGVFVSNGTHWFVTQRNFYEPQIITTDNTFVSGNCDVVIGIVNNTVYDPLQPELDS

SEQ ID NO: 2654 - protein, 1147 aa, Artificial Sequence
  SARS-CoV-2/South Korea/SNU01/2020__EPI_ISL_411929 spike protein (1-1147)
MFVFLVLLPLVSSQCVNLTTRTQLPPAYTNSFTRGVYYPDKVFRSSVLHSTQDLFLPFFSNVTWFHAIHVSGTNGTKRFDNPVLPFNDGVYFASTEKSNIIRGWIFGTTLDSKTQSLLIVNNATNVVIKVCEFQFCNDPFLGVYYHKNNKSWMESEFRVYSSANNCTFEYVSQPFLMDLEGKQGNFKNLREFVFKNIDGYFKIYSKHTPINLVRDLPQGFWALEPLVDLPIGINITRFQTLLALHRSYLTPGDSSSGWTAGAAAYYVGYLQPRTFLLKYNENGTITDAVDCALDPLSETKCTLKSFTVEKGIYQTSNFRVQPTESIVRFPNITNLCPFGEVFNATRFASVYAWNRKRISNCVADYSVLYNSASFSTFKCYGVSPTKLNDLCFTNVYADSFVIRGDEVRQIAPGQTGKIADYNYKLPDDFTGCVIAWNSNNLDSKVGGNYNYLYRLFRKSNLKPFERDISTEIYQAGSTPCNGVEGFNCYFPLQSYGFQPTNGVGYQPYRVVVLSFELLHAPATVCGPKKSTNLVKNKCVNFNFNGLTGTGVLTESNKKFLPFQQFGRDIADTTDAVRDPQTLEILDITPCSFGGVSVITPGTNTSNQVAVLYQDVNCTEVPVAIHADQLTPTWRVYSTGSNVFQTRAGCLIGAEHVNNSYECDIPIGAGICASYQTQTNSPRRARSVASQSIIAYTMSLGAENSVAYSNNSIAIPTNFTISVTTEILPVSMTKTSVDCTMYICGDSTECSNLLLQYGSFCTQLNRALTGIAVEQDKNTQEVFAQVKQIYKTPPIKDFGGFNFSQILPDPSKPSKRSFIEDLLFNKVTLADAGFIKQYGDCLGDIAARDLICAQKFNGLTVLPPLLTDEMIAQYTSALLAGTITSGWTFGAGAALQIPFAMQMAYRFNGIGVTQNVLYENQKLIANQFNSAIGKIQDSLSSTASALGKLQDVVNQNAQALNTLVKQLSSNFGAISSVLNDILSRLDKVEAEVQIDRLITGRLQSLQTYVTQQLIRAAEIRASANLAATKMSECVLGQSKRVDFCGKGYHLMSFPQSAPHGVVFLHVTYVPAQEKNFTTAPAICHDGKAHFPREGVFVSNGTHWFVTQRNFYEPQIITTDNTFVSGNCDVVIGIVNNTVYDPLQPELDS

SEQ ID NO: 2655 - protein, 1147 aa, Artificial Sequence
  SARS-CoV-2/China/WF0004/2020__EPI_ISL_413694 spike protein (1-1147)
MFVFLVLLPLVSSQCVNLTTRTQLPPAYTNSFTRGVYYPDKVFRSSVLHSTQDLFLPFFSNVTWFHAIHVSGTNGTKRFDNPVLPFNDGVYFASTEKSNIIRGWIFGTTLDSKTQSLLIVNNATNVVIKVCEFQFCNDPFLGVYYHKNNKSWTESEFRVYSSANNCTFEYVSQPFLMDLEGKQGNFKNLREFVFKNIDGYFKIYSKHTPINLVRDLPQGFSALEPLVDLPIGINITRFQTLLALHRSYLTPGDSSSGWTAGAAAYYVGYLQPRTFLLKYNENGTITDAVDCALDPLSETKCTLKSFTVEKGIYQTSNFRVQPTESIVRFPNITNLCPFGEVFNATRFASVYAWNRKRISNCVADYSVLYNSASFSTFKCYGVSPTKLNDLCFTNVYADSFVIRGDEVRQIAPGQTGKIADYNYKLPDDFTGCVIAWNSNNLDSKVGGNYNYLYRLFRKSNLKPFERDISTEIYQAGSTPCNGVEGFNCYFPLQSYGFQPTNGVGYQPYRVVVLSFELLHAPATVCGPKKSTNLVKNKCVNFNFNGLTGTGVLTESNKKFLPFQQFGRDIADTTDAVRDPQTLEILDITPCSFGGVSVITPGTNTSNQVAVLYQDVNCTEVPVAIHADQLTPTWRVYSTGSNVFQTRAGCLIGAEHVNNSYECDIPIGAGICASYQTQTNSPRRARSVASQSIIAYTMSLGAENSVAYSNNSIAIPTNFTISVTTEILPVSMTKTSVDCTMYICGDSTECSNLLLQYGSFCTQLNRALTGIAVEQDKNTQEVFAQVKQIYKTPPIKDFGGFNFSQILPDPSKPSKRSFIEDLLFNKVTLADAGFIKQYGDCLGDIAARDLICAQKFNGLTVLPPLLTDEMIAQYTSALLAGTITSGWTFGAGAALQIPFAMQMAYRFNGIGVTQNVLYENQKLIANQFNSAIGKIQDSLSSTASALGKLQDVVNQNAQALNTLVKQLSSNFGAISSVLNDILSRLDKVEAEVQIDRLITGRLQSLQTYVTQQLIRAAEIRASANLAATKMSECVLGQSKRFDFCGKGYHLMSFPQSAPHGVVFLHVTYVPAQEKNFTTAPAICHDGKAHFPREGVFVSNGTHWFVTQRNFYEPQIITTDNTFVSGNCDVVIGIVNNTVYDPLQPELDS

SEQ ID NO: 2656 - protein, 1147 aa, Artificial Sequence
  SARS-CoV-2/China/WF0028/2020__EPI_ISL_413791 spike protein (1-1147)
MFVFLVLLPLVSSQCVNLTTRTQLPPAYTNSFTRGVYYPDKVFRSSVLHSTQDLFLPFFSNVTWFHAIHVSGTNGTKRFDNPVLPFNDGVYFASTEKSNIIRGWIFGTTLDSKTQSLLIVNNATNVVIKVCEFQFCNDPFLGVYYHKNNKSWMESEFRVYSSANNCTFEYVSQPFLMDLEGKQGNFKNLREFVFKNIDGYFKIYSKHTPINLVRDLPQGFSALEPLVDLPIGINITRFQTLLALHRSYLTPGDSSSGWTAGAAAYYVGYLQPRTFLLKYNENGTITDAVDCALDPLSETKCTLKSFTVEKGIYQTSNFRVQPTESIVRFPNITNLCPFGEVFNATRFASVYAWNRKRISNCVADYSVLYNSASFSTFKCYGVSPTKLNDLCFTNVYADSFVIRGDEVRQIAPGQTGKIADYNYKLPDDFTGCVIAWNSNNLDSKVGGNYNYLYRLFRKSNLKPFERDISTEIYQAGSTPCNGVEGFNCYFPLQSYGFQPTNGVGYQPYRVVVLSFELLHAPATVCGPKKSTNLVKNKCVNFNFNGLTGTGVLTESNKKFLPFQQFGRDIADTTDAVRDPQTLEILDITPCSFGGVSVITPGTNTSNQVAVLYQDVNCTEVPVAIHADQLTPTWRVYSTGSNVFQTRAGCLIGAEHVNNSYECDIPIGAGICASYQTQTNSPRRARSVASQSIIAYTMSLGAENSVAYSNNSIAIPTNFTISVTTEILPVSMTKTSVDCTMYICGDSTECSNLLLQYGSFCTQLNRALTGIAVEQDKNTQEVFAQVKQIYKTPPIKDFGGFNFSQILPDPSKPSKRSFIEDLLFNKVTLADAGFIKQYGDCLGDIAARDLICAQKFNGLTVLPPLLTDEMIAQYTSALLAGTITSGWTFGAGAALQIPFAMQMAYRFNGIGVTQNVLYENQKLIANQFNSAIGKIQDSLSSTASALGKLQDVVNQNAQALNTLVKQLSSNFGAISSVLNDILSRLDKVEAEVQIDRLITGRLQSLQTYVTQQLIRAAEIRASANLAATKMSECVLGQSKRVDFCGKGYHLMSFPQSAPHGVVFLHVTYVPAQEKNFTTAPAICHDGKAHFPREGVFVSNGTHWFVTQRNFYEPQIITTDNTFVSGNCDVVIGIVNNTVYDPLQPELES

SEQ ID NO: 2657 - protein, 1147 aa, Artificial Sequence
  SARS-CoV-2/2019-nCoV/USA-CruiseA-18/2020__MT159716.1 spike protein (1-1147)
MFVFLVLLPLVSSQCVNLTTRTQLPPAYTNSFTRGVYYPDKVFRSSVLHSTQDLFLPFFSNVTWFHAIHVSGTNGTKRFDNPVLPFNDGVYFASTEKSNIIRGWIFGTTLDSKTQSLLIVNNATNVVIKVCEFQFCNDPFLGVYYHKNNKSWMESELRVYSSANNCTFEYVSQPFLMDLEGKQGNFKNLREFVFKNIDGYFKIYSKHTPINLVRDLPQGFSALEPLVDLPIGINITRFQTLLALHRSYLTPGDSSSGWTAGAAAYYVGYLQPRTFLLKYNENGTITDAVDCALDPLSETKCTLKSFTVEKGIYQTSNFRVQPTESIVRFPNITNLCPFGEVFNATRFASVYAWNRKRISNCVADYSVLYNSASFSTFKCYGVSPTKLNDLCFTNVYADSFVIRGDEVRQIAPGQTGKIADYNYKLPDDFTGCVIAWNSNNLDSKVGGNYNYLYRLFRKSNLKPFERDISTEIYQAGSTPCNGVEGFNCYFPLQSYGFQPTNGVGYQPYRVVVLSFELLHAPATVCGPKKSTNLVKNKCVNFNFNGLTGTGVLTESNKKFLPFQQFGRDIADTTDAVRDPQTLEILDITPCSFGGVSVITPGTNTSNQVAVLYQDVNCTEVPVAIHADQLTPTWRVYSTGSNVFQTRAGCLIGAEHVNNSYECDIPIGAGICASYQTQTNSPRRARSVASQSIIAYTMSLGAENSVAYSNNSIAIPTNFTISVTTEILPVSMTKTSVDCTMYICGDSTECSNLLLQYGSFCTQLNRALTGIAVEQDKNTQEVFAQVKQIYKTPPIKDFGGFNFSQILPDPSKPSKRSFIEDLLFNKVTLADAGFIKQYGDCLGDIAARDLICAQKFNGLTVLPPLLTDEMIAQYTSALLAGTITSGWTFGAGAALQIPFAMQMAYRFNGIGVTQNVLYENQKLIANQFNSAIGKIQDSLSSTASALGKLQDVVNQNAQALNTLVKQLSSNFGAISSVLNDILSRLDKVEAEVQIDRLITGRLQSLQTYVTQQLIRAAEIRASANLAATKMSECVLGQSKRVDFCGKGYHLMSFPQSAPHGVVFLHVTYVPAQEKNFTTAPAICHDGKAHFPREGVFVSNGTHWFVTQRNFYEPQIITTDNTFVSGNCDVVIGIVNNTVYDPLQPELDS

SEQ ID NO: 2658 - protein, 1147 aa, Artificial Sequence
  SARS-CoV-2/SARS-CoV-2/Yunnan-01/human/2020/CHN__MT049951.1 spike protein (1-1147)
MFVFLVLLPLVSSQCVNLTTRTQLPPANTNSFTRGVYYPDKVFRSSVLHSTQDLFLPFFSNVTWFHAIHVSGTNGTKRFDNPVLPFNDGVYFASTEKSNIIRGWIFGTTLDSKTQSLLIVNNATNVVIKVCEFQFCNDPFLGVYYHKNNKSWMESEFRVYSSANNCTFEYVSQPFLMDLEGKQGNFKNLREFVFKNIDGYFKIYSKHTPINLVRDLPQGFSALEPLVDLPIGINITRFQTLLALHRSYLTPGDSSSGWTAGAAAYYVGYLQPRTFLLKYNENGTITDAVDCALDPLSETKCTLKSFTVEKGIYQTSNFRVQPTESIVRFPNITNLCPFGEVFNATRFASVYAWNRKRISNCVADYSVLYNSASFSTFKCYGVSPTKLNDLCFTNVYADSFVIRGDEVRQIAPGQTGKIADYNYKLPDDFTGCVIAWNSNNLDSKVGGNYNYLYRLFRKSNLKPFERDISTEIYQAGSTPCNGVEGFNCYFPLQSYGFQPTNGVGYQPYRVVVLSFELLHAPATVCGPKKSTNLVKNKCVNFNFNGLTGTGVLTESNKKFLPFQQFGRDIADTTDAVRDPQTLEILDITPCSFGGVSVITPGTNTSNQVAVLYQDVNCTEVPVAIHADQLTPTWRVYSTGSNVFQTRAGCLIGAEHVNNSYECDIPIGAGICASYQTQTNSPRRARSVASQSIIAYTMSLGAENSVAYSNNSIAIPTNFTISVTTEILPVSMTKTSVDCTMYICGDSTECSNLLLQYGSFCTQLNRALTGIAVEQDKNTQEVFAQVKQIYKTPPIKDFGGFNFSQILPDPSKPSKRSFIEDLLFNKVTLADAGFIKQYGDCLGDIAARDLICAQKFNGLTVLPPLLTDEMIAQYTSALLAGTITSGWTFGAGAALQIPFAMQMAYRFNGIGVTQNVLYENQKLIANQFNSAIGKIQDSLSSTASALGKLQDVVNQNAQALNTLVKQLSSNFGAISSVLNDILSRLDKVEAEVQIDRLITGRLQSLQTYVTQQLIRAAEIRASANLAATKMSECVLGQSKRVDFCGKGYHLMSFPQSAPHGVVFLHVTYVPAQEKNFTTAPAICHDGKAHFPREGVFVSNGTHWFVTQRNFYEPQIITTDNTFVSGNCDVVIGIVNNTVYDPLQPELDS

SEQ ID NO: 2659 - protein, 1147 aa, Artificial Sequence
  SARS-CoV-2/USA/WA-UW292/2020__EPI_ISL_418077 spike protein (1-1147)
MFVFLVLLPLVSSQCVNLTTRTQLPPAYTNSFTRGVYYPDKVFRSSVLHSTQDLFLPFFSNVTWFHAIHVSGTNGTKRFDNPVLPFNDGVYFASTEKSNIIRGWIFGTTLDSKTQSLLIVNNATNVVIKVCEFQFCNDPFLGVYYHKNNKSWMESEFRVYSSANNCTFEYVSQPFLMDLEGKQGNFKNLREFVFKNIDGYFKIYSKHTPINLVRDLPQGFSALEPLVDLPIGINITRFQTLLALHRSYLTPGDSSSGWTAGAAAYYVGYLQPRTFLLKYNENGTITDAVDCALDPLSETKCTLKSFTVEKGIYQTSNFRVQPTESIVRFPNITNLCPFGEVFNATRFASVYAWNRKRISNCVADYSVLYNSASFSTFKCYGVSPTKLNDLCFTNVYADSFVIRGDEVRQIAPGQTGKIADYNYKLPDDFTGCVIAWNSNNLDSKVGGNYNYLYRLFRKSNLKPFERDISTEIYQASSTPCNGVEGFNCYFPLQSYGFQPTNGVGYQPYRVVVLSFELLHAPATVCGPKKSTNLVKNKCVNFNFNGLTGTGVLTESNKKFLPFQQFGRDIADTTDAVRDPQTLEILDITPCSFGGVSVITPGTNTSNQVAVLYQDVNCTEVPVAIHADQLTPTWRVYSTGSNVFQTRAGCLIGAEHVNNSYECDIPIGAGICASYQTQTNSPRRARSVASQSIIAYTMSLGAENSVAYSNNSIAIPTNFTISVTTEILPVSMTKTSVDCTMYICGDSTECSNLLLQYGSFCTQLNRALTGIAVEQDKNTQEVFAQVKQIYKTPPIKDFGGFNFSQILPDPSKPSKRSFIEDLLFNKVTLADAGFIKQYGDCLGDIAARDLICAQKFNGLTVLPPLLTDEMIAQYTSALLAGTITSGWTFGAGAALQIPFAMQMAYRFNGIGVTQNVLYENQKLIANQFNSAIGKIQDSLSSTASALGKLQDVVNQNAQALNTLVKQLSSNFGAISSVLNDILSRLDKVEAEVQIDRLITGRLQSLQTYVTQQLIRAAEIRASANLAATKMSECVLGQSKRVDFCGKGYHLMSFPQSAPHGVVFLHVTYVPAQEKNFTTAPAICHDGKAHFPREGVFVSNGTHWFVTQRNFYEPQIITTDNTFVSGNCDVVIGIVNNTVYDPLQPELDS

SEQ ID NO: 2660 - protein, 1147 aa, Artificial Sequence
  SARS-CoV-2/Iceland/192/2020__EPI_ISL_417819 spike protein (1-1147)
MFVFFVLLPLVSSQCVNLTTRTQLPPAYTNSFTRGVYYPDKVFRSSVLHSTQDLFLPFFSNVTWFHAIHVSGTNGTKRFDNPVLPFNDGVYFASTEKSNIIRGWIFGTTLDSKTQSLLIVNNATNVVIKVCEFQFCNDPFLGVYYHKNNKSWMESEFRVYSSANNCTFEYVSQPFLMDLEGKQGNFKNLREFVFKNIDGYFKIYSKHTPINLVRDLPQGFSALEPLVDLPIGINITRFQTLLALHRSYLTPGDSSSGWTAGAAAYYVGYLQPRTFLLKYNENGTITDAVDCALDPLSETKCTLKSFTVEKGIYQTSNFRVQPTESIVRFPNITNLCPFGEVFNATRFASVYAWNRKRISNCVADYSVLYNSASFSTFKCYGVSPTKLNDLCFTNVYADSFVIRGDEVRQIAPGQTGKIADYNYKLPDDFTGCVIAWNSNNLDSKVGGNYNYLYRLFRKSNLKPFERDISTEIYQAGSTPCNGVEGFNCYFPLQSYGFQPTNGVGYQPYRVVVLSFELLHAPATVCGPKKSTNLVKNKCVNFNFNGLTGTGVLTESNKKFLPFQQFGRDIADTTDAVRDPQTLEILDITPCSFGGVSVITPGTNTSNQVAVLYQGVNCTEVPVAIHADQLTPTWRVYSTGSNVFQTRAGCLIGAEHVNNSYECDIPIGAGICASYQTQTNSPRRARSVASQSIIAYTMSLGAENSVAYSNNSIAIPTNFTISVTTEILPVSMTKTSVDCTMYICGDSTECSNLLLQYGSFCTQLNRALTGIAVEQDKNTQEVFAQVKQIYKTPPIKDFGGFNFSQILPDPSKPSKRSFIEDLLFNKVTLADAGFIKQYGDCLGDIAARDLICAQKFNGLTVLPPLLTDEMIAQYTSALLAGTITSGWTFGAGAALQIPFAMQMAYRFNGIGVTQNVLYENQKLIANQFNSAIGKIQDSLSSTASALGKLQDVVNQNAQALNTLVKQLSSNFGAISSVLNDILSRLDKVEAEVQIDRLITGRLQSLQTYVTQQLIRAAEIRASANLAATKMSECVLGQSKRVDFCGKGYHLMSFPQSAPHGVVFLHVTYVPAQEKNFTTAPAICHDGKAHFPREGVFVSNGTHWFVTQRNFYEPQIITTDNTFVSGNCDVVIGIVNNTVYDPLQPELDS

SEQ ID NO: 2661 - protein, 1147 aa, Artificial Sequence
  SARS-CoV-2/Belgium/ULG-6939/2020__EPI_ISL_417020 spike protein (1-1147)
MFVFLVLLPLVSSQCVNLTTRTQLPPAYTNSFTRGVYYPDKVFRSSVLHSTQDLFLPFFSNVTWFHAIHVSGTNGTKRFDNPVLPFNDGVYFASTEKSNIIRGWIFGTTLDSKTQSLLIVNNATNVVIKVCEFQFCNDPFLGVYYHKNNKSWMESEFRVYSSANNCTFEYVSQPFLMDLEGKQGNFKNLREFVFKNIDGYFKIYSKHTPINLVRDLPQGFSALEPLVDLPIGINITRFQTLLALHRSYLTPGDSSSGWTAGAAAYYVGYLQPRTFLLKYNENGTITDAVDCALDPLSETKCTLKSFTVEKGIYQTSNFRVQPTESIVRFPNITNLCPFGEVFNATRFASVYAWNRKRISNCVADYSVLYNSASFSTFKCYGVSPTKLNDLCFTNVYADSFVIRGDEVRQIAPGQTGKIADYNYKLPDDFTGCVIAWNSNNLDSKVGGNYNYLYRLFRKSNLKPFERDISTEIYQAGSTPCNGVEGFNCYFPLQSYGFQPTNGVGYQPYRVVVLSFELLHAPATVCGPKKSTNLVKNKCVNFNFNGLTGTGVLTESNKKFLPFQQFGRDIADTTDAVRDPQTLEILDITPCSFGGVSVITPGTNTSNQVAVLYQGVNCTEVPVAIHADQLTPTWRVYSTGSNVFQTRAGCLIGAEHVNNSYECDIPIGAGICASYQTQTNSPRRARSVASQSIIAYTMSLGAENSVVYSNNSIAIPTNFTISVTTEILPVSMTKTSVDCTMYICGDSTECSNLLLQYGSFCTQLNRALTGIAVEQDKNTQEVFAQVKQIYKTPPIKDFGGFNFSQILPDPSKPSKRSFIEDLLFNKVTLADAGFIKQYGDCLGDIAARDLICAQKFNGLTVLPPLLTDEMIAQYTSALLAGTITSGWTFGAGAALQIPFAMQMAYRFNGIGVTQNVLYENQKLIANQFNSAIGKIQDSLSSTASALGKLQDVVNQNAQALNTLVKQLSSNFGAISSVLNDILSRLDKVEAEVQIDRLITGRLQSLQTYVTQQLIRAAEIRASANLAATKMSECVLGQSKRVDFCGKGYHLMSFPQSAPHGVVFLHVTYVPAQEKNFTTAPAICHDGKAHFPREGVFVSNGTHWFVTQRNFYEPQIITTDNTFVSGNCDVVIGIVNNTVYDPLQPELDS

SEQ ID NO: 2662 - protein, 1147 aa, Artificial Sequence
  SARS-CoV-2/France/HF2496/2020__EPI_ISL_418231 spike protein (1-1147)
MFVFLVLLPLVSSQCVNLTTRTQLPPAYTNSFTRGVYYPDKVFRSSVLHSTQDLFLPFFSNVTWFHAIHVSGTNGTKRFDNPVLPFNDGVYFASTEKSNIIRGWIFGTTLDSKTQSLLIVNNATNVVIKVCEFQFCNDPFLGVYYHKNNKSWMESEFRVYSSANNCTFEYVSQPFLMDLEGKQGNFKNLREFVFKNIDGYFKIYSKHTPINLVRDLPQGFSALEPLVDLPIGINITRFQTLLALHRSYLTPGDSSSGWTAGAAAYYVGYLQPRTFLLKYNENGTITDAVDCALDPLSETKCTLKSFTVEKGIYQTSNFRVQPTESIVRFPNITNLCPFGEVFNATRFASVYAWNRKRISNCVADYSVLYNSASFSTFKCYGVSPTKLNDLCFTNVYADSFVIRGDEVRQIAPGQTGKIADYNYKLPDDFTGCVIAWNSNNLDSKVGGNYNYLYRLFRKSNLKPFERDISTEIYQAGSTPCNGVEGFNCYFPLQSYGFQPTNGVGYQPYRVVVLSFELLHAPATVCGPKKSTNLVKNKCVNFNFNGLTGTGVLTESNKKFLPFQQFGRDIADTTDAVRDPQTLEILDITPCSFGGVSVITPGTNTSNQVAVLYQGVNCTEVPVAIHADQLTPTWRVYSTGSNVFQTRAGCLIGAEHVNNSYECDIPIGAGICASYQTQTNSPRRARSVASQSIIAYTMSLGAENSVAYSNNSIAIPTNFTISVTTEILPVSMTKTSVDCTMYICGDSTECSNLLLQYGSFCTQLNRALTGIAVEQDKNTQEVFAQVKQIYKTPPIKDFGGFNFSQILPDPSKPSKRSFIEDLLFNKVTLADAGFIKQYGDCLGDIVARDLICAQKFNGLTVLPPLLTDEMIAQYTSALLAGTITSGWTFGAGAALQIPFAMQMAYRFNGIGVTQNVLYENQKLIANQFNSAIGKIQDSLSSTASALGKLQDVVNQNAQALNTLVKQLSSNFGAISSVLNDILSRLDKVEAEVQIDRLITGRLQSLQTYVTQQLIRAAEIRASANLAATKMSECVLGQSKRVDFCGKGYHLMSFPQSAPHGVVFLHVTYVPAQEKNFTTAPAICHDGKAHFPREGVFVSNGTHWFVTQRNFYEPQIITTDNTFVSGNCDVVIGIVNNTVYDPLQPELDS

SEQ ID NO: 2663 - protein, 1147 aa, Artificial Sequence
  SARS-CoV-2/USA/WA-UW291/2020__EPI_ISL_418076 spike protein (1-1147)
MFVFLVLLPLVSSQCVNLTTRTQLPPAYTNSFTRGVYYPDKVFRSSVLHSTQDLFLPFFSNVTWFHAIHVSGTNGTKRFDNPVLPFNDGVYFASTEKSNIIRGWIFGTTLDSKTQSLLIVNNATNVVIKVCEFQFCNDPFLGVYYHKNNKSWMESEFRVYSSANNCTFEYVSQPFLMDLEGKQGNFKNLREFVFKNIDGYFKIYSKHTPINLVRDLPQGFSALEPLVDLPIGINITRFQTLLALHRSYLTPGDSSSGWTAGAAAYYVGYLQPRTFLLKYNENGTITDAVDCALDPLSETKCTLKSFTVEKGIYQTSNFRVQPTESIVRFPNITNLCPFGEVFNATRFASVYAWNRKRISNCVADYSVLYNSASFSTFKCYGVSPTKLNDLCFTNVYADSFVIRGDEVRQIAPGQTGKIADYNYKLPDDFTGCVIAWNSNNLDSKVGGNYNYLYRLFRKSNLKPFERDISTEIYQAGSTPCNGVEGFNCYFPLQSYGFQPTNGVGYQPYRVVVLSFELLHAPATVCGPKKSTNLVKNKCVNFNFNGLTGTGVLTESNKKFLPFQQFGRDIADTTDAVRDPQTLEILDITPCSFGGVSVITPGTNTSNQVAVLYQGVNCTEVPVAIHADQLTPTWRVYSTGSNVFQTRAGCLIGAEHVNNSYECDIPIGAGICASYQTQTNSPRRARSVASQSIIAYTMSLGAENSVAYSNNSIAIPTNFTISVTTEILPVSMTKTSVDCTMYICGDSTECSNLLLQYGSFCTQLNRALTGIAVEQDKNTQEVFAQVKQIYKTPPIKDFGGFNFSQILPDPSKPSKRSFIEDLLFNKVTLADAGFIKQYGDCLGDIAARDLICAQKFNGLTVLPPLLTDEMIAQYTSALLAGTITSGWTFGAGAALQIPFAMQMAYRFNGIGVTQNVLYENQKLIANQFNSAIGKIQYSLSSTASALGKLQDVVNQNAQALNTLVKQLSSNFGAISSVLNDILSRLDKVEAEVQIDRLITGRLQSLQTYVTQQLIRAAEIRASANLAATKMSECVLGQSKRVDFCGKGYHLMSFPQSAPHGVVFLHVTYVPAQEKNFTTAPAICHDGKAHFPREGVFVSNGTHWFVTQRNFYEPQIITTDNTFVSGNCDVVIGIVNNTVYDPLQPELDS

SEQ ID NO: 2664 - protein, 1147 aa, Artificial Sequence; identical to SEQ ID NO: 2627
  SARS-CoV-2/Portugal/PT0034/2020__EPI_ISL_418019 spike protein (1-1147)

SEQ ID NO: 2665 - protein, 1147 aa, Artificial Sequence; identical to SEQ ID NO: 2619
  SARS-CoV-2/Iceland/202/2020__EPI_ISL_417750 spike protein (1-1147)

SEQ ID NO: 2666 - protein, 1147 aa, Artificial Sequence
  SARS-CoV-2/USA/WA-UW261/2020__EPI_ISL_418046 spike protein (1-1147)
MFVFLVLLPLVSSQCVNLTTRTQLPPAYTNSFTRGVYYPDKVFRSSVLHSTQDLFLPFFSNVTWFHAIHVSGTNGTKRFDNPVLPFNDGVYFASTEKSNIIRGWIFGTTLDSKTQSLLIVNNATNVVIKVCEFQFCNDPFLGVYYHKNNKSWMESEFRVYSSANNCTFEYVSQPFLMDLEGKQGNFKNLREFVFKNIDGYFKIYSKHTPINLVRDLPQGFSALEPLVDLPIGINITRFQTLLALHRSYLTPGDSSSGWTAGAAAYYVGYLQPRTFLLKYNENGTITDAVDCALDPLSETKCTLKSFTVEKGIYQTSNFRVQPTESIVRFPNITNLCPFGEVFNATRFTSVYAWNRKRISNCVADYSVLYNSASFSTFKCYGVSPTKLNDLCFTNVYADSFVIRGDEVRQIAPGQTGKIADYNYKLPDDFTGCVIAWNSNNLDSKVGGNYNYLYRLFRKSNLKPFERDISTEIYQAGSTPCNGVEGFNCYFPLQSYGFQPTNGVGYQPYRVVVLSFELLHAPATVCGPKKSTNLVKNKCVNFNFNGLTGTGVLTESNKKFLPFQQFGRDIADTTDAVRDPQTLEILDITPCSFGGVSVITPGTNTSNQVAVLYQDVNCTEVPVAIHADQLTPTWRVYSTGSNVFQTRAGCLIGAEHVNNSYECDIPIGAGICASYQTQTNSPRRARSVASQSIIAYTMSLGAENSVAYSNNSIAIPTNFTISVTTEILPVSMTKTSVDCTMYICGDSTECSNLLLQYGSFCTQLNRALTGIAVEQDKNTQEVFAQVKQIYKTPPIKDFGGFNFSQILPDPSKPSKRSFIEDLLFNKVTLADAGFIKQYGDCLGDIAARDLICAQKFNGLTVLPPLLTDEMIAQYTSALLAGTITSGWTFGAGAALQIPFAMQMAYRFNGIGVTQNVLYENQKLIANQFNSAIGKIQDSLSSTASALGKLQDVVNQNAQALNTLVKQLSSNFGAISSVLNDILSRLDKVEAEVQIDRLITGRLQSLQTYVTQQLIRAAEIRASANLAATKMSECVLGQSKRVDFCGKGYHLMSFPQSAPHGVVFLHVTYVPAQEKNFTTAPAICHDGKAHFPREGVFVSNGTHWFVTQRNFYEPQIITTDNTFVSGNCDVVIGIVNNTVYDPLQPELDS

SEQ ID NO: 2667 - protein, 1147 aa, Artificial Sequence
  SARS-CoV-2/Portugal/PT0035/2020__EPI_ISL_418020 spike protein (1-1147)
MFVFLVLLPLVSSQCVNLTTRTQLPPAYTNSFTRGVYYPDKVFRSSVLHSTQDLFLPFFSNVTWFHAIHVSGTNGTKRFDNPVLPFNDGVYFASTEKSNIIRGWIFGTTLDSKTQSLLIVNNATNVVIKVCEFQFCNDPFLGVYYHKNNKSWMESEFRVYSSANNCTFEYVSQPFLMDLEGKQGNFKNLREFVFKNIDGYFKIYSKHTPINLVRDLPQGFSALEPLVDLPIGINITRFQTLLALHRSYLTPGDSSSGWTAGAAAYYVGYLQPRTFLLKYNENGTITDAVDCALDPLSETKCTLKSFTVEKGIYQTSNFRVQPTESIVRFPNITNLCPFGEVFNATRFASVYAWNRKRISNCVADYSVLYNSASFSTFKCYGVSPTKLNDLCFTNVYADSFVIRGDEVRQIAPGQTGKIADYNYKLPDDFTGCVIAWNSNNLDSKVGGNYNYLYRLFRKSNLKPFERDISTEIYQAGSTPCNGVEGFNCYFPLQSYGFQPTNGVGYQPYRVVVLSFELLHAPATVCGPKKSTNLVKNKCVNFNFNGLTGTGVLTESNKKFLPFQQFGRDIADTTDAVRDPQTLEILDITPCSFGGVSVITPGTNTSNQVAVLYQDVNCTEVPVAIHADQLTPTWRVYSTGSNVFQTRAGCLIGAEHVNNSYECDIPIGAGICASYQTQTNSPRRARSVASQSIIAYTMSLGAENSVAYSNNSIAIPTNFTISVTTEILPVSMTKTSVDCTMYICGDSTECSNLLLQYGSFCTQLNRALTGIAVEQDKNTQEVFAQVKQIYKTPPIKDFGGFNFSQILPDPSKPSKRSFIEDLLFNKVTLADAGFIKQYGDCLGDISARDLICAQKFNGLTVLPPLLTDEMIAQYTSALLAGTITSGWTFGAGAALQIPFAMQMAYRFNGIGVTQNVLYENQKLIANQFNSAIGKIQDSLSSTASALGKLQDVVNQNAQALNTLVKQLSSNFGAISSVLNDILSRLDKVEAEVQIDRLITGRLQSLQTYVTQQLIRAAEIRASANLAATKMSECVLGQSKRVDFCGKGYHLMSFPQSAPHGVVFLHVTYVPAQEKNFTTAPAICHDGKAHFPREGVFVSNGTHWFVTQRNFYEPQIITTDNTFVSGNCDVVIGIVNNTVYDPLQPELDS

SEQ ID NO: 2668 - protein, 1147 aa, Artificial Sequence
  SARS-CoV-2/USA/NY-NYUMC7/2020__EPI_ISL_418192 spike protein (1-1147)
MFVFLVLLPLVSSQCVNLTTRTQLPPAYTNSFTRGVYYPDKVFRSSVLHSTQDLFLPFFSNVTWFHAIHVSGTNGTKRFDNPVLPFNDGVYFASTEKSNIIRGWIFGTTLDSKTQSLLIVNNATNVVIKVCEFQFCNDPFLGVYHHKNNKSWMESEFRVYSSANNCTFEYVSQPFLMDLEGKQGNFKNLREFVFKNIDGYFKIYSKHTPINLVRDLPQGFSALEPLVDLPIGINITRFQTLLALHRSYLTPGDSSSGWTAGAAAYYVGYLQPRTFLLKYNENGTITDAVDCALDPLSETKCTLKSFTVEKGIYQTSNFRVQPTESIVRFPNITNLCPFGEVFNATRFASVYAWNRKRISNCVADYSVLYNSASFSTFKCYGVSPTKLNDLCFTNVYADSFVIRGDEVRQIAPGQTGKIADYNYKLPDDFTGCVIAWNSNNLDSKVGGNYNYLYRLFRKSNLKPFERDISTEIYQAGSTPCNGVEGFNCYFPLQSYGFQPTNGVGYQPYRVVVLSFELLHAPATVCGPKKSTNLVKNKCVNFNFNGLTGTGVLTESNKKFLPFQQFGRDIADTTDAVRDPQTLEILDITPCSFGGVSVITPGTNTSNQVAVLYQGVNCTEVPVAIHADQLTPTWRVYSTGSNVFQTRAGCLIGAEHVNNSYECDIPIGAGICASYQTQTNSPRRARSVASQSIIAYTMSLGAENSVAYSNNSIAIPTNFTISVTTEILPVSMTKTSVDCTMYICGDSTECSNLLLQYGSFCTQLNRALTGIAVEQDKNTQEVFAQVKQIYKTPPIKDFGGFNFSQILPDPSKPSKRSFIEDLLFNKVTLADAGFIKQYGDCLGDIAARDLICAQKFNGLTVLPPLLTDEMIAQYTSALLAGTITSGWTFGAGAALQIPFAMQMAYRFNGIGVTQNVLYENQKLIANQFNSAIGKIQDSLSSTASALGKLQDVVNQNAQALNTLVKQLSSNFGAISSVLNDILSRLDKVEAEVQIDRLITGRLQSLQTYVTQQLIRAAEIRASANLAATKMSECVLGQSKRVDFCGKGYHLMSFPQSAPHGVVFLHVTYVPAQEKNFTTAPAICHDGKAHFPREGVFVSNGTHWFVTQRNFYEPQIITTDNTFVSGNCDVVIGIVNNTVYDPLQPELDS

SEQ ID NO: 2669 - protein, 1147 aa, Artificial Sequence
  SARS-CoV-2/Iceland/189/2020__EPI_ISL_417709 spike protein (1-1147)
MFVFLVLLPLVSSQCVNLTTRTQLPPAYTNSFTRGVYYPDKVFRSSVLHSTQDLFLPFFSNVTWFHAIHVSGTNGTKRFDNPVLPFNDGVYFASTEKSNIIRGWIFGTTLDSKTQSLLIVNNATNVVIKVCEFQFCNDPFLGVYYHKNNKSWMESEFRVYSSANNCTFEYVSQPFLMDLEGKQGNFKNLREFVFKNIDGYFKIYSKHTPINLVRDLPQGFSALEPLVDLPIGINITRFQTLLALHRSYLTPGDSSSGWTAGAAAYYVGYLQPRTFLLKYNENGTITDAVDCALDPLSETKCTLKSFTVEKGIYQTSNFRVQPTESIVRFPNITNLCPFGEVFNATRFASVYAWNRKRISNCVADYSVLYNSASFSTFKCYGVSPTKLNDLCFTNVYADSFVIRGDEVRQIAPGQTGKIADYNYKLPDDFTGCVIAWNSNNLDSKVGGNYNYLYRLFRKSNLKPFERDISTEIYQAGSTPCNGVEGFNCYFPLQSYGFQPTNGVGYQPYRVVVLSFELLHAPATVCGPKKSTNLVKNKCVNFNFNGLTGTGVLTESNKKFLPFQQFGRDIADTTDAVRDPQTLEILDITPCSFGGVSVITPGTNTSNQVAVLYQGVNCTEVPVAIHADQLTPTWRVYSTGSNVFQTRAGCLIGAEHVNNSYECDIPIGAGICASYQTQTNSPRRARSVASQSIIAYTMSLGAENSVAYSNNSIAIPTNFTISVTTEILPVSMTKTSVDCTMYICGDSTECSNLLLQYGSFCTQLNRALTGIAVEQDKNTQEVFAQVKQIYKTPPIKDFGGFNFSQILPDPSKPSKRSFIEDLLFNKVTLADAGFTKQYGDCLGDIAARDLICAQKFNGLTVLPPLLTDEMIAQYTSALLAGTITSGWTFGAGAALQIPFAMQMAYRFNGIGVTQNVLYENQKLIANQFNSAIGKIQDSLSSTASALGKLQDVVNQNAQALNTLVKQLSSNFGAISSVLNDILSRLDKVEAEVQIDRLITGRLQSLQTYVTQQLIRAAEIRASANLAATKMSECVLGQSKRVDFCGKGYHLMSFPQSAPHGVVFLHVTYVPAQEKNFTTAPAICHDGKAHFPREGVFVSNGTHWFVTQRNFYEPQIITTDNTFVSGNCDVVIGIVNNTVYDPLQPELDS

SEQ ID NO: 2670 - protein, 1147 aa, Artificial Sequence
  SARS-CoV-2/Australia/NSW56/2020__EPI_ISL_417408 spike protein (1-1147)
MFVFLVLLPLVSSQCVNLTTRTQLPPAYTNSFTRGVYYPDKVFRSSVLHSTQDLFLPFFSNVTWFHAIHVSGTNGTKRFDNPVLPFNDGVYFASTEKSNIIRGWIFGTTLDSKTQSLLIVNNATNVVIKVCEFQFCNDPFLGVYYHKNNKSWMESEFRVYSSANNCTFEYVSQPFLMDLEGKQGNFKNLREFVFKNIDGYFKIYSKHTPINLVRDLPQGFSALEPLVDLPIGINITRFQTLLALHRSYLTPGDSSSGWTAGAAAYYVGYLQPRTFLLKYNENGTITDAVDCALDPLSETKCTLKSFTVEKGIYQTSNFRVQPTESIVRFPNITNLCPFGEVFNATRFASVYAWNRKRISNCVADYSVLYNSASFSTFKCYGVSPTKLNDLCFTNVYADSFVIRGDEVRQIAPGQTGKIADYNYKLPDDFTGCVIAWNSNNLDSKVGGNYNYLYRLFRKSNLKPFERDISTEIYQAGSTPCNGVEGFNCYFPLQSYGFQPTNGVGYQPYRVVVLSFELLHAPATVCGPKKSTNLVKNKCVNFNFNGLTGTGVLTESNKKFLPFQQFGRDIADTTDAVRDPQTLEILDITPCSFGGVSVITPGTNTSNQVAVLYQDVNCTEVPVAIHADQLTPTWRVYSTGSNVFQTRAGCLIGAEHVNNSYECDIPIGAGICASYQTQTNSPRRARSVASQSIIAYTMSLGAENSVAYSNNSIAIPTNFTISVTTEILPVSMTKTSVDCTMYICGDSTECSNLLLQYGSFCTQLNRALTGIAVEQDKNTQEVFAQVKQIYKTPPIKDFGGFNFSQILPDSSKPSKRSFIEDLLFNKVTLADAGFIKQYGDCLGDIAARDLICAQKFNGLTVLPPLLTDEMIAQYTSALLAGTITSGWTFGAGAALQIPFAMQMAYRFNGIGVTQNVLYENQKLIANQFNSAIGKIQDSLSSTASALGKLQDVVNQNAQALNTLVKQLSSNFGAISSVLNDILSRLDKVEAEVQIDRLITGRLQSLQTYVTQQLIRAAEIRASANLAATKMSECVLGQSKRVDFCGKGYHLMSFPQSAPHGVVFLHVTYVPAQEKNFTTAPAICHDGKAHFPREGVFVSNGTHWFVTQRNFYEPQIITTDNTFVSGNCDVVIGIVNNTVYDPLQPELDS

SEQ ID NO: 2671 - protein, 1147 aa, Artificial Sequence
  SARS-CoV-2/Iceland/280/2020__EPI_ISL_417608 spike protein (1-1147)
MFVFLVLLPLVSSQCVNLTTRTQLPPAYTNSFTRGVYYPDKVFRSSVLHSTQDLFLPFFSNVTWFHAIHVSGTNGTKRFDNPVLPFNDGVYFASTEKSNIIRGWIFGTTLDSKTQSLLIVNNATNVVIKVCEFQFCNDPFLGVYYHKNNKSWMESEFRVYSSANNCTFEYVSQPFLMDLEGKQGNFKNLREFVFKNIDGYFKIYSKHTPINLVRDLPQGFSALEPLVDLPIGINITRFQTLLALHRSYLTPGDSSSGWTAGAAAYYVGYLQPRTFLLKYNENGTITDAVDCALDPLSETKCTLKSFTVEKGIYQTSNFRVQPTESIVRFPNITNLCPFGEVFNATRFASVYAWNRKRISNCVADYSVLYNSASFSTFKCYGVSPTKLNDLCFTNVYADSFVIRGDEVRQIAPGQTGKIADYNYKLPDDFTGCVIAWNSNNLDSKVGGNYNYLYRLFRKSNLKPFERDISTEIYQAGSTPCNGVEGFNCYFPLQSYGFQPTNGVGYQPYRVVVLSFELLHAPATVCGPKKSTNLVKNKCVNFNFNGLTGTGVLTESNKKFLPFQQFGRDIADTTDAVRDPQTLEILDITPCSFGGVSVITPGTNTSNQVAVLYQGVNCTEVPVAIHADQLTPTWRVYSTGSNVFQTRAGCLIGAEHVNNSYECDIPIGAGICASYHTQTNSPRRARSVASQSIIAYTMSLGAENSVAYSNNSIAIPTNFTISVTTEILPVSMTKTSVDCTMYICGDSTECSNLLLQYGSFCTQLNRALTGIAVEQDKNTQEVFAQVKQIYKTPPIKDFGGFNFSQILPDPSKPSKRSFIEDLLFNKVTLADAGFIKQYGDCLGDIAARDLICAQKFNGLTVLPPLLTDEMIAQYTSALLAGTITSGWTFGAGAALQIPFAMQMAYRFNGIGVTQNVLYENQKLIANQFNSAIGKIQDSLSSTASALGKLQDVVNQNAQALNTLVKQLSSNFGAISSVLNDILSRLDKVEAEVQIDRLITGRLQSLQTYVTQQLIRAAEIRASANLAATKMSECVLGQSKRVDFCGKGYHLMSFPQSAPHGVVFLHVTYVPAQEKNFTTAPAICHDGKAHFPREGVFVSNGTHWFVTQRNFYEPQIITTDNTFVSGNCDVVIGIVNNTVYDPLQPELDS

SEQ ID NO: 2672 - protein, 1147 aa, Artificial Sequence; identical to SEQ ID NO: 2627
  SARS-CoV-2/Iceland/247/2020__EPI_ISL_417575 spike protein (1-1147)

SEQ ID NO: 2673 - protein, 1147 aa, Artificial Sequence
  SARS-CoV-2/Iceland/238/2020__EPI_ISL_417566 spike protein (1-1147)
MFVFLVLLPLVSSQCVNLTTRTQLPPAYTNSFTRGVYYPDKVFRSSVLHSTQDLFLPFFSNVTWFHAIHVSGTNGTKRFDNPVLPFNDGVYFASTEKSNIIRGWIFGTTLDSKTQSLLIVNNATNVVIKVCEFQFCNDPFLGVYYHKNNKSWMESEFRVYSSANNCTFEYVSQPFLMDLEGKQGNFKNLREFVFKNIDGYFKIYSKHTPINLVRDLPQGFSALEPLVDLPIGINITRFQTLLALHRSYLTPGDSSSGWTAGAAAYYVGYLQPRTFLLKYNENGTITDAVDCALDPLSETKCTLKSFTVEKGIYQTSNFRVQPTESIVRFPNITNLCPFGEVFNATRFASVYAWNRKRISNCVADYSVLYNSASFSTFKCYGVSPTKLNDLCFTNVYADSFVIRGDEVRQIAPGQTGKIADYNYKLPDDFTGCVIAWNSNNLDSKVGGNYNYLYRLFRKSNLKPFERDISTEIYQAGSTPCNGVEGFNCYFPLQSYGFQPTNGVGYQPYRVVVLSFELLHAPATVCGPKKSTNLVKNKCVNFNFNGLTGTGVLTESNKKFLPFQQFGRDIADTTDAVRDPQTLEILDITPCSFGGVSVITPGTNTSNQVAVLYQGVNCTEVPVAIHADQLTPTWRVYSTGSNVFQTRAGCLIGAEHVNNSYECDIPIGAGICASYQTQTNSPRRARSVASQSIIAYTMSLGAENSVAYSNNSIAIPTNFTISVTTEILPVSMTKTSVDCTMYICGDSTECSNLLLQYGSFCTQLNRALTGIAVEQDKNTQEVFAQVKQIYKTPPIKDFGGFNFSQILPDPSKPSKRSFIEDLLFNKVTLADVGFIKQYGDCLGDIAARDLICAQKFNGLTVLPPLLTDEMIAQYTSALLAGTITSGWTFGAGAALQIPFAMQMAYRFNGIGVTQNVLYENQKLIANQFNSAIGKIQDSLSSTASALGKLQDVVNQNAQALNTLVKQLSSNFGAISSVLNDILSRLDKVEAEVQIDRLITGRLQSLQTYVTQQLIRAAEIRASANLAATKMSECVLGQSKRVDFCGKGYHLMSFPQSAPHGVVFLHVTYVPAQEKNFTTAPAICHDGKAHFPREGVFVSNGTHWFVTQRNFYEPQIITTDNTFVSGNCDVVIGIVNNTVYDPLQPELDS

SEQ ID NO: 2674 - protein, 1147 aa, Artificial Sequence
  SARS-CoV-2/Greece/16/2020__EPI_ISL_418265 spike protein (1-1147)
MFVFLVLLPLVSSQCVNLTTRTQLPPAYTNSFTRGVYYPDKVFRSSVLHSTQDLFLPFFSNVTWFHAIHVSGTNGTKRFDNPVLPFNDGVYFASTEKSNIIRGWIFGTTLDSKTQSLLIVNNATNVVIKVCEFQFCNDPFLGVYYHKNNKSWMESEFRVYSSANNCTFEYVSQPFLMDLEGKQGNFKNLREFVFKNVDGYFKIYSKHTPINLVRDLPQGFSALEPLVDLPIGINITRFQTLLALHRSYLTPGDSSSGWTAGAAAYYVGYLQPRTFLLKYNENGTITDAVDCALDPLSETKCTLKSFTVEKGIYQTSNFRVQPTESIVRFPNITNLCPFGEVFNATRFASVYAWNRKRISNCVADYSVLYNSASFSTFKCYGVSPTKLNDLCFTNVYADSFVIRGDEVRQIAPGQTGKIADYNYKLPDDFTGCVIAWNSNNLDSKVGGNYNYLYRLFRKSNLKPFERDISTEIYQAGSTPCNGVEGFNCYFPLQSYGFQPTNGVGYQPYRVVVLSFELLHAPATVCGPKKSTNLVKNKCVNFNFNGLTGTGVLTESNKKFLPFQQFGRDIADTTDAVRDPQTLEILDITPCSFGGVSVITPGTNTSNQVAVLYQDVNCTEVPVAIHADQLTPTWRVYSTGSNVFQTRAGCLIGAEHVNNSYECDIPIGAGICASYQTQTNSPRRARSVASQSIIAYTMSLGAENSVAYSNNSIAIPTNFTISVTTEILPVSMTKTSVDCTMYICGDSTECSNLLLQYGSFCTQLNRALTGIAVEQDKNTQEVFAQVKQIYKTPPIKDFGGFNFSQILPDPSKPSKRSFIEDLLFNKVTLADAGFIKQYGDCLGDIAARDLICAQKFNGLTVLPPLLTDEMIAQYTSALLAGTITSGWTFGAGAALQIPFAMQMAYRFNGIGVTQNVLYENQKLIANQFNSAIGKIQDSLSSTASALGKLQDVVNQNAQALNTLVKQLSSNFGAISSVLNDILSRLDKVEAEVQIDRLITGRLQSLQTYVTQQLIRAAEIRASANLAATKMSECVLGQSKRVDFCGKGYHLMSFPQSAPHGVVFLHVTYVPAQEKNFTTAPAICHDGKAHFPREGVFVSNGTHWFVTQRNFYEPQIITTDNTFVSGNCDVVIGIVNNTVYDPLQPELDS

SEQ ID NO: 2675 - protein, 1147 aa, Artificial Sequence
  SARS-CoV-2/Iceland/319/2020__EPI_ISL_417648 spike protein (1-1147)
MFVFLVLLPLVSSQCVNLTTRTQLPPAYTNSFTRGVYYPDKVFRSSVLHSTQDLFLPFFSNVTWFHAIHVSGTNGTKRFDNPVLPFNDGVYFASTEKSNIIRGWIFGTTLDSKTQSLLIVNNATNVVIKVCEFQFCNDPFLGVYYHKNNKSWMESEFRVYSSANNCTFEYVSQPFLIDLEGKQGNFKNLREFVFKNIDGYFKIYSKHTPINLVRDLPQGFSALEPLVDLPIGINITRFQTLLALHRSYLTPGDSSSGWTAGAAAYYVGYLQPRTFLLKYNENGTITDAVDCALDPLSETKCTLKSFTVEKGIYQTSNFRVQPTESIVRFPNITNLCPFGEVFNATRFASVYAWNRKRISNCVADYSVLYNSASFSTFKCYGVSPTKLNDLCFTNVYADSFVIRGDEVRQIAPGQTGKIADYNYKLPDDFTGCVIAWNSNNLDSKVGGNYNYLYRLFRKSNLKPFERDISTEIYQAGSTPCNGVEGFNCYFPLQSYGFQPTNGVGYQPYRVVVLSFELLHAPATVCGPKKSTNLVKNKCVNFNFNGLTGTGVLTESNKKFLPFQQFGRDIADTTDAVRDPQTLEILDITPCSFGGVSVITPGTNTSNQVAVLYQGVNCTEVPVAIHADQLTPTWRVYSTGSNVFQTRAGCLIGAEHVNNSYECDIPIGAGICASYQTQTNSPRRARSVASQSIIAYTMSLGAENSVAYSNNSIAIPTNFTISVTTEILPVSMTKTSVDCTMYICGDSTECSNLLLQYGSFCTQLNRALTGIAVEQDKNTQEVFAQVKQIYKTPPIKDFGGFNFSQILPDPSKPSKRSFIEDLLFNKVTLADAGFIKQYGDCLGDIAARDLICAQKFNGLTVLPPLLTDEMIAQYTSALLAGTITSGWTFGAGAALQIPFAMQMAYRFNGIGVTQNVLYENQKLIANQFNSAIGKIQDSLSSTASALGKLQDVVNQNAQALNTLVKQLSSNFGAISSVLNDILSRLDKVEAEVQIDRLITGRLQSLQTYVTQQLIRAAEIRASANLAATKMSECVLGQSKRVDFCGKGYHLMSFPQSAPHGVVFLHVTYVPAQEKNFTTAPAICHDGKAHFPREGVFVSNGTHWFVTQRNFYEPQIITTDNTFVSGNCDVVIGIVNNTVYDPLQPELDS

SEQ ID NO: 2676 - protein, 1147 aa, Artificial Sequence
  SARS-CoV-2/Congo/94/2020__EPI_ISL_417947 spike protein (1-1147)
MFVFLVLLPLVSSQCVNLTTRTQLPPAYTNSFTRGVYYPDKVFRSSVLHSTQDLFLPFFSNVTWFHAIHVSGTNGTKRFDNPVLPFNDGVYFASTEKSNIIRGWIFGTTLDSKTQSLLIVNNATNVVIKVCEFQFCNDPFLGVYYHKNNKSWMESEFRVYSSANNCTFEYVSQPFLMDLEGKQGNFKNLREFVFKNIDGYFKIYSKHTPINLVRDLPQGFSALEPLVDLPIGINITRFQTLLALHRSYLTPGDSSSGWTAGAAAYYVGYLQPRTFLLKYNENGTITDAVDCALDPLSETKCTLKSFTVEKGIYQTSNFRVQPTESIVRFPNITNLCPFGEVFNATRFASVYAWNRKRISNCVADYSVLYNSASFSTFKCYGVSPTKLNDLCFTNVYADSFVIRGDEVRQIAPGQTGKIADYNYKLPDDFTGCVIAWNSNNLDSKVGGNYNYLYRLFRKSNLKPFERDISTEIYQAGSTPCNGVEGFNCYFPLQSYGFQPTNGVGYQPYRVVVLSFELLHAPATVCGPKKSTNLVKNKCVNFNFNGLTGTGVLTESNKKFLPFQQFGRDIADTTDAVRDPQTLEILDITPCSFGGVSVITPGTNTSNQVAVLYQGVNCTEVPVAIHADQLTPTWRVYSTGSNVFQTRAGCLIGAEHVNNSYECDIPIGAGICASYQTQTNSPRRARSVASQSIIAYTMSLGAENSVAYSNNSIAIPTNFTISVTTEILPVSMTKTSVDCTMYICGDSTECSNLLLQYGSFCTQLNRALTGIAVEQDKNTQEVFAQVKQIYKTPPIKDFGGFNFSQILPDPSKPSKRSFIEDILFNKVTLADAGFIKQYGDCLGDIAARDLICAQKFNGLTVLPPLLTDEMIAQYTSALLAGTITSGWTFGAGAALQIPFAMQMAYRFNGIGVTQNVLYENQKLIANQFNSAIGKIQDSLSSTASALGKLQDVVNQNAQALNTLVKQLSSNFGAISSVLNDILSRLDKVEAEVQIDRLITGRLQSLQTYVTQQLIRAAEIRASANLAATKMSECVLGQSKRVDFCGKGYHLMSFPQSAPHGVVFLHVTYVPAQEKNFTTAPAICHDGKAHFPREGVFVSNGTHWFVTQRNFYEPQIITTDNTFVSGNCDVVIGIVNNTVYDPLQPELDS

SEQ ID NO: 2677 - protein, 1147 aa, Artificial Sequence
  SARS-CoV-2/Congo/158/2020__EPI_ISL_417950 spike protein (1-1147)
MFVFLVLLPLVSSQCVNLTTRTQLPPAYTNSFTRGVYYPDKVFRSSVLHSTQDLFLPFFSNVTWFHAIHVSGTNGTKRFDNPVLPFNDGVYFASTEKSNIIRGWIFGTTLDSKTQSLLIVNNATNVVIKVCEFQFCNDPFLGVYYHKNNKSWMESEFRVYSSANNCTFEYVSQPFLMDLEGKQGNFKNLREFVFKNIDGYFKIYSKHTPINLVRDLPQGFSALEPLVDLPIGINITRFQTLLALHRSYLTPGDSSSGWTAGAAAYYVGYLQPRTFLLKYNENGTITDAVDCALDPLSETKCTLKSFTVEKGIYQTSNFRVQPTESIVRFPNITNLCPFGEVFNATRFASVYAWNRKRISNCVADYSVLYNSASFSTFKCYGVSPTKLNDLCFTNVYADSFVIRGDEVRQIAPGQTGKIADYNYKLPDDFTGCVIAWNSNNLDSKVGGNYNYLYRLFRKSNLKPFERDISTEIYQAGSTPCNGVEGFNCYFPLQSYGFQPTNGVGYQPYRVVVLSFELLHAPATVCGPKKSTNLVKNKCVNFNFNGLTGTGVLTESNKKFLPFQQFGRDIADTTDAVRDPQTLEILDITPCSFGGVSVITPGTNTSNQVAVLYQDVNCTEVPVAIHADQLTPTWRVYSTGSNVFQTRAGCLIGAEHVNNSYECDIPIGAGICASYQTQTNSPRRARSVASQSIIAYTMSLGAENSVAYSNNSIAIPTNFTISVTTEILPVSMTKTSVDCTMYICGDSTECSNLLLQYGSFCTQLNRALTGIAVEQDKNTQEVFAQVKQIYKTPPIKDFGGFNFSQILPDPSKPSKRSFIEDLLFNKVTLADAGFIKQYGDCLGDIAARDLICAQKFNGLTVLPPLLTDEMIAQYTSALLAGTITSGWTFGAGAALQIPFAMQMAYRFNGIGVTQNVLYENQKLIANQFNSAIGKIQDSLSSTASALGKLQDVVNQNAQALNTLVKQLSSNFGAISSVLNDILSRLDKVEAEVQIDRLITGRLQSLQTYVTQQLIRAAEIRASANLAATKMSECVLGQSKRVDFCGKGYHLMSFPQSAPHGVVFLHVTYVPAQEKNFTTAPAICHDGKAHFPREGVFVSNGTHWFVTQRNFYEPQIITTDNTFLSGNCDVVIGIVNNTVYDPLQPELDS

SEQ ID NO: 2678 - protein, 1147 aa, Artificial Sequence
  SARS-CoV-2/USA/UT-00034/2020__EPI_ISL_417977 spike protein (1-1147)
MFVFLVLLPLVSSQCVNLTTRTQLPPAYTNSFTRGVYYPDKVFRSSVLHSTQDLFLPFFSNVTWFHAIHVSGTNGTKRFDNPVLPFNDGVYFASTEKSNIIRGWIFGTTLDSKTQSLLIVNNATNVVIKVCEFQFCNDPFLGVYYYKNNKSWMESEFRVYSSANNCTFEYVSQPFLMDLEGKQGNFKNLREFVFKNIDGYFKIYSKHTPINLVRDLPQGFSALEPLVDLPIGINITRFQTLLALHRSYLTPGDSSSGWTAGAAAYYVGYLQPRTFLLKYNENGTITDAVDCALDPLSETKCTLKSFTVEKGIYQTSNFRVQPTESIVRFPNITNLCPFGEVFNATRFASVYAWNRKRISNCVADYSVLYNSASFSTFKCYGVSPTKLNDLCFTNVYADSFVIRGDEVRQIAPGQTGKIADYNYKLPDDFTGCVIAWNSNNLDSKVGGNYNYLYRLFRKSNLKPFERDISTEIYQAGSTPCNGVEGFNCYFPLQSYGFQPTNGVGYQPYRVVVLSFELLHAPATVCGPKKSTNLVKNKCVNFNFNGLTGTGVLTESNKKFLPFQQFGRDIADTTDAVRDPQTLEILDITPCSFGGVSVITPGTNTSNQVAVLYQGVNCTEVPVAIHADQLTPTWRVYSTGSNVFQTRAGCLIGAEHVNNSYECDIPIGAGICASYQTQTNSPRRARSVASQSIIAYTMSLGAENSVAYSNNSIAIPTNFTISVTTEILPVSMTKTSVDCTMYICGDSTECSNLLLQYGSFCTQLNRALTGIAVEQDKNTQEVFAQVKQIYKTPPIKDFGGFNFSQILPDPSKPSKRSFIEDLLFNKVTLADAGFIKQYGDCLGDIAARDLICAQKFNGLTVLPPLLTDEMIAQYTSALLAGTITSGWTFGAGAALQIPFAMQMAYRFNGIGVTQNVLYENQKLIANQFNSAIGKIQDSLSSTASALGKLQDVVNQNAQALNTLVKQLSSNFGAISSVLNDILSRLDKVEAEVQIDRLITGRLQSLQTYVTQQLIRAAEIRASANLAATKMSECVLGQSKRVDFCGKGYHLMSFPQSAPHGVVFLHVTYVPAQEKNFTTAPAICHDGKAHFPREGVFVSNGTHWFVTQRNFYEPQIITTDNTFVSGNCDVVIGIVNNTVYDPLQPELDS

SEQ ID NO: 2679 - protein, 1147 aa, Artificial Sequence
  SARS-CoV-2/USA/UT-00033/2020__EPI_ISL_417976 spike protein (1-1147)
MFVFLVLLPLVSSQCVNLTTRTQLPPAYTNSFTRGVYYPDKVFRSSVLHSTQDLFLPFFSNVTWFHAIHVSGTNGTKRFDNPVLPFNDGVYFASTEKSNIIRGWIFGTTLDSKTQSLLIVNNATNVVIKVCEFQFCNDPFLGVYYHKNNKSWMESEFRVYSSANNCTFEYVSQPFLMDLEGKQGNFKNLREFVFKNIDGYFKIYSKHTPINLVRDLPQGFSALEPLVDLPIGINITRFQTLLALHRSYLTPGDSSSGLTAGAAAYYVGYLQPRTFLLKYNENGTITDAVDCALDPLSETKCTLKSFTVEKGIYQTSNFRVQPTESIVRFPNITNLCPFGEVFNATRFASVYAWNRKRISNCVADYSVLYNSASFSTFKCYGVSPTKLNDLCFTNVYADSFVIRGDEVRQIAPGQTGKIADYNYKLPDDFTGCVIAWNSNNLDSKVGGNYNYLYRLFRKSNLKPFERDISTEIYQAGSTPCNGVEGFNCYFPLQSYGFQPTNGVGYQPYRVVVLSFELLHAPATVCGPKKSTNLVKNKCVNFNFNGLTGTGVLTESNKKFLPFQQFGRDIADTTDAVRDPQTLEILDITPCSFGGVSVITPGTNTSNQVAVLYQGVNCTEVPVAIHADQLTPTWRVYSTGSNVFQTRAGCLIGAEHVNNSYECDIPIGAGICASYQTQTNSPRRARSVASQSIIAYTMSLGAENSVAYSNNSIAIPTNFTISVTTEILPVSMTKTSVDCTMYICGDSTECSNLLLQYGSFCTQLNRALTGIAVEQDKNTQEVFAQVKQIYKTPPIKDFGGFNFSQILPDPSKPSKRSFIEDLLFNKVTLADAGFIKQYGDCLGDIAARDLICAQKFNGLTVLPPLLTDEMIAQYTSALLAGTITSGWTFGAGAALQIPFAMQMAYRFNGIGVTQNVLYENQKLIANQFNSAIGKIQDSLSSTASALGKLQDVVNQNAQALNTLVKQLSSNFGAISSVLNDILSRLDKVEAEVQIDRLITGRLQSLQTYVTQQLIRAAEIRASANLAATKMSECVLGQSKRVDFCGKGYHLMSFPQSAPHGVVFLHVTYVPAQEKNFTTAPAICHDGKAHFPREGVFVSNGTHWFVTQRNFYEPQIITTDNTFVSGNCDVVIGIVNNTVYDPLQPELDS

SEQ ID NO: 2680 - protein, 1147 aa, Artificial Sequence
  SARS-CoV-2/USA/WI-13/2020__EPI_ISL_417516 spike protein (1-1147)
MFVFLVLLPLVSSQCVNLTTRTQLPPAYTNSFTRGVYYPDKVFRSSVLHSTQDLFLPFFSNVTWFHAIHVSGTNGTKRFDNPVLPFNDGVYFASTEKSNIIRGWIFGTTLDSKTQSLLIVNNATNVVIKVCEFQFCNDPFLGVYYHKNNKSWMESEFRVYSSANNCTFEYVSQPFLMDLEGKQGNFKNLREFVFKNIDGYFKIYSKHTPINLVRDLPQGFSALEPLVDLPIGINITRFQTLLALHRSYLTPGDSSSGWTAGAAAYYVGYLQPRTFLLKYNENGTITDAVDCALDPLSETKCTLKSFTVEKGIYQTSNFRVLPTESIVRFPNITNLCPFGEVFNATRFASVYAWNRKRISNCVADYSVLYNSASFSTFKCYGVSPTKLNDLCFTNVYADSFVIRGDEVRQIAPGQTGKIADYNYKLPDDFTGCVIAWNSNNLDSKVGGNYNYLYRLFRKSNLKPFERDISTEIYQAGSTPCNGVEGFNCYFPLQSYGFQPTNGVGYQPYRVVVLSFELLHAPATVCGPKKSTNLVKNKCVNFNFNGLTGTGVLTESNKKFLPFQQFGRDIADTTDAVRDPQTLEILDITPCSFGGVSVITPGTNTSNQVAVLYQGVNCTEVPVAIHADQLTPTWRVYSTGSNVFQTRAGCLIGAEHVNNSYECDIPIGAGICASYQTQTNSPRRARSVASQSIIAYTMSLGAENSVAYSNNSIAIPTNFTISVTTEILPVSMTKTSVDCTMYICGDSTECSNLLLQYGSFCTQLNRALTGIAVEQDKNTQEVFAQVKQIYKTPPIKDFGGFNFSQILPDPSKPSKRSFIEDLLFNKVTLADAGFIKQYGDCLGDIAARDLICAQKFNGLTVLPPLLTDEMIAQYTSALLAGTITSGWTFGAGAALQIPFAMQMAYRFNGIGVTQNVLYENQKLIANQFNSAIGKIQDSLSSTASALGKLQDVVNQNAQALNTLVKQLSSNFGAISSVLNDILSRLDKVEAEVQIDRLITGRLQSLQTYVTQQLIRAAEIRASANLAATKMSECVLGQSKRVDFCGKGYHLMSFPQSAPHGVVFLHVTYVPAQEKNFTTAPAICHDGKAHFPREGVFVSNGTHWFVTQRNFYEPQIITTDNTFVSGNCDVVIGIVNNTVYDPLQPELDS

SEQ ID NO: 2681 - protein, 1146 aa, Artificial Sequence
  SARS-CoV-2/India/1-27/2020__EPI_ISL_413522 spike protein (1-1146)
MFVFLVLLPLVSSQCVNLTTRTQLPPAYTNSFTRGVYYPDKVFRSSVLHSTQDLFLPFFSNVTWFHAIHVSGTNGTKRFDNPVLPFNDGVYFASTEKSNIIRGWIFGTTLDSKTQSLLIVNNATNVVIKVCEFQFCNDPFLGVYHKNNKSWMESEFRVYSSANNCTFEYVSQPFLMDLEGKQGNFKNLREFVFKNIDGYFKIYSKHTPINLVRDLPQGFSALEPLVDLPIGINITRFQTLLALHRSYLTPGDSSSGWTAGAAAYYVGYLQPRTFLLKYNENGTITDAVDCALDPLSETKCTLKSFTVEKGIYQTSNFRVQPTESIVRFPNITNLCPFGEVFNATRFASVYAWNRKRISNCVADYSVLYNSASFSTFKCYGVSPTKLNDLCFTNVYADSFVIRGDEVIQIAPGQTGKIADYNYKLPDDFTGCVIAWNSNNLDSKVGGNYNYLYRLFRKSNLKPFERDISTEIYQAGSTPCNGVEGFNCYFPLQSYGFQPTNGVGYQPYRVVVLSFELLHAPATVCGPKKSTNLVKNKCVNFNFNGLTGTGVLTESNKKFLPFQQFGRDIADTTDAVRDPQTLEILDITPCSFGGVSVITPGTNTSNQVAVLYQDVNCTEVPVAIHADQLTPTWRVYSTGSNVFQTRAGCLIGAEHVNNSYECDIPIGAGICASYQTQTNSPRRARSVASQSIIAYTMSLGAENSVAYSNNSIAIPTNFTISVTTEILPVSMTKTSVDCTMYICGDSTECSNLLLQYGSFCTQLNRALTGIAVEQDKNTQEVFAQVKQIYKTPPIKDFGGFNFSQILPDPSKPSKRSFIEDLLFNKVTLADAGFIKQYGDCLGDIAARDLICAQKFNGLTVLPPLLTDEMIAQYTSALLAGTITSGWTFGAGAALQIPFAMQMAYRFNGIGVTQNVLYENQKLIANQFNSAIGKIQDSLSSTASALGKLQDVVNQNAQALNTLVKQLSSNFGAISSVLNDILSRLDKVEAEVQIDRLITGRLQSLQTYVTQQLIRAAEIRASANLAATKMSECVLGQSKRVDFCGKGYHLMSFPQSAPHGVVFLHVTYVPAQEKNFTTAPAICHDGKAHFPREGVFVSNGTHWFVTQRNFYEPQIITTDNTFVSGNCDVVIGIVNNTVYDPLQPELDS

SEQ ID NO: 2682 - protein, 1141 aa, Artificial Sequence
  SARS-CoV-2/pangolin/Guangxi/P4L/2017__EPI_ISL_410538 spike protein (1-1141)
MFVFLFVLPLVSSQCVNLTTRTGIPPGYTNSSTRGVYYPDKVFRSSILHLTQDLFLPFFSNVTWFNTINYQGGFKKFDNPVLPFNDGVYFASTEKSNIIRGWIFGTTLDARTQSLLIVNNATNVVIKVCEFQFCTDPFLGVYYHNNNKTWVENEFRVYSSANNCTFEYISQPFLMDLEGKQGNFKNLREFVFKNVDGYFKIYSKHTPIDLVRDLPRGFAALEPLVDLPIGINITRFQTLLALHRSYLTPGNLESGWTTGAAAYYVGYLQQRTFLLSYNQNGTITDAVDCSLDPLSETKCTLKSLTVEKGIYQTSNFRVQPTISIVRFPNITNLCPFGEVFNASKFASVYAWNRKRISNCVADYSVLYNSTSFSTFKCYGVSPTKLNDLCFTNVYADSFVVKGDEVRQIAPGQTGVIADYNYKLPDDFTGCVIAWNSVKQDALTGGNYGYLYRLFRKSKLKPFERDISTEIYQAGSTPCNGQVGLNCYYPLERYGFHPTTGVNYQPFRVVVLSFELLNGPATVCGPKLSTTLVKDKCVNFNFNGLTGTGVLTTSKKQFLPFQQFGRDISDTTDAVRDPQTLEILDITPCSFGGVSVITPGTNTSNQVAVLYQDVNCTEVPMAIHAEQLTPAWRVYSAGANVFQTRAGCLVGAEHVNNSYECDIPVGAGICASYHSMSSLRSVNQRSIIAYTMSLGAENSVAYSNNSIAIPTNFTISVTTEILPVSMTKTSVDCTMYICGDSIECSNLLLQYGSFCTQLNRALTGIAVEQDKNTQEVFAQVKQIYKTPPIKDFGGFNFSQILPDPSKPSKRSFIEDLLFNKVTLADAGFIKQYGDCLGDIAARDLICAQKFNGLTVLPPLLTDEMIAQYTSALLAGTITSGWTFGAGAALQIPFAMQMAYRFNGIGVTQNVLYENQKLIANQFNSAIGKIQDSLSSTASALGKLQDVVNQNAQALNTLVKQLSSNFGAISSVLNDILSRLDKVEAEVQIDRLITGRLQSLQTYVTQQLIRAAEIRASANLAATKMSECVLGQSKRVDFCGKGYHLMSFPQSAPHGVVFLHVTYVPAQEKNFTTAPAICHEGKAHFPREGVFVSNGTHWFITQRNFYEPQIITTDNTFVSGSCDVVIGIVNNTVYDPLQPELDS

SEQ ID NO: 2683 - protein, 1141 aa, Artificial Sequence
  SARS-CoV-2/pangolin/Guangxi/P5L/2017__EPI_ISL_410540 spike protein (1-1141)
MFVFLFVLPLVSSQCVNLTTRTGIPPGYTNSSTRGVYYPDKVFRSSILHLTQDLFLPFFSNVTWFNTINYQGGFKKFDNPVLPFNDGVYFASTEKSNIIRGWIFGTTLDARTQSLLIVNNATNVVIKVCEFQFCTDPFLGVYYHNNNKTWVENEFRVYSSANNCTFEYISQPFLMDLEGKQGNFKNLREFVFKNVDGYFKIYSKHTPIDLVRDLPRGFAALEPLVDLPIGINITRFQTLLALHRSYLTPGKLESGWTTGAAAYYVGYLQQRTFLLSYNQNGTITDAVDCSLDPLSETKCTLKSLTVEKGIYQTSNFRVQPTISIVRFPNITNLCPFGEVFNASKFASVYAWNRKRISNCVADYSVLYNSTSFSTFKCYGVSPTKLNDLCFTNVYADSFVVKGDEVRQIAPGQTGVIADYNYKLPDDFTGCVIAWNSVKQDALTGGNYGYLYRLFRKSKLKPFERDISTEIYQAGSTPCNGQVGLNCYYPLERYGFHPTTGVNYQPFRVVVLSFELLNGPATVCGPKLSTTLVKDKCVNFNFNGLTGTGVLTTSKKQFLPFQQFGRDISDTTDAVRDPQTLEILDITPCSFGGVSVITPGTNTSNQVAVLYQDVNCTEVPMAIHAEQLTPAWRVYSAGANVFQTRAGCLVGAEHVNNSYECDIPVGAGICASYHSMSSFRSVNQRSIIAYTMSLGAENSVAYSNNSIAIPTNFTISVTTEILPVSMTKTSVDCTMYICGDSIECSNLLLQYGSFCTQLNRALTGIAVEQDKNTQEVFAQVKQIYKTPPIKDFGGFNFSQILPDPSKPSKRSFIEDLLFNKVTLADAGFIKQYGDCLGDIAARDLICAQKFNGLTVLPPLLTDEMIAQYTSALLAGTITSGWTFGAGAALQIPFAMQMAYRFNGIGVTQNVLYENQKLIANQFNSAIGKIQDSLSSTASALGKLQDVVNQNAQALNTLVKQLSSNFGAISSVLNDILSRLDKVEAEVQIDRLITGRLQSLQTYVTQQLIRAAEIRASANLAATKMSECVLGQSKRVDFCGKGYHLMSFPQSAPHGVVFLHVTYVPAQEKNFTTAPAICHEGKAHFPREGVFVSNGTHWFITQRNFYEPQIITTDNTFVSGSCDVVIGIVNNTVYDPLQPELDS

SEQ ID NO: 2684 - protein, 1141 aa, Artificial Sequence
  SARS-CoV-2/pangolin/Guangxi/P5E/2017__EPI_ISL_410541 spike protein (1-1141)
MFVFLFVLPLVSSQCVNLTTRTGIPPGYTNSSTRGVYYPDKVFRSSILHLTQDLFLPFFSNVTWFNTITYQGGSKKFDNPVLPFNDGVYFASTEKSNIIRGWIFGTTLDARTQSLLIVNNATNVVIKVCEFQFCTDPFLGVYYHNNNKTWVENEFRVYSSANNCTFEYISQPFLMDLEGKQGNFKNLREFVFKNVDGYFKIYSKHTPIDLVRDLPRGFAALEPLVDLPIGINITRFQTLLALHRSYLTPGKLESGWTTGAAAYYVGYLQQRTFLLSYNQNGTITDAVDCSLDPLSETKCTLKSLTVEKGIYQTSNFRVQPTISIVRFPNITNLCPFGEVFNASKFASVYAWNRKRISNCVADYSVLYNSTSFSTFKCYGVSPTKLNDLCFTNVYADSFVVKGDEVRQIAPGQTGVIADYNYKLPDDFTGCVIAWNSVKQDALTGDNYGYLYRLFRKSKLKPFERDISTEIYQAGSTPCNGQVGLNCYYPLERYGFHPTTGVNYQPFRVVVLSFELLNGPATVCGPKLSTTLVKDKCVNFNFNGLTGTGVLTTSKKQFLPFQQFGRDISDTTDAVRDPQTLEILDITPCSFGGVSVITPGTNTSNQVAVLYQDVNCTEVPMAIHAEQLTPAWRVYSAGANVFQTRAGCLVGAEHVNNSYECDIPVGAGICASYHSMSSFRSVNQRSIIAYTMSLGAENSVAYSNNSIAIPTNFTISVTTEILPVSMTKTSVDCTMYICGDSIECSNLLLQYGSFCTQLNRALTGIAVEQDKNTQEVFAQVKQIYKTPPIKDFGGFNFSQILPDPSKPSKRSFIEDLLFNKVTLADAGFIKQYGDCLGDIAARDLICAQKFNGLTVLPPLLTDEMIAQYTSALLAGTITSGWTFGAGAALQIPFAMQMAYRFNGIGVTQNVLYENQKLIANQFNSAIGKIQDSLSSTASALGKLQDVVNQNAQALNTLVKQLSSNFGAISSVLNDILSRLDKVEAEVQIDRLITGRLQSLQTYVTQQLIRAAEIRASANLAATKMSECVLGQSKRVDFCGKGYHLMSFPQSAPHGVVFLHVTYVPAQEKNFTTAPAICHEGKAHFPREGVFVSNGTHWFITQRNFYEPQIITTDNTFVSGSCDVVIGIVNNTVYDPLQPELDS

SEQ ID NO: 2685 - protein, 1139 aa, Artificial Sequence
  SARS-CoV-2/pangolin/Guangxi/P1E/2017__EPI_ISL_410539 spike protein (1-1139)
MFVFLFVLPLVSSQCVNLTTRTGIQPGYTNSSTRGVYYPDKVFRSSILHLTQDLFLPFFSNVTWFNTINYQGGFKKFDNPVLPFNDGVYFASTEKSNIIRGWIFGTTLDARTQSLLIVNNATNVVIKVCEFQFCTDPFLGVYYHNNNKTWVENEFRVYSSANNCTFEYISQPFLMDLEGKQGNFKNLREFVFKNVDGYFKIYSKHTPIDLVRDLPRGFAALEPLVDLPIGINITRFQTLLALHRSYLTPGKLESGWTTGAAAYYVGYLQQRTFLLSYNQNGTITDAVDCSLDPLSETKCTLKSLTVEKGIYQTSNFRVQPTISIVRFPNITNLCPFGEVFNASKFASVYAWNRKRISNCVADYSVLYNSTSFSTFKCYGVSPTKLNDLCFTNVYADSFVVKGDEVRQIAPGQTGVIADYNYKLPDDFTGCVIAWNSVKQDALTGGNYLYRLFRKSKLKPFERDISTEIYQAGSTPCNGQVGLNCYYPLERYGFHPTTGVNYQPFRVVVLSFELLNGPATVCGPKLSTTLVKDKCVNFNFNGLTGTGVLTTSKKQFLPFQQFGRDISDTTDAVRDPQTLEILDITPCSFGGVSVITPGTNTSNQVAVLYQDVNCTEVPMAIHAEQLTPAWRVYSAGANVFQTRAGCLVGAEHVNNSYECDIPVGAGICASYHSMSSLRSVNQRSIIAYTMSLGAENSVAYSNNSIAIPTNFTISVTTEILPVSMTKTSVDCTMYICGDSIECSNLLLQYGSFCTQLNRALTGIAVEQDKNTQEVFAQVKQIYKTPPIKDFGGFNFSQILPDPSKPSKRSFIEDLLFNKVTLADAGFIKQYGDCLGDIAARDLICAQKFNGLTVLPPLLTDEMIAQYTSALLAGTITSGWTFGAGAALQIPFAMQMAYRFNGIGVTQNVLYENQKLIANQFNSAIGKIQDSLSSTASALGKLQDVVNQNAQALNTLVKQLSSNFGAISSVLNDILSRLDKVEAEVQIDRLITGRLQSLQTYVTQQLIRAAEIRASANLAATKMSECVLGQSKRVDFCGKGYHLMSFPQSAPHGVVFLHVTYVPAQEKNFTTAPAICHEGKAHFPREGVFVSNGTHWFITQRNFYEPQIITTDNTFVSGSCDVVIGIVNNTVYDPLQPELDS

SEQ ID NO: 2686 - protein, 1147 aa, Artificial Sequence
  SARS-CoV-2/Wuhan/WIV05/2019__EPI_ISL_402128 spike protein (1-1147)(K986P_V987P)
MFVFLVLLPLVSSQCVNLTTRTQLPPAYTNSFTRGVYYPDKVFRSSVLHSTQDLFLPFFSNVTWFHAIHVSGTNGTKRFDNPVLPFNDGVYFASTEKSNIIRGWIFGTTLDSKTQSLLIVNNATNVVIKVCEFQFCNDPFLGVYYHKNNKSWMESEFRVYSSANNCTFEYVSQPFLMDLEGKQGNFKNLREFVFKNIDGYFKIYSKHTPINLVRDLPQGFSALEPLVDLPIGINITRFQTLLALHRSYLTPGDSSSGWTAGAAAYYVGYLQPRTFLLKYNENGTITDAVDCALDPLSETKCTLKSFTVEKGIYQTSNFRVQPTESIVRFPNITNLCPFGEVFNATRFASVYAWNRKRISNCVADYSVLYNSASFSTFKCYGVSPTKLNDLCFTNVYADSFVIRGDEVRQIAPGQTGKIADYNYKLPDDFTGCVIAWNSNNLDSKVGGNYNYLYRLFRKSNLKPFERDISTEIYQAGSTPCNGVEGFNCYFPLQSYGFQPTNGVGYQPYRVVVLSFELLHAPATVCGPKKSTNLVKNKCVNFNFNGLTGTGVLTESNKKFLPFQQFGRDIADTTDAVRDPQTLEILDITPCSFGGVSVITPGTNTSNQVAVLYQDVNCTEVPVAIHADQLTPTWRVYSTGSNVFQTRAGCLIGAEHVNNSYECDIPIGAGICASYQTQTNSPRRARSVASQSIIAYTMSLGAENSVAYSNNSIAIPTNFTISVTTEILPVSMTKTSVDCTMYICGDSTECSNLLLQYGSFCTQLNRALTGIAVEQDKNTQEVFAQVKQIYKTPPIKDFGGFNFSQILPDPSKPSKRSFIEDLLFNKVTLADAGFIKQYGDCLGDIAARDLICAQKFNGLTVLPPLLTDEMIAQYTSALLAGTITSGWTFGAGAALQIPFAMQMAYRFNGIGVTQNVLYENQKLIANQFNSAIGKIQDSLSSTASALGKLQDVVNQNAQALNTLVKQLSSNFGAISSVLNDILSRLDPPEAEVQIDRLITGRLQSLQTYVTQQLIRAAEIRASANLAATKMSECVLGQSKRVDFCGKGYHLMSFPQSAPHGVVFLHVTYVPAQEKNFTTAPAICHDGKAHFPREGVFVSNGTHWFVTQRNFYEPQIITTDNTFVSGNCDVVIGIVNNTVYDPLQPELDS

SEQ ID NO: 2687 - protein, 1143 aa, Artificial Sequence
  SARS-CoV-2/bat/Yunnan/RaTG13/2013__EPI_ISL_402131 spike protein (1-1143)(K982P_V983P)
MFVFLVLLPLVSSQCVNLTTRTQLPPAYTNSSTRGVYYPDKVFRSSVLHLTQDLFLPFFSNVTWFHAIHVSGTNGIKRFDNPVLPFNDGVYFASTEKSNIIRGWIFGTTLDSKTQSLLIVNNATNVVIKVCEFQFCNDPFLGVYYHKNNKSWMESEFRVYSSANNCTFEYVSQPFLMDLEGKQGNFKNLREFVFKNIDGYFKIYSKHTPINLVRDLPPGFSALEPLVDLPIGINITRFQTLLALHRSYLTPGDSSSGWTAGAAAYYVGYLQPRTFLLKYNENGTITDAVDCALDPLSETKCTLKSFTVEKGIYQTSNFRVQPTDSIVRFPNITNLCPFGEVFNATTFASVYAWNRKRISNCVADYSVLYNSTSFSTFKCYGVSPTKLNDLCFTNVYADSFVITGDEVRQIAPGQTGKIADYNYKLPDDFTGCVIAWNSKHIDAKEGGNFNYLYRLFRKANLKPFERDISTEIYQAGSKPCNGQTGLNCYYPLYRYGFYPTDGVGHQPYRVVVLSFELLNAPATVCGPKKSTNLVKNKCVNFNFNGLTGTGVLTESNKKFLPFQQFGRDIADTTDAVRDPQTLEILDITPCSFGGVSVITPGTNASNQVAVLYQDVNCTEVPVAIHADQLTPTWRVYSTGSNVFQTRAGCLIGAEHVNNSYECDIPIGAGICASYQTQTNSRSVASQSIIAYTMSLGAENSVAYSNNSIAIPTNFTISVTTEILPVSMTKTSVDCTMYICGDSTECSNLLLQYGSFCTQLNRALTGIAVEQDKNTQEVFAQVKQIYKTPPIKDFGGFNFSQILPDPSKPSKRSFIEDLLFNKVTLADAGFIKQYGDCLGDIAARDLICAQKFNGLTVLPPLLTDEMIAQYTSALLAGTITSGWTFGAGAALQIPFAMQMAYRFNGIGVTQNVLYENQKLIANQFNSAIGKIQDSLSSTASALGKLQDVVNQNAQALNTLVKQLSSNFGAISSVLNDILSRLDPPEAEVQIDRLITGRLQSLQTYVTQQLIRAAEIRASANLAATKMSECVLGQSKRVDFCGKGYHLMSFPQSAPHGVVFLHVTYVPAQEKNFTTAPAICHDGKAHFPREGVFVSNGTHWFVTQRNFYEPQIITTDNTFVSGSCDVVIGIVNNTVYDPLQPELDS

SEQ ID NO: 2688 - protein, 1147 aa, Artificial Sequence
  SARS-CoV-2/Wuhan/HBCDC-HB-01/2019__EPI_ISL_402132 spike protein (1-1147)(K986P_V987P)
MFVFLVLLPLVSSQCVNLTTRTQLPPAYTNSITRGVYYPDKVFRSSVLHSTQDLFLPFFSNVTWFHAIHVSGTNGTKRFDNPVLPFNDGVYFASTEKSNIIRGWIFGTTLDSKTQSLLIVNNATNVVIKVCEFQFCNDPFLGVYYHKNNKSWMESEFRVYSSANNCTFEYVSQPFLMDLEGKQGNFKNLREFVFKNIDGYFKIYSKHTPINLVRDLPQGFSALEPLVDLPIGINITRFQTLLALHRSYLTPGDSSSGWTAGAAAYYVGYLQPRTFLLKYNENGTITDAVDCALDPLSETKCTLKSFTVEKGIYQTSNFRVQPTESIVRFPNITNLCPFGEVFNATRFASVYAWNRKRISNCVADYSVLYNSASFSTFKCYGVSPTKLNDLCFTNVYADSFVIRGDEVRQIAPGQTGKIADYNYKLPDDFTGCVIAWNSNNLDSKVGGNYNYLYRLFRKSNLKPFERDISTEIYQAGSTPCNGVEGFNCYFPLQSYGFQPTNGVGYQPYRVVVLSFELLHAPATVCGPKKSTNLVKNKCVNFNFNGLTGTGVLTESNKKFLPFQQFGRDIADTTDAVRDPQTLEILDITPCSFGGVSVITPGTNTSNQVAVLYQDVNCTEVPVAIHADQLTPTWRVYSTGSNVFQTRAGCLIGAEHVNNSYECDIPIGAGICASYQTQTNSPRRARSVASQSIIAYTMSLGAENSVAYSNNSIAIPTNFTISVTTEILPVSMTKTSVDCTMYICGDSTECSNLLLQYGSFCTQLNRALTGIAVEQDKNTQEVFAQVKQIYKTPPIKDFGGFNFSQILPDPSKPSKRSFIEDLLFNKVTLADAGFIKQYGDCLGDIAARDLICAQKFNGLTVLPPLLTDEMIAQYTSALLAGTITSGWTFGAGAALQIPFAMQMAYRFNGIGVTQNVLYENQKLIANQFNSAIGKIQDSLSSTASALGKLQDVVNQNAQALNTLVKQLSSNFGAISSVLNDILSRLDPPEAEVQIDRLITGRLQSLQTYVTQQLIRAAEIRASANLAATKMSECVLGQSKRVDFCGKGYHLMSFPQSAPHGVVFLHVTYVPAQEKNFTTAPAICHDGKAHFPREGVFVSNGTHWFVTQRNFYEPQIITTDNTFVSGNCDVVIGIVNNTVYDPLQPELDS

SEQ ID NO: 2689 - protein, 1147 aa, Artificial Sequence
  SARS-CoV-2/Guangdong/20SF028/2020__EPI_ISL_403936 spike protein (1-1147)(K986P_V987P)
MFVFLVLLPLVSSQCVNLTTRTQLPPAYTNSFTRGVYYPDKVFRSSVLYSTQDLFLPFFSNVTWFHAIHVSGTNGTKRFDNPVLPFNDGVYFASTEKSNIIRGWIFGTTLDSKTQSLLIVNNATNVVIKVCEFQFCNDPFLGVYYHKNNKSWMESEFRVYSSANNCTFEYVSQPFLMDLEGKQGNFKNLREFVFKNIDGYFKIYSKHTPINLVRDLPQGFSALEPLVDLPIGINITRFQTLLALHRSYLTPGDSSSGWTAGAAAYYVGYLQPRTFLLKYNENGTITDAVDCALDPLSETKCTLKSFTVEKGIYQTSNFRVQPTESIVRFPNITNLCPFGEVFNATRFASVYAWNRKRISNCVADYSVLYNSASFSTFKCYGVSPTKLNDLCFTNVYADSFVIRGDEVRQIAPGQTGKIADYNYKLPDDFTGCVIAWNSNNLDSKVGGNYNYLYRLFRKSNLKPFERDISTEIYQAGSTPCNGVEGFNCYFPLQSYGFQPTNGVGYQPYRVVVLSFELLHAPATVCGPKKSTNLVKNKCVNFNFNGLTGTGVLTESNKKFLPFQQFGRDIADTTDAVRDPQTLEILDITPCSFGGVSVITPGTNTSNQVAVLYQDVNCTEVPVAIHADQLTPTWRVYSTGSNVFQTRAGCLIGAEHVNNSYECDIPIGAGICASYQTQTNSPRRARSVASQSIIAYTMSLGAENSVAYSNNSIAIPTNFTISVTTEILPVSMTKTSVDCTMYICGDSTECSNLLLQYGSFCTQLNRALTGIAVEQDKNTQEVFAQVKQIYKTPPIKDFGGFNFSQILPDPSKPSKRSFIEDLLFNKVTLADAGFIKQYGDCLGDIAARDLICAQKFNGLTVLPPLLTDEMIAQYTSALLAGTITSGWTFGAGAALQIPFAMQMAYRFNGIGVTQNVLYENQKLIANQFNSAIGKIQDSLSSTASALGKLQDVVNQNAQALNTLVKQLSSNFGAISSVLNDILSRLDPPEAEVQIDRLITGRLQSLQTYVTQQLIRAAEIRASANLAATKMSECVLGQSKRVDFCGKGYHLMSFPQSAPHGVVFLHVTYVPAQEKNFTTAPAICHDGKAHFPREGVFVSNGTHWFVTQRNFYEPQIITTDNTFVSGNCDVVIGIVNNTVYDPLQPELDS

SEQ ID NO: 2690 - protein, 1147 aa, Artificial Sequence
  SARS-CoV-2/Shenzhen/SZTH-001/2020__EPI_ISL_406592 spike protein (1-1147)(K986P_V987P)
MFVFLVLLPLVSSQCVNLTTRTQLPPAYTNSFTRGVYYPDKVFRSSVLHSTQDLFLPFFSNVTWFHAIHVSGTNGTKRFDNPVLPFNDGVYFASTEKSNIIRGWIFGTTLDSKTQSLLIVNNATNVVIKVCEFQFCNDPFLGVYYHKNNKSWMESEFRVYSSANNCTFEYVSQPFLMDLEGKQGNFKNLREFVFKNIDGYFKIYSKHTPINLVRDLPQGFSALEPLVDLPIGINITRFQTLLALHRSYLTPGDSSSGWTAGAAAYYVGYLQPRTFLLKYNENGTITDAVDCALDPLSETKCTLKSFTVEKGIYQTSNFRVQPTESIVRFPNITNLCPFGEVFNATRFASVYAWNRKRISNCVADYSVLYNSASFSTFKCYGVSPTKLNDLCFTNVYADSFVIRGDEVRQIAPGQTGKIADYNYKLPDDFTGCVIAWNSNNLDSKVGGNYNYLYRLFRKSNLKPFERDISTEIYQAGSTPCNGVEGFNCYFPLQSYGFQPTNGVGYQPYRVVVLSFELLHAPATVCGPKKSTNLVKNKCVNFNFNGLTGTGVLTESNKKFLPFQQFGRDIADTTDAVRDPQTLEILDITPCSFGGVSVITPGTNTSNQVAVLYQDVNCTEVPVAIHADQLTPTWRVYSTGSNVFQTRAGCLIGAEHVNNSYECDIPIGAGICASYQTQTNSPRRARSVASQSIIAYTMSLGAENSVAYSNNSIAIPTNFTISVTTEILPVSMTKTSVDCTMYICGDSTECSNLLLQYGSFCTQLNRALTGIAVEQDKNTQEVFAQVKQIYKTPPIKDFGGFNFSQILPDPSKPSKRSFIEDLLFNKVTLADAGFIKQYGDCLGDIAARDLICAQKFNGLTVLPPLLTDEMIAQYTSALLAGTITSGWTFGAGAALQIPFAMQMAYRFNGIGVTQNVLYENQKLIANQFNSAIGKIQDSLSSTASALGKLQDVVNQNAQALNTLVKQLSSNFGAISSVLNDILSRLDPPEAEVQIDRLITGRLQSLQTYVTQQLIRAAEIRASANLAATKMSECVLGQSKRVDFCGKGYHLMSFPQSAPHGVVFLHVTYVPAQEKNFTTAPAICHDGKAHFPREGVFVSNGTHWFVTQRNFYEPQIITTDNTFVSGNCDVLIGIVNNTVYDPLQPELDS

SEQ ID NO: 2691 - protein, 1147 aa, Artificial Sequence
  SARS-CoV-2/Shenzhen/SZTH-004/2020__EPI_ISL_406595 spike protein (1-1147)(K986P_V987P)
MFVFLVLLPLVSSQCVNLTTRTQLPPAYTNSFTRGVYYPDKVFRSSVLHSTQDLFLPFFSNVTWFHAIHVSGTNGTKRFDNPVLPFNDGVYFASTEKSNIIRGWIFGTTLDSKTQSLLIVNNATNVVIKVCEFQFCNDPFLGVYYHKNNKSWMESEFRVYSSANNCTFEYVSQPFLMDLEGKQGNFKNLREFVFKNIDGYFKIYSKHTPINLVRDLPQGFSALEPLVDLPIGINITRFQTLLALHRSYLTPGDSSSGWTAGAAAYYVGYLQPRTFLLKYNENGTITDAVDCALDPLSETKCTLKSFTVEKGIYQTSNFRVQPTESIVRFPNITNLCPFGEVFNATRFASVYAWDRKRISNCVAYYSVLYNSASFSTFKCYGVSPTKLNDLCFTNVYADSFVIRGDEVRQIAPGQTGKIADYNYKLPDDFTGCVIAWNSNNLDSKVGGNYNYLYRLFRKSNLKPFERDISTEIYQAGSTPCNGVEGFNCYFPLQSYGFQPTNGVGYQPYRVVVLSFELLHAPATVCGPKKSTNLVKNKCVNFNFNGLTGTGVLTESNKKFLPFQQFGRDIADTTDAVRDPQTLEILDITPCSFGGVSVITPGTNTSNQVAVLYQDVNCTEVPVAIHADQLTPTWRVYSTGSNVFQTRAGCLIGAEHVNNSYECDIPIGAGICASYQTQTNSPRRARSVASQSIIAYTMSLGAENSVAYSNNSIAIPTNFTISVTTEILPVSMTKTSVDCTMYICGDSTECSNLLLQYGSFCTQLNRALTGIAVEQDKNTQEVFAQVKQIYKTPPIKDFGGFNFSQILPDPSKPSKRSFIEDLLFNKVTLADAGFIKQYGDCLGDIAARDLICAQKFNGLTVLPPLLTDEMIAQYTSALLAGTITSGWTFGAGAALQIPFAMQMAYRFNGIGVTQNVLYENQKLIANQFNSAIGKIQDSLSSTASALGKLQDVVNQNAQALNTLVKQLSSNFGAISSVLNDILSRLDPPEAEVQIDRLITGRLQSLQTYVTQQLIRAAEIRASANLAATKMSECVLGQSKRVDFCGKGYHLMSFPQSAPHGVVFLHVTYVPAQEKNFTTAPAICHDGKAHFPREGVFVSNGTHWFVTQRNFYEPQIITTDNTFVSGNCDVVIGIVNNTVYDPLQPELDS

SEQ ID NO: 2692 - protein, 1147 aa, Artificial Sequence
  SARS-CoV-2/France/IDF0372/2020__EPI_ISL_406596 spike protein (1-1147)(K986P_V987P)
MFVFLVLLPLVSSQCVNLTTRTQLPPAYTNSFTRGVYYPDKVFRSSVLHSTQDLFLPFFSNVTWFHAIHVSGTNGTKRFDNPVLPFNDGVYFASTEKSNIIRGWIFGTTLDSKTQSLLIVNNATNVVIKVCEFQFCNDPFLGVYYHKNNKSWMESEFRVYSSANNCTFEYVSQPFLMDLEGKQGNFKNLREFVFKNIDGYFKIYSKHTPINLVRDLPQGFSALEPLVDLPIGINITRFQTLLALHRSYLTPGDSSSGWTAGAAAYYVGYLQPRTFLLKYNENGTITDAVDCALDPLSETKCTLKSFTVEKGIYQTSNFRVQPTESIVRFPNITNLCPFGEVFNATRFASVYAWNRKRISNCVADYSFLYNSASFSTFKCYGVSPTKLNDLCFTNVYADSFVIRGDEVRQIAPGQTGKIADYNYKLPDDFTGCVIAWNSNNLDSKVGGNYNYLYRLFRKSNLKPFERDISTEIYQAGSTPCNGVEGFNCYFPLQSYGFQPTNGVGYQPYRVVVLSFELLHAPATVCGPKKSTNLVKNKCVNFNFNGLTGTGVLTESNKKFLPFQQFGRDIADTTDAVRDPQTLEILDITPCSFGGVSVITPGTNTSNQVAVLYQDVNCTEVPVAIHADQLTPTWRVYSTGSNVFQTRAGCLIGAEHVNNSYECDIPIGAGICASYQTQTNSPRRARSVASQSIIAYTMSLGAENSVAYSNNSIAIPTNFTISVTTEILPVSMTKTSVDCTMYICGDSTECSNLLLQYGSFCTQLNRALTGIAVEQDKNTQEVFAQVKQIYKTPPIKDFGGFNFSQILPDPSKPSKRSFIEDLLFNKVTLADAGFIKQYGDCLGDIAARDLICAQKFNGLTVLPPLLTDEMIAQYTSALLAGTITSGWTFGAGAALQIPFAMQMAYRFNGIGVTQNVLYENQKLIANQFNSAIGKIQDSLSSTASALGKLQDVVNQNAQALNTLVKQLSSNFGAISSVLNDILSRLDPPEAEVQIDRLITGRLQSLQTYVTQQLIRAAEIRASANLAATKMSECVLGQSKRVDFCGKGYHLMSFPQSAPHGVVFLHVTYVPAQEKNFTTAPAICHDGKAHFPREGVFVSNGTHWFVTQRNFYEPQIITTDNTFVSGNCDVVIGIVNNTVYDPLQPELDS

SEQ ID NO: 2693 - protein, 1147 aa, Artificial Sequence
  SARS-CoV-2/Australia/VIC01/2020__EPI_ISL_406844 spike protein (1-1147)(K986P_V987P)
MFVFLVLLPLVSSQCVNLTTRTQLPPAYTNSFTRGVYYPDKVFRSSVLHSTQDLFLPFFSNVTWFHAIHVSGTNGTKRFDNPVLPFNDGVYFASTEKSNIIRGWIFGTTLDSKTQSLLIVNNATNVVIKVCEFQFCNDPFLGVYYHKNNKSWMESEFRVYSSANNCTFEYVSQPFLMDLEGKQGNFKNLREFVFKNIDGYFKIYSKHTPINLVRDLPQGFSALEPLVDLPIGINITRFQTLLALHRRYLTPGDSSSGWTAGAAAYYVGYLQPRTFLLKYNENGTITDAVDCALDPLSETKCTLKSFTVEKGIYQTSNFRVQPTESIVRFPNITNLCPFGEVFNATRFASVYAWNRKRISNCVADYSVLYNSASFSTFKCYGVSPTKLNDLCFTNVYADSFVIRGDEVRQIAPGQTGKIADYNYKLPDDFTGCVIAWNSNNLDSKVGGNYNYLYRLFRKSNLKPFERDISTEIYQAGSTPCNGVEGFNCYFPLQSYGFQPTNGVGYQPYRVVVLSFELLHAPATVCGPKKSTNLVKNKCVNFNFNGLTGTGVLTESNKKFLPFQQFGRDIADTTDAVRDPQTLEILDITPCSFGGVSVITPGTNTSNQVAVLYQDVNCTEVPVAIHADQLTPTWRVYSTGSNVFQTRAGCLIGAEHVNNSYECDIPIGAGICASYQTQTNSPRRARSVASQSIIAYTMSLGAENSVAYSNNSIAIPTNFTISVTTEILPVSMTKTSVDCTMYICGDSTECSNLLLQYGSFCTQLNRALTGIAVEQDKNTQEVFAQVKQIYKTPPIKDFGGFNFSQILPDPSKPSKRSFIEDLLFNKVTLADAGFIKQYGDCLGDIAARDLICAQKFNGLTVLPPLLTDEMIAQYTSALLAGTITSGWTFGAGAALQIPFAMQMAYRFNGIGVTQNVLYENQKLIANQFNSAIGKIQDSLSSTASALGKLQDVVNQNAQALNTLVKQLSSNFGAISSVLNDILSRLDPPEAEVQIDRLITGRLQSLQTYVTQQLIRAAEIRASANLAATKMSECVLGQSKRVDFCGKGYHLMSFPQSAPHGVVFLHVTYVPAQEKNFTTAPAICHDGKAHFPREGVFVSNGTHWFVTQRNFYEPQIITTDNTFVSGNCDVVIGIVNNTVYDPLQPELDS

SEQ ID NO: 2694 - protein, 1147 aa, Artificial Sequence
  SARS-CoV-2/Germany/BavPat1/2020__EPI_ISL_406862 spike protein (1-1147)(K986P_V987P)
MFVFLVLLPLVSSQCVNLTTRTQLPPAYTNSFTRGVYYPDKVFRSSVLHSTQDLFLPFFSNVTWFHAIHVSGTNGTKRFDNPVLPFNDGVYFASTEKSNIIRGWIFGTTLDSKTQSLLIVNNATNVVIKVCEFQFCNDPFLGVYYHKNNKSWMESEFRVYSSANNCTFEYVSQPFLMDLEGKQGNFKNLREFVFKNIDGYFKIYSKHTPINLVRDLPQGFSALEPLVDLPIGINITRFQTLLALHRSYLTPGDSSSGWTAGAAAYYVGYLQPRTFLLKYNENGTITDAVDCALDPLSETKCTLKSFTVEKGIYQTSNFRVQPTESIVRFPNITNLCPFGEVFNATRFASVYAWNRKRISNCVADYSVLYNSASFSTFKCYGVSPTKLNDLCFTNVYADSFVIRGDEVRQIAPGQTGKIADYNYKLPDDFTGCVIAWNSNNLDSKVGGNYNYLYRLFRKSNLKPFERDISTEIYQAGSTPCNGVEGFNCYFPLQSYGFQPTNGVGYQPYRVVVLSFELLHAPATVCGPKKSTNLVKNKCVNFNFNGLTGTGVLTESNKKFLPFQQFGRDIADTTDAVRDPQTLEILDITPCSFGGVSVITPGTNTSNQVAVLYQGVNCTEVPVAIHADQLTPTWRVYSTGSNVFQTRAGCLIGAEHVNNSYECDIPIGAGICASYQTQTNSPRRARSVASQSIIAYTMSLGAENSVAYSNNSIAIPTNFTISVTTEILPVSMTKTSVDCTMYICGDSTECSNLLLQYGSFCTQLNRALTGIAVEQDKNTQEVFAQVKQIYKTPPIKDFGGFNFSQILPDPSKPSKRSFIEDLLFNKVTLADAGFIKQYGDCLGDIAARDLICAQKFNGLTVLPPLLTDEMIAQYTSALLAGTITSGWTFGAGAALQIPFAMQMAYRFNGIGVTQNVLYENQKLIANQFNSAIGKIQDSLSSTASALGKLQDVVNQNAQALNTLVKQLSSNFGAISSVLNDILSRLDPPEAEVQIDRLITGRLQSLQTYVTQQLIRAAEIRASANLAATKMSECVLGQSKRVDFCGKGYHLMSFPQSAPHGVVFLHVTYVPAQEKNFTTAPAICHDGKAHFPREGVFVSNGTHWFVTQRNFYEPQIITTDNTFVSGNCDVVIGIVNNTVYDPLQPELDS

SEQ ID NO: 2695 - protein, 1147 aa, Artificial Sequence
  SARS-CoV-2/Wuhan/HBCDC-HB-02/2020__EPI_ISL_412978 spike protein (1-1147)(K986P_V987P)
MFVFLVLLPLVSSQCVNLTTRTQLPPAYTNSFTRGVYYPDKVFRSSVLHSTQDLFLPFFSNVTWFHAIHVSGTNGTKRFDNPVLPFNDGVYFASTEKSNIIRGWIFGTTLDSKTQSLLIVNNATNVVIKVCEFQFCNDPFLGVYYHKNNKSWMESEFRVYSSANNCTFEYVSQPFLMDLEGKQGNFKNLREFVFKNIDGYFKIYSKHTPINLVRDLPQGFSALEPLVDLPIGINITRFQTLLALHRSYLTPGDSSSGWTAGAAAYYVGYLQPRTFLLKYNENGTITDAVDCALDPLSETKCTLKSFTVEKGIYQTSNFRVQPTESIVRFPNITNLCPFGEVFNATRFASVYAWNRKRISNCVADYSVLYNSASFSTFKCYGVSPTKLNDLCFTNVYADSFVIRGDEVRQIAPGQTGKIADYNYKLPDDFTGCVIAWNSNNLDSKVGGNYNYLYRLFRKSNLKPFERDISTEIYQAGSTPCNGVEGFNCYFPLQSYGFQPTNGVGYQPYRVVVLSFELLHAPATVCGPKKSTNLVKNKCVNFNFNGLTGTGVLTESNKKFLPFQQFGRDIADTTDAVRDPQTLEILDITPCSFGGVSVITPGTNTSNQVAVLYQDVNCTEVPVAIHADQLTPTWRVYSTGSNVFQTRAGCLIGAEHVNNSYECDIPIGAGICASYQTQTNSPRRARSVASQSIIAYTMSLGAENSVAYSNNSIAIPTNFTISVTTEILPVSMTKTSVDCTMYICGDSTECSNFLLQYGSFCTQLNRALTGIAVEQDKNTQEVFAQVKQIYKTPPIKDFGGFNFSQILPDPSKPSKRSFIEDLLFNKVTLADAGFIKQYGDCLGDIAARDLICAQKFNGLTVLPPLLTDEMIAQYTSALLAGTITSGWTFGAGAALQIPFAMQMAYRFNGIGVTQNVLYENQKLIANQFNSAIGKIQDSLSSTASALGKLQDVVNQNAQALNTLVKQLSSNFGAISSVLNDILSRLDPPEAEVQIDRLITGRLQSLQTYVTQQLIRAAEIRASANLAATKMSECVLGQSKRVDFCGKGYHLMSFPQSAPHGVVFLHVTYVPAQEKNFTTAPAICHDGKAHFPREGVFVSNGTHWFVTQRNFYEPQIITTDNTFVSGNCDVVIGIVNNTVYDPLQPELDS

SEQ ID NO: 2696 - protein, 1147 aa, Artificial Sequence
  SARS-CoV-2/Australia/QLD02/2020__EPI_ISL_407896 spike protein (1-1147)(K986P_V987P)
MFVFLVLLPLVSSQCVNLTTRTQLPPAYTNSFTRGVYYPDKVFRSSVLHSTQDLFLPFFSNVTWFHAIHVSGTNGTKRFDNPVLPFNDGVYFASTEKSNIIRGWIFGTTLDSKTQSLLIVNNATNVVIKVCEFQFCNDPFLGVYYHKNNKSWMESEFRVYSSANNCTFEYVSQPFLMDLEGKQGNFKNLREFVFKNIDGYFKIYSKHTPINLVRDLPQGFSALEPLVDLPIGINITRFQTLLALHRSYLTPGDSSSGWTAGAAAYYVGYLQPRTFLLKYNENGTITDAVDCALDPLSETKCTLKSFTVEKGIYQTSNFRVQPTESIVRFPNITNLCPFGEVFNATRFASVYAWNRKRISNCVADYSVLYNSASFSTFKCYGVSPTKLNDLCFTNVYADSFVIRGDEVRQIAPGQTGKIADYNYKLPDDFTGCVIAWNSNNLDSKVGGNYNYLYRLFRKSNLKPFERDISTEIYQAGSTPCNGVEGFNCYFPLQSYGFQPTNGVGYQPYRVVVLSFELLHAPATVCGPKKSTNLVKNKCVNFNFNGLTGTGVLTESNKKFLPFQQFGRDIADTTDAVRDPQTLEILDITPCSFGGVSVITPGTNTSNQVAVLYQDVNCTEVPVAIHADQLTPTWRVYSTGSNVFQTRAGCLIGAEHVNNSYECDIPIGAGICASYQTQTNSPRRARSVASQSIIAYTMSLGAENSVAYSNNSIAIPTNFTISVTTEILPVSMTKTSVDCTMYICGDSTECSNLLLQYGSFCTQLNRALTGIAVEQDKNTQEVFAQVKQIYKTPPIKDFGGFNFSQILPDPSKPSKRSFIEDLLFNKVTLADAGFIKQYGDCLGDIAARDLICAQKFNGLTVLPPLLTDEMIAQYTSALLAGTITSGWTFGAGAALQIPFAMQMAYRFNGIGVTQNVLYENQKLIANQFNSAIGKIQDSLSSTASALGKLQDVVNQNAQALNTLVKQLSSNFGAISSVLNDILSRLDPPEAEVQIDRLITGRLQSLQTYVTQQLIRAAEIRASANLAATKMSECVLGQSKRVDFCGKGYHLMSFPQSAPHGVVFLHVTYVPAQEKNFTTAPAICHDGKAHFPREGVFVSNGTHWFVTQRNFYEPQIITTDNTFVSGNCDVVIGIVNNTVYDPLQLELDS

SEQ ID NO: 2697 - protein, 1147 aa, Artificial Sequence
  SARS-CoV-2/India/1-31/2020__EPI_ISL_413523 spike protein (1-1147)(K986P_V987P)
MFVFLVLLPLVSSQCVNLTTRTQLPPAYTNSFTRGVYYPDKVFRSSVLHSTQDLFLPFFSNVTWFHAIHVSGTNGTKRFDNPVLPFNDGVYFASTEKSNIIRGWIFGTTLDSKTQSLLIVNNATNVVIKVCEFQFCNDPFLGVYYHKNNKSWMESEFRVYSSANNCTFEYVSQPFLMDLEGKQGNFKNLREFVFKNIDGYFKIYSKHTPINLVRDLPQGFSALEPLVDLPIGINITRFQTLLALHRSYLTPGDSSSGWTAGAAAYYVGYLQPRTFLLKYNENGTITDAVDCALDPLSETKCTLKSFTVEKGIYQTSNFRVQPTESIVRFPNITNLCPFGEVFNATRFASVYAWNRKRISNCVADYSVLYNSASFSTFKCYGVSPTKLNDLCFTNVYADSFVIRGDEVRQIAPGQTGKIADYNYKLPDDFTGCVIAWNSNNLDSKVGGNYNYLYRLFRKSNLKPFERDISTEIYQAGSTPCNGVEGFNCYFPLQSYGFQPTNGVGYQPYRVVVLSFELLHAPATVCGPKKSTNLVKNKCVNFNFNGLTGTGVLTESNKKFLPFQQFGRDIADTTDAVRDPQTLEILDITPCSFGGVSVITPGTNTSNQVAVLYQDVNCTEVPVAIHADQLTPTWRVYSTGSNVFQTRAGCLIGAEHVNNSYECDIPIGAGICASYQTQTNSPRRARSVASQSIIAYTMSLGAENSVAYSNNSIAIPTNFTISVTTEILPVSMTKTSVDCTMYICGDSTECSNLLLQYGSFCTQLNRALTGIAVEQDKNTQEVFAQVKQIYKTPPIKDFGGFNFSQILPDPSKPSKRSFIEDLLFNKVTLADAGFIKQYGDCLGDIAARDLICAQKFNGLTVLPPLLTDEMIAQYTSALLAGTITSGWTFGAGAALQIPFAMQMAYRFNGIGVTQNVLYENQKLIANQFNSVIGKIQDSLSSTASALGKLQDVVNQNAQALNTLVKQLSSNFGAISSVLNDILSRLDPPEAEVQIDRLITGRLQSLQTYVTQQLIRAAEIRASANLAATKMSECVLGQSKRVDFCGKGYHLMSFPQSAPHGVVFLHVTYVPAQEKNFTTAPAICHDGKAHFPREGVFVSNGTHWFVTQRNFYEPQIITTDNTFVSGNCDVVIGIVNNTVYDPLQPELDS

SEQ ID NO: 2698 - protein, 1147 aa, Artificial Sequence
  SARS-CoV-2/Guangdong/GD2020087-P0008/2020__EPI_ISL_413863 spike protein (1-1147)(K986P_V987P)
MFVFLVLLPLVSSQCVNLTTRTQLPPAYTNSFTRGVYYPDKVFRSSVLHSTQDLFLPFFSNVTWFHAIHVSGTNGTKRFDNPVLPFNDGVYFASTEKSNIIRGWIFGTTLDSKTQSLLIVNNATNVVIKVCEFQFCNDPFLGVYYHKNNKSWMESEFRVYSSANNCTFEYVSQPFLMDLEGKQGNFKNLREFVFKNIDGYFKIYSKHTPINLVRDLPQGFSALEPLVDLPIGINITRFQTLLALHRSYLTPGDSSSGWTAGAAAYYVGYLQPRTFLLKYNENGTITDAVDCALDPLSETKCTLKSFTVEKGIYQTSNFRVQPTESIVRFPNITNLCPFGEVFNATRFASVYAWNRKRISNCVADYSVLYNSASFSTFKCYGVSPTKLNDLCFTNVYADSFVIRGDEVREIAPGQTGKIADYNYKLPDDFTGCVIAWNSNNLDSKVGGNYNYLYRLFRKSNLKPFERDISTEIYQAGSTPCNGVEGFNCYFPLQSYGFQPTNGVGYQPYRVVVLSFELLHAPATVCGPKKSTNLVKNKCVNFNFNGLTGTGVLTESNKKFLPFQQFGRDIADTTDAVRDPQTLEILDITPCSFGGVSVITPGTNTSNQVAVLYQDVNCTEVPVAIHADQLTPTWRVYSTGSNVFQTRAGCLIGAEHVNNSYECDIPIGAGICASYQTQTNSPRRARSVASQSIIAYTMSLGAENSVAYSNNSIAIPTNFTISVTTEILPVSMTKTSVDCTMYICGDSTECSNLLLQYGSFCTQLNRALTGIAVEQDKNTQEVFAQVKQIYKTPPIKDFGGFNFSQILPDPSKPSKRSFIEDLLFNKVTLADAGFIKQYGDCLGDIAARDLICAQKFNGLTVLPPLLTDEMIAQYTSALLAGTITSGWTFGAGAALQIPFAMQMAYRFNGIGVTQNVLYENQKLIANQFNSAIGKIQDSLSSTASALGKLQDVVNQNAQALNTLVKQLSSNFGAISSVLNDILSRLDPPEAEVQIDRLITGRLQSLQTYVTQQLIRAAEIRASANLAATKMSECVLGQSKRVDFCGKGYHLMSFPQSAPHGVVFLHVTYVPAQEKNFTTAPAICHDGKAHFPREGVFVSNGTHWFVTQRNFYEPQIITTDNTFVSGNCDVVIGIVNNTVYDPLQPELDS

SEQ ID NO: 2699 - protein, 1147 aa, Artificial Sequence
  SARS-CoV-2/Sweden/01/2020__EPI_ISL_411951 spike protein (1-1147)(K986P_V987P)
MFVFLVLLPLVSSQCVNLTTRTQLPPAYTNSFTRGVYYPDKVFRSSVLHSTQDLFLPFFSNVTWFHAIHVSGTNGTKRFDNPVLPFNDGVYFASTEKSNIIRGWIFGTTLDSKTQSLLIVNNATNVVIKVCEFQFCNDPFLGVYYHKNNKSWMESEFRVYSSANNCTFEYVSQPFLMDLEGKQGNFKNLREFVFKNIDGYFKIYSKHTPINLVRDLPQGFSALEPLVDLPIGINITRFQTLLALHRSYLTPGDSSSGWTAGAAAYYVGYLQPRTFLLKYNENGTITDAVDCALDPLSETKCTLKSFTVEKGIYQTSNFRVQPTESIVRFPNITNLCPFGEVFNATRFASVYAWNRKRISNCVADYSVLYNSASFSTFKCYGVSPTKLNDLCFTNVYADSFVIRGDEVRQIAPGQTGKIADYNYKLPDDFTGCVIAWNSNNLDSKVGGNYNYLYRLFRKSNLKPFERDISTEIYQAGSTPCNGVEGFNCYFPLQSYGFQPTNGVGYQPYRVVVLSFELLHAPATVCGPKKSTNLVKNKCVNFNFNGLTGTGVLTESNKKFLPFQQFGRDIADTTDAVRDPQTLEILDITPCSFGGVSVITPGTNTSNQVAVLYQDVNCTEVPVAIHADQLTPTWRVYSTGSNVFQTRAGCLIGAEHVNNSYECDIPIGAGICASYQTQTNSPRRARSVASQSIIAYTMSLGAENSVAYSNNSIAIPTNFTISVTTEILPVSMTKTSVDCTMYICGDSTECSNLLLQYGSFCTQLNRALTGIAVEQDKNTQEVFAQVKQIYKTPPIKDCGGFNFSQILPDPSKPSKRSFIEDLLFNKVTLADAGFIKQYGDCLGDIAARDLICAQKFNGLTVLPPLLTDEMIAQYTSALLAGTITSGWTFGAGAALQIPFAMQMAYRFNGIGVTQNVLYENQKLIANQFNSAIGKIQDSLSSTASALGKLQDVVNQNAQALNTLVKQLSSNFGAISSVLNDILSRLDPPEAEVQIDRLITGRLQSLQTYVTQQLIRAAEIRASANLAATKMSECVLGQSKRVDFCGKGYHLMSFPQSAPHGVVFLHVTYVPAQEKNFTTAPAICHDGKAHFPREGVFVSNGTHWFVTQRNFYEPQIITTDNTFVSGNCDVVIGIVNNTVYDPLQPELDS

SEQ ID NO: 2700 - protein, 1147 aa, Artificial Sequence
  SARS-CoV-2/Tianmen/HBCDC-HB-07/2020__EPI_ISL_412983 spike protein (1-1147)(K986P_V987P)
MFVFLVLLPLVSSQCVNLTTRTQLPPAYTNSFTRGVYYPDKVFRSSVLHSTQDLFLPFFSNVTWFHAIHVSGTNGTKRFDNPVLPFNDGVYFASTEKSNIIRGWIFGTTLDSKTQSLLIVNNATNVVIKVCEFQFCNDPFLGVYYHKNNKSWMESEFRVYSSANNCTFEYVSQPFLMDLEGKQGNFKNLREFVFKNIDGYFKIYSKHTPINLVRDLPQGFSALEPLVDLPIGINITRFQTLLALHRSYLTPGDSSSGWTAGAAAYYVGYLQPRTFLLKYNENGTITDAVDCALDPLSETKCTLKSFTVEKGIYQTSNFRVQPTESIVRFPNITNLCPFGEVFNATRFASVYAWNRKRISNCVADYSVLYNSASFSTFKCYGVSPTKLNDLCFTNVYADSFVIRGDEVRQIAPGQTGKIADYNYKLPDDFTGCVIAWNSNNLDSKVGGNYNYLYRLFRKSNLKPFERDISTEIYQAGSTPCNGVEGFNCYFPLQSYGFQPTNGVGYQPYRVVVLSFELLHAPATVCGPKKSTNLVKNKCVNFNFNGLTGTGVLTESNKKFLPFQQFGRDIADTTDAVRDPQTLEILDITPCSFGGVSVITPGTNTSNQVAVLYQDLNCTEVPVAIHADQLTPTWRVYSTGSNVFQTRAGCLIGAEHVNNSYECDIPIGAGICASYQTQTNSPRRARSVASQSIIAYTMSLGAENSVAYSNNSIAIPTNFTISVTTEILPVSMTKTSVDCTMYICGDSTECSNLLLQYGSFCTQLNRALTGIAVEQDKNTQEVFAQVKQIYKTPPIKDFGGFNFSQILPDPSKPSKRSFIEDLLFNKVTLADAGFIKQYGDCLGDIAARDLICAQKFNGLTVLPPLLTDEMIAQYTSALLAGTITSGWTFGAGAALQIPFAMQMAYRFNGIGVTQNVLYENQKLIANQFNSAIGKIQDSLSSTASALGKLQDVVNQNAQALNTLVKQLSSNFGAISSVLNDILSRLDPPEAEVQIDRLITGRLQSLQTYVTQQLIRAAEIRASANLAATKMSECVLGQSKRVDFCGKGYHLMSFPQSAPHGVVFLHVTYVPAQEKNFTTAPAICHDGKAHFPREGVFVSNGTHWFVTQRNFYEPQIITTDNTFVSGNCDVVIGIVNNTVYDPLQPELDS

SEQ ID NO: 2701 - protein, 1147 aa, Artificial Sequence
  SARS-CoV-2/Hong Kong/case42_VM20002493/2020__EPI_ISL_414527 spike protein (1-1147)(K986P_V987P)
MFVFLVLLPLVSSQCVNLTTRTQLPPAYTNSFTRGVYYPDKVFRSSVLHSTQDLFLPFFSNVTWFHAIHVSGTNGTKRFDNPVLPFNDGVYFASTEKSNIIRGWIFGTTLDSKTQSLLIVNNATNVVIKVCEFQFCNDPFLGVYYHKNNKSWMESEFRVYSSANNCTFEYVSQPFLMDLEGKQGNFKNLREFVFKNIDGYFKIYSKHTPINLVRDLPQGFSALEPLVDLPIGINITRFQTLLALHRSYLTPGDSSSGWTAGAAAYYVGYLQPRTFLLKYNENGTITDAVDCALDPLSETKCTLKSFTVEKGIYQTSNFRVQPTESIVRFPNITNLCPFGEVFNATRFASVYAWNRKRISNCVADYSVLYNSASFSTFKCYGVSPTKLNDLCFTNVYADSFVIRGDEVRQIAPGQTGKIADYNYKLPDDFTGCVIAWNSNNLDSKVGGNYNYLYRLFRKSNLKPFERDISTEIYQAGSTPCNGVEGFNCYFPLQSYGFQPTNGVGYQPYRVVVLSFELLHAPATVCGPKKSTNLVKNKCVNFNFNGLTGTGVLTESNKKFLPFQQFGRDIADTTDAVRDPQTLEILDITPCSFGGVSVITPGTNTSNQVAVLYQDVNCTEVPVAIHADQLTPTWRVYSTGSNVFQTRAGCLIGAEHVNNSYECDIPIGAGICASYQTQTNSPRRARSVASQSIIAYTMSLGAENSVAYSNNSIAIPTNFAISVTTEILPVSMTKTSVDCTMYICGDSTECSNLLLQYGSFCTQLNRALTGIAVEQDKNTQEVFAQVKQIYKTPPIKDFGGFNFSQILPDPSKPSKRSFIEDLLFNKVTLADAGFIKQYGDCLGDIAARDLICAQKFNGLTVLPPLLTDEMIAQYTSALLAGTITSGWTFGAGAALQIPFAMQMAYRFNGIGVTQNVLYENQKLIANQFNSAIGKIQDSLSSTASALGKLQDVVNQNAQALNTLVKQLSSNFGAISSVLNDILSRLDPPEAEVQIDRLITGRLQSLQTYVTQQLIRAAEIRASANLAATKMSECVLGQSKRVDFCGKGYHLMSFPQSAPHGVVFLHVTYVPAQEKNFTTAPAICHDGKAHFPREGVFVSNGTHWFVTQRNFYEPQIITTDNTFVSGNCDVVIGIVNNTVYDPLQPELDS

SEQ ID NO: 2702 - protein, 1147 aa, Artificial Sequence
  SARS-CoV-2/USA/CruiseA-23/2020__EPI_ISL_414482 spike protein (1-1147)(K986P_V987P)
MFVFLVLLPLVSSQCVNLTTRTQLPPAYTNSFTRGVYYPDKVFRSSVLHSTQDLFLPFFSNVTWFHAIHVSGTNGTKRFDNPVLPFNDGVYFASTEKSNIIRGWIFGTTLDSKTQSLLIVNNATNVVIKVCEFQFCNDPFLGVYYHKNNKSWMESEFRVYSSANNCTFEYVSQPFLMDLEVKQGNFKNLREFVFKNIDGYFKIYSKHTPINLVRDLPQGFSALEPLVDLPIGINITRFQTLLALHRSYLTPGDSSSGWTAGAAAYYVGYLQPRTFLLKYNENGTITDAVDCALDPLSETKCTLKSFTVEKGIYQTSNFRVQPTESIVRFPNITNLCPFGEVFNATRFASVYAWNRKRISNCVADYSVLYNSASFSTFKCYGVSPTKLNDLCFTNVYADSFVIRGDEVRQIAPGQTGKIADYNYKLPDDFTGCVIAWNSNNLDSKVGGNYNYLYRLFRKSNLKPFERDISTEIYQAGSTPCNGVEGFNCYFPLQSYGFQPTNGVGYQPYRVVVLSFELLHAPATVCGPKKSTNLVKNKCVNFNFNGLTGTGVLTESNKKFLPFQQFGRDIADTTDAVRDPQTLEILDITPCSFGGVSVITPGTNTSNQVAVLYQDVNCTEVPVAIHADQLTPTWRVYSTGSNVFQTRAGCLIGAEHVNNSYECDIPIGAGICASYQTQTNSPRRARSVASQSIIAYTMSLGAENSVAYSNNSIAIPTNFTISVTTEILPVSMTKTSVDCTMYICGDSTECSNLLLQYGSFCTQLNRALTGIAVEQDKNTQEVFAQVKQIYKTPPIKDFGGFNFSQILPDPSKPSKRSFIEDLLFNKVTLADAGFIKQYGDCLGDIAARDLICAQKFNGLTVLPPLLTDEMIAQYTSALLAGTITSGWTFGAGAALQIPFAMQMAYRFNGIGVTQNVLYENQKLIANQFNSAIGKIQDSLSSTASALGKLQDVVNQNAQALNTLVKQLSSNFGAISSVLNDILSRLDPPEAEVQIDRLITGRLQSLQTYVTQQLIRAAEIRASANLAATKMSECVLGQSKRVDFCGKGYHLMSFPQSAPHGVVFLHVTYVPAQEKNFTTAPAICHDGKAHFPREGVFVSNGTHWFVTQRNFYEPQIITTDNTFVSGNCDVVIGIVNNTVYDPLQPELDS

SEQ ID NO: 2703 - protein, 1147 aa, Artificial Sequence
  SARS-CoV-2/Hong Kong/case85_VM20002868/2020__EPI_ISL_414519 spike protein (1-1147)(K986P_V987P)
MFVFLVLVPLVSSQCVNLTTRTQLPPAYTNSFTRGVYYPDKVFRSSVLHSTQDLFLPFFSNVTWFHAIHVSGTNGTKRFDNPVLPFNDGVYFASTEKSNIIRGWIFGTTLDSKTQSLLIVNNATNVVIKVCEFQFCNDPFLGVYYHKNNKSWMESEFRVYSSANNCTFEYVSQPFLMDLEGKQGNFKNLREFVFKNIDGYFKIYSKHTPINLVRDLPQGFSALEPLVDLPIGINITRFQTLLALHRSYLTPGDSSSGWTAGAAAYYVGYLQPRTFLLKYNENGTITDAVDCALDPLSETKCTLKSFTVEKGIYQTSNFRVQPTESIVRFPNITNLCPFGEVFNATRFASVYAWNRKRISNCVADYSVLYNSASFSTFKCYGVSPTKLNDLCFTNVYADSFVIRGDEVRQIAPGQTGKIADYNYKLPDDFTGCVIAWNSNNLDSKVGGNYNYLYRLFRKSNLKPFERDISTEIYQAGSTPCNGVEGFNCYFPLQSYGFQPTNGVGYQPYRVVVLSFELLHAPATVCGPKKSTNLVKNKCVNFNFNGLTGTGVLTESNKKFLPFQQFGRDIADTTDAVRDPQTLEILDITPCSFGGVSVITPGTNTSNQVAVLYQDVNCTEVPVAIHADQLTPTWRVYSTGSNVFQTRAGCLIGAEHVNNSYECDIPIGAGICASYQTQTNSPRRARSVASQSIIAYTMSLGAENSVAYSNNSIAIPTNFTISVTTEILPVSMTKTSVDCTMYICGDSTECSNLLLQYGSFCTQLNRALTGIAVEQDKNTQEVFAQVKQIYKTPPIKDFGGFNFSQILPDPSKPSKRSFIEDLLFNKVTLADAGFIKQYGDCLGDIAARDLICAQKFNGLTVLPPLLTDEMIAQYTSALLAGTITSGWTFGAGAALQIPFAMQMAYRFNGIGVTQNVLYENQKLIANQFNSAIGKIQDSLSSTASALGKLQDVVNQNAQALNTLVKQLSSNFGAISSVLNDILSRLDPPEAEVQIDRLITGRLQSLQTYVTQQLIRAAEIRASANLAATKMSECVLGQSKRVDFCGKGYHLMSFPQSAPHGVVFLHVTYVPAQEKNFTTAPAICHDGKAHFPREGVFVSNGTHWFVTQRNFYEPQIITTDNTFVSGNCDVVIGIVNNTVYDPLQPELDS

SEQ ID NO: 2704 - protein, 1147 aa, Artificial Sequence; identical to SEQ ID NO: 2694
  SARS-CoV-2/England/200990660/2020__EPI_ISL_414523 spike protein (1-1147)(K986P_V987P)

SEQ ID NO: 2705 - protein, 1147 aa, Artificial Sequence
  SARS-CoV-2/Australia/NSW09/2020__EPI_ISL_413595 spike protein (1-1147)(K986P_V987P)
MFVFLVLLPLVSSQCVNLTTRTQLPPAYTNSFTRGVYYPDKVFRSSVLHSTQDLFLPFFSNVTWFHAIHVSGTNGTKRFDNPVLPFNDGVYFASTEKSNIIRGWIFGTTLDSKTQSLLIVNNATNVVIKVCEFQFCNDPFLGVYYHKNNKSWMESEFRVYSSANNCTFEYVSQPFLMDLEGKQGNFKNLREFVFKNIDGYFKIYSKHTPINLVRDLPQGFSALEPLVDLPIGINITRFQTLLALHRSYLTPGDSSSGWTAGAAAYYVGYLQPRTFLLKYNENGTITDAVDCALDPLSETKCTLKSFTVEKGIYQTSNFRVQPTESIVRFPNITNLCPFGEVFNATRFASVYAWNRKRISNCVADYSVLYNSASFSTFKCYGVSPTKLNDLCFTNVYADSFVIRGDEVRQIAPGQTGKIADYNYKLPDDFTGCVIAWNSNNLDSKVGGNYNYLYRLFRKSNLKPFERDISTEIYQAGSTPCNGVEGFNCYFPLQSYGFQPTNGVGYQPYRVVVLSFELLHAPATVCGPKKSTNLVKNKCVNFNFNGLTGTGVLTESNKKFLPFQQFGRDIADTTDAVRDPQTLEILDITPCSFGGVSVITPGTNTSNQVAVLYQDVNCTEVPVAIHADQLTPTWRVYSTGSNVFQTRAGCLIGAEHVNNSYECDIPIGAGICASYQTQTNSPRRARSVASQSIIAYTMSLGAENSVAYSNNSIAIPTNFTISVTTEILPVSMTKTSVDCTMYICGDSTECSNLLLQYGSFCTQLNRALTGIAVEQDKNTQEVFAQVKQIYKTPPIKDFGGFNFSQILPDPSKPSKRSFIEDLLFNKVTLADAGFIKQYGDCLGDIAARDLICAQKFNGLTVLPPLLTDEMIAQYTSALLAGTITSGWTFGAGAALQIPFAMQMAYRFNGIGVTQNVLYENQKLIANQFNSAIGKIQDSLSFTASALGKLQDVVNQNAQALNTLVKQLSSNFGAISSVLNDILSRLDPPEAEVQIDRLITGRLQSLQTYVTQQLIRAAEIRASANLAATKMSECVLGQSKRVDFCGKGYHLMSFPQSAPHGVVFLHVTYVPAQEKNFTTAPAICHDGKAHFPREGVFVSNGTHWFVTQRNFYEPQIITTDNTFVSGNCDVVIGIVNNTVYDPLQPELDS

SEQ ID NO: 2706 - protein, 1147 aa, Artificial Sequence; identical to SEQ ID NO: 2686
  SARS-CoV-2/Australia/NSW10/2020__EPI_ISL_413596 spike protein (1-1147)(K986P_V987P)

SEQ ID NO: 2707 - protein, 1147 aa, Artificial Sequence
  SARS-CoV-2/Switzerland/1000477797/2020__EPI_ISL_413023 spike protein (1-1147)(K986P_V987P)
MFVFLVLLPLVSSQCVNLTTRTQLPPAYTNSFTRGVYYPDKVFRSSVLHSTQDLFLPFFSNVTWFHAIHVSGTNGTKRFDNPVLPFNDGVYFASTEKSNIIRGWIFGTTLDSKTQSLLIVNNATNVVIKVCEFQFCNDPFLGVYYHKNNKSWMESEFRVYSSANNCTFEYVSQPFLMDLEGKQGNFKNLREFVFKNIDGYFNIYSKHTPINLVRDLPQGFSALEPLVDLPIGINITRFQTLLALHRSYLTPGDSSSGWTAGAAAYYVGYLQPRTFLLKYNENGTITDAVDCALDPLSETKCTLKSFTVEKGIYQTSNFRVQPTESIVRFPNITNLCPFGEVFNATRFASVYAWNRKRISNCVADYSVLYNSASFSTFKCYGVSPTKLNDLCFTNVYADSFVIRGDEVRQIAPGQTGKIADYNYKLPDDFTGCVIAWNSNNLDSKVGGNYNYLYRLFRKSNLKPFERDISTEIYQAGSTPCNGVEGFNCYFPLQSYGFQPTNGVGYQPYRVVVLSFELLHAPATVCGPKKSTNLVKNKCVNFNFNGLTGTGVLTESNKKFLPFQQFGRDIADTTDAVRDPQTLEILDITPCSFGGVSVITPGTNTSNQVAVLYQGVNCTEVPVAIHADQLTPTWRVYSTGSNVFQTRAGCLIGAEHVNNSYECDIPIGAGICASYQTQTNSPRRARSVASQSIIAYTMSLGAENSVAYSNNSIAIPTNFTISVTTEILPVSMTKTSVDCTMYICGDSTECSNLLLQYGSFCTQLNRALTGIAVEQDKNTQEVFAQVKQIYKTPPIKDFGGFNFSQILPDPSKPSKRSFIEDLLFNKVTLADAGFIKQYGDCLGDIAARDLICAQKFNGLTVLPPLLTDEMIAQYTSALLAGTITSGWTFGAGAALQIPFAMQMAYRFNGIGVTQNVLYENQKLIANQFNSAIGKIQDSLSSTASALGKLQDVVNQNAQALNTLVKQLSSNFGAISSVLNDILSRLDPPEAEVQIDRLITGRLQSLQTYVTQQLIRAAEIRASANLAATKMSECVLGQSKRVDFCGKGYHLMSFPQSAPHGVVFLHVTYVPAQEKNFTTAPAICHDGKAHFPREGVFVSNGTHWFVTQRNFYEPQIITTDNTFVSGNCDVVIGIVNNTVYDPLQPELDS

SEQ ID NO: 2708 - protein, 1147 aa, Artificial Sequence
  SARS-CoV-2/Belgium/BA-02291/2020__EPI_ISL_415159 spike protein (1-1147)(K986P_V987P)
MFVFLVLLPLVSSQCVNLTTRTQLPPAYTNSFTRGVYYPDKVFRSSVLHSTQDLFLPFFSNVTWFHAIHVSGTNGTKRFDNPVLPFNDGVYFASTEKSNIIRGWIFGTTLDSKTQSLLIVNNATNVVIKVCEFQFCNDPFLGVYYHKNNKSWMESEFRVYSSANNCTFEYVSQPFLMDLEGKQGNFKNLREFVFKNIDGYFKIYSKHTPINLVRDLPQGFSALEPLVDLPIGINITRFQTLLALHRSYLTPGDSSSGWTAGAAAYYVGYLQPRTFLLKYNENGTITDAVDCALDPLSETKCTLKSFTVEKGIYQTSNFRVQPTESIVRFPNITNLCPFGEVFNATRFASVYAWNRKRISNCVADYSVLYNSASFSTFKCYGVSPTKLNDLCFTNVYADSFVIRGDEVRQIAPGQTGKIADYNYKLPDDFTGCVIAWNSNNLDSKVGGNYNYLYRLFRRSNLKPFERDISTEIYQAGSTPCNGVEGFNCYFPLQSYGFQPTNGVGYQPYRVVVLSFELLPAPATVCGPKKSTNLVKNKCVNFNFNGLTGTGVLTESNKKFLPFQQFGRDIADTTDAVRDPQTLEILDITPCSFGGVSVITPGTNTSNQVAVLYQGVNCTEVPVAIHADQLTPTWRVYSTGSNVFQTRAGCLIGAEHVNNSYECDIPIGAGICASYQTQTNSPRRARSVASQSIIAYTMSLGAENSVAYSNNSIAIPTNFTISVTTEILPVSMTKTSVDCTMYICGDSTECSNLLLQYGSFCTQLNRALTGIAVEQDKNTQEVFAQVKQIYKTPPIKDFGGFNFSQILPDPSKPSKRSFIEDLLFNKVTLADAGFIKQYGDCLGDIAARDLICAQKFNGLTVLPPLLTDEMIAQYTSALLAGTITSGWTFGAGAALQIPFAMQMAYRFNGIGVTQNVLYENQKLIANQFNSAIGKIQDSLSSAAPALGKLQDVVNQNAQALNTLVKQLSSNFGAISSVLNDILSRLDPPEAEVQIDRLITGRLQSLQTYVTQQLIRAAEIRASANLAATKMSECVLGQSKRVDFCGKGYHLMSFPQSAPHGVVFLHVTYVPAQEKNFTTAPAICHDGKAHFPREGVFVSNGTHWFVTQRNFYEPQIITTDNTFVSGNCDVVIGIVNNTVYDPLQPELDS

SEQ ID NO: 2709 - protein, 1147 aa, Artificial Sequence
  SARS-CoV-2/USA/WA8-UW5/2020__EPI_ISL_413486 spike protein (1-1147)(K986P_V987P)
MFVFLVLLPLVSSQCVNLTTRTQLPPAYTNSFTRGVYYPDKVFRSSVLHSTQDLFLPFFSNVTWFHAIHVSGTNGTKRFDNPVLPFNDGVYFASTEKSNIIRGWIFGTTLDSKTQSLLIVNNATNVVIKVCEFQFCNDPFLGVYYHKNNKSWMESEFRVYSSANNCTFEYVSQPFLMDLEGKQGNFKNLREFVFKNIDGYFKIYSKHTPINLVRDLPQGFSALEPLVDLPIGINITRFQTLLALHRSYLTPGDSSSGWTAGAAAYYVGYLQPRTFLLKYNENGTITDAVDCALDPLSETKCTLKSFTVEKGIYQTSNFRVQPTESIVRFPNITNLCPFGEVFNATRFASVYAWNRKRISNCVADYSVLYNSASFSTFKCYGVSPTKLNDLCFTNVYADSFVIRGDEVRQIAPGQTGKIADYNYKLPDDFTGCVIAWNSNNLDSKVGGNYNYLYRLFRKSNLKPFERDISTEIYQAGSTPCNGVEGFNCYFPLQSYGFQPTNGVGYQPYRVVVLSFELLHAPATVCGPKKSTNLVKNKCVNFNFNGLTGTGVLTESNKKFLPFQQFGRDIADTTDAVRDPQTLEILDITPCSFGGVSVITPGTNTSNQVAVLYQDVNCTEVPVAIHADQLTPTWRVYSTGSNVFQTRAGCLIGAEYVNNSYECDIPIGAGICASYQTQTNSPRRARSVASQSIIAYTMSLGAENSVAYSNNSIAIPTNFTISVTTEILPVSMTKTSVDCTMYICGDSTECSNLLLQYGSFCTQLNRALTGIAVEQDKNTQEVFAQVKQIYKTPPIKDFGGFNFSQILPDPSKPSKRSFIEDLLFNKVTLADAGFIKQYGDCLGDIAARDLICAQKFNGLTVLPPLLTDEMIAQYTSALLAGTITSGWTFGAGAALQIPFAMQMAYRFNGIGVTQNVLYENQKLIANQFNSAIGKIQDSLSSTASALGKLQDVVNQNAQALNTLVKQLSSNFGAISSVLNDILSRLDPPEAEVQIDRLITGRLQSLQTYVTQQLIRAAEIRASANLAATKMSECVLGQSKRVDFCGKGYHLMSFPQSAPHGVVFLHVTYVPAQEKNFTTAPAICHDGKAHFPREGVFVSNGTHWFVTQRNFYEPQIITTDNTFVSGNCDVVIGIVNNTVYDPLQPELDS

SEQ ID NO: 2710 - protein, 1147 aa, Artificial Sequence
  SARS-CoV-2/England/20102000506/2020__EPI_ISL_415147 spike protein (1-1147)(K986P_V987P)
MFVFLVLLPLVSSQCVNLTTRTQLPPAYTNSFTRGVYYPDKVFRSSVLHSTQDLFLPFFSNVTWFHAIHVSGTNGTKRFDNPVLPFNDGVYFASTEKSNIIRGWIFGTTLDSKTQSLLIVNNATNVVIKVCEFQFCNDPFLGVYYHKNNKSWMESEFRVYSSANNCTFEYVSQPFLMDLEGKQGNFKNLREFVFKNIDGYFKIYSKHTPINLVRDLPQGFSALEPLVDLPIGINITRFQTLLALHRSYLTPGDSSSGWTAGAAAYYVGYLQPRTFLLKYNENGTITDAVDCALDPLSETKCTLKSFTVEKGIYQTSNFRVQPTESIVRFPNITNLCPFGEVFNATRFASVYAWNRKRISNCVADYSVLYNSASFSTFKCYGVSPTKLNDLCFTNVYADSFVIRGDEVRQIAPGQTGKIADYNYKLPDDFTGCVIAWNSNNLDSKVGGNYNYLYRLFRKSNLKPFERDISTEIYQAGSTPCNGVEGFNCYFPLQSYGFQPTNGVGYQPYRVVVLSFELLHAPATVCGPKKSTNLVKNKCVNFNFNGLTGTGVLTESNKKFLPFQQFGRDIADTTDAVRDPQTLEILDITPCSFGGVSVITPGTNTSNQVAVLYQGVNCTEVPVAIHADQLTPTWRVYSTGSNVFQTRAGCLIGAEHVNNSYECDIPIGAGICASYQTQTNSPRRARSVASQSIIAYTMSLGAENSVAYSNNSIAIPTNFTISVTTEILPVSMTKTSVDCTMYICGDSTECSNLLLQYGSFCTQLNRALTGIAVEQDKNTQEVFAQVKQIYKTPPIKDFGGFNFSQILPDPSKPSKRSFIEDLLFNKVTLADAGFIKQYGYCLGDIAARDLICAQKFNGLTVLPPLLTDEMIAQYTSALLAGTITSGWTFGAGAALQIPFAMQMAYRFNGIGVTQNVLYENQKLIANQFNSAIGKIQDSLSSTASALGKLQDVVNQNAQALNTLVKQLSSNFGAISSVLNDILSRLDPPEAEVQIDRLITGRLQSLQTYVTQQLIRAAEIRASANLAATKMSECVLGQSKRVDFCGKGYHLMSFPQSAPHGVVFLHVTYVPAQEKNFTTAPAICHDGKAHFPREGVFVSNGTHWFVTQRNFYEPQIITTDNTFVSGNCDVVIGIVNNTVYDPLQPELDS

SEQ ID NO: 2711 - protein, 1147 aa, Artificial Sequence
  SARS-CoV-2/Belgium/VAG-03013/2020__EPI_ISL_415155 spike protein (1-1147)(K986P_V987P)
MFVFLVLLPLVSSQCVNLTTRTQLPPAYTNSFTRGVYYPDKVFRSSVLHSTQDLFLPFFSNVTWFHAIHVSGTNGTKRFDNPVLPFNDGVYFASTEKSNIIRGWIFGTTLDSKTQSLLIVNNATNVVIKVCEFQFCNDPFLGVYYHKNNKSWMESEFRVYSSANNCTFEYVSQPFLMDLEGKQGNFKNLREFVFKNIDGYFKIYSKHTPINLVRDLPQGFSALEPLVDLPIGINITRFQTLLALHRSYLTPGDSSSGWTAGAAAYYVGYLQPRTFLLKYNENGTITDAVDCALDPLSETKCTLKSFTVEKGIYQTSNFRVQPTESIVRFPNITNLCPFGEVFNATRFASVYAWNRKRISNCVADYSVLYNSASFSTFKCYGVSPTKLNDLCFTNVYADSFVIRGDEVRQIAPGQTGKIADYNYKLPDDFTGCVIAWNSNNLDSKVGGNYNYLYRLFRKSNLKPFERDISTEIYQAGSTPCNGVEGFNCYFPLQSYGFQPTNGVGYQPYRVVVLSFELLHAPATVCGPKKSTNLVKNKCVNFNFNGLTGTGVLTESNKKFLPFQQFGRDIADTTDAVRDPQTLEILDITPCSFGGVSVITPGTNTSNQVAVLYQGVNCTEVPVAIHADQLTPTWRVYSTGSNVFQTRAGCLIGAEHVNNSYECDIPIGAGICASYQTQTNSPRRARSVASQSIIAYTMSLGAENSVAYSNNSIAIPTNFTISVTTEILPVSMTKTSVDCTMYICGDSTECSNLLLQYGSFCTQLNRALTGIAVEQDKNTQEVFAQVKQIYKTPPIKDFGGFNFSQILPDPSKPSKRSFIEDLLFNKVTLADAGFIKQYGDCLGDIAARDLICAQKFNGLTVLPPLLTDEMIAQYTSALLAGTITSGWTFGAGAALQIPFAMQMAYRFNGIGVTQNVLYENQKLIANQFNSAIGKIQDSLSSTATALGKLQDVVNQNAQALNTLVKQLSSNFGAISSVLNDILSRLDPPEAEVQIDRLITGRLQSLQTYVTQQLIRAAEIRASANLAATKMSECVLGQSKRVDFCGKGYHLMSFPQSAPHGVVFLHVTYVPAQEKNFTTAPAICHDGKAHFPREGVFVSNGTHWFVTQRNFYEPQIITTDNTFVSGNCDVVIGIVNNTVYDPLQPELDS

SEQ ID NO: 2712 - protein, 1147 aa, Artificial Sequence
  SARS-CoV-2/Belgium/BC-03016/2020__EPI_ISL_415157 spike protein (1-1147)(K986P_V987P)
MFVFLVLLPLVSSQCVNLTTRTQLPPAYTNSFTRGVYYPDKVFRSSVLHSTQDLFLPFFSNVTWFHAIHVSGTNGTKRFDNPVLPFNDGVYFASTEKSNIIRGWIFGTTLDSKTQSLLIVNNATNVVIKVCEFQFCNDPFLGVYYHKNNKSWMESEFRVYSSANNCTFEYVSQPFLMDLEGKQGNFKNLREFVFKNIDGYFKIYSKHTPINLVRDLPQGFSALEPLVDLPIGINITRFQTLLALHRSYLTPGDSSSGWTAGAAAYYVGYLQPRTFLLKYNENGTITDAVDCALDPLSETKCTLKSFTVEKGIYQTSNFRVQPTESIVRFPNITNLCPFGEVFNATRFASVYAWNRKRISNCVADYSVLYNSASFSTFKCYGVSPTKLNDLCFTNVYADSFVIRGDEVRQIAPGQTGKIADYNYKLPDDFTGCVIAWNSNNLDSKVGGNYNYLYRLFRKSNLKPFERDISTEIYQAGSTPCNGVEGFNCYFPLQSYGFQPTNGVGYQPYRVVVLSFELLHAPATVCGPKKSTNLVKNKCVNFNFNGLTGTGVLTESNKKFLPFQQFGRDIADTTDAVRDPQTLEILDITPCSFGGVSVITPGTNTSNQVAVLYQGVNCTEVPVAIHADQLTPTWRVYSTGSNVFQTRAGCLIGAEHVNNSYECDIPIGAGICASYQTQTNSPRRARSVASQSIIAYTMSLGAENSVAYSNNSIAIPTNFTISVTTEILPVSMTKTSVDCTMYICGDSTECSNLLLQYGSFCTQLNRALTGIAVEQDKNTQEVFAQVKQIYKTPPIKDFGGFNFSQILPDPSKPSKRSFIEDLLFNKVTLADAGFIKQYGDCLGDIAARDLICAQKFNGLTVLPPLLTDEMIAQYTSALLAGTITSGWTFGAGAALQIPFAMQMAYRFNGIGVTQNVLYENQKLIANQFNSAIGKIQDSLSSTAPALGKLQDVVNQNAQALNTLVKQLSSNFGAISSVLNDILSRLDPPEAEVQIDRLITGRLQSLQTYVTQQLIRAAEIRASANLAATKMSECVLGQSKRVDFCGKGYHLMSFPQSAPHGVVFLHVTYVPAQEKNFTTAPAICHDGKAHFPREGVFVSNGTHWFVTQRNFYEPQIITTDNTFVSGNCDVVIGIVNNTVYDPLQPELDS

SEQ ID NO: 2713 - protein, 1147 aa, Artificial Sequence
  SARS-CoV-2/Germany/BavPat3/2020__EPI_ISL_414521 spike protein (1-1147)(K986P_V987P)
MFVFLVLLPLVSSQCVNLTTRTQLPPAYTNSFTRGVYYPDKVFRSSVLHSTQDLFLPFFSNVTWFHAIHVSGTNGTKRFDNPVLPFNDGVYFASTEKSNIIRGWIFGTTLDSKTQSLLIVNNATNVVIKVCEFQFCNDPFLGVYYHKNNKSWMESEFRVYSSANNCTFEYVSQPFLMDLEGKQGNFKNLREFVFKNIDGYFKIYSKHTPINLVRDLPQGFSALEPLVDLPIGINITRFQTLLALHRSYLTPGDSSSGWTAGAAAYYVGYLQPRTFLLKYNENGTITDAVDCALDPLSETKCTLKSFTVEKGIYQTSNFRVQPTESIVRFPNITNLCPFGEVFNATRFASVYAWNRKRISNCVADYSVLYNSASFSTFKCYGVSPTKLNDLCFTNVYADSFVIRGDEVRQIAPGQTGKIADYNYKLPDDFTGCVIAWNSNNLDSKVGGNYNYLYRLFRKSNLKPFERDISTEIYQAGSTPCNGVEGFNCYFPLQSYGFQPTNGVGYQPYRVVVLSFELLHAPATVCGPKKSTNLVKNKCVNFNFNGLTGTGVLTESNKKFLPFQQFGRDIADTTDAVRDPQTLEILDITPCSFGGVSVITPGTNTSNQVAVLYQDVNCTEVPVAIHADQLTPTWRVYSTGSNVFQTRAGCLIGAEHVNNSYECDIPIGAGICASYQTQTNSPRRARSVASQSIIAYTMSLGAENSVAYSNNSIAIPTNFTISVTTEILPVSMTKTSVDCTMYICGDSTECSNLLLQYGSFCTQLNRALTGIAVEQDKNTQQVFAQVKQIYKTPPIKDFGGFNFSQILPDPSKPSKRSFIEDLLFNKVTLADAGFIKQYGDCLGDIAARDLICAQKFNGLTVLPPLLTDEMIAQYTSALLAGTITSGWTFGAGAALQIPFAMQMAYRFNGIGVTQNVLYENQKLIANQFNSAIGKIQDSLSSTASALGKLQDVVNQNAQALNTLVKQLSSNFGAISSVLNDILSRLDPPEAEVQIDRLITGRLQSLQTYVTQQLIRAAEIRASANLAATKMSECVLGQSKRVDFCGKGYHLMSFPQSAPHGVVFLHVTYVPAQEKNFTTAPAICHDGKAHFPREGVFVSNGTHWFVTQRNFYEPQIITTDNTFVSGNCDVVIGIVNNTVYDPLQPELDS

SEQ ID NO: 2714 - protein, 1147 aa, Artificial Sequence
  SARS-CoV-2/France/HF1805/2020__EPI_ISL_414628 spike protein (1-1147)(K986P_V987P)
MFVFLVLLPLVSSQCVNLTTRTQLPPAYTNSFTRGVYYPDKVFRSSVLHSTQDLFLPFFSNVTWFHAIHVSGTNGTKRFDNPVLPFNDGVYFASTEKSNIIRGWIFGTTLDSKTQSLLIVNNATNVVIKVCEFQFCNDPFLGVYYHKNNKSWMESEFRVYSSANNCTFEYVSQPFLMDLEGKQGNFKNLREFVFKNIDGYFKIYSKHTPINLVRDLPQGFSALEPLVDLPIGINITRFQTLLALHRSYLTPGDSSSGWTAGAAAYYVGYLQPRTFLLKYNENGTITDAVDCALDPLSETKCTLKSFTVEKGIYQTSNFRVQPTESIVRFPNITNLCPFGEVFNATRFASVYAWNRKRISNCVADYSVLYNSASFSTFKCYGVSPTKLNDLCFTNVYADSFVIRGDEVRQIAPGQTGKIADYNYKLPDDFTGCVIAWNSNNLDSKVGGNYNYLYRLFRKSNLKPFERDISTEIYQAGSTPCNGVEGFNCYFPLQSYGFQPTNGVGYQPYRVVVLSFELLHAPATVCGPKKSTNLVKNKCVNFNFNGLTGTGVLTESNKKFLPFQQFGRDIADTTDAVRDPQTLEILDITPCSFGGVSVITPGTNTSNQVAVLYQGVNCTEVPVAIHADQLTPTWRVYSTGSNVFQTRAGCLIGAEHVNNSYECDIPIGAGICASYQTQTNSPRRARSVASQSIIAYTMSLGAENSVAYSNNSIAIPTNFTISVTTEILPVSMTKTSVDCTMYICGDSTECSNLLLQYGSFCTQLNRALTGIAVEQDKNTQEVFAQVKQIYKTPPIKDFGGFNFSQILPDPSKPSKRSFIEDLLFNKVTLADAGFIKQYGDCLGDIAARDLICAQKFNGLTVLPPLLTDEMIAQYTSALLAGTITSGWTFGAGAALQIPFAMQMAYRFNGIGVTQNVLYENQKLIANQFNSAIGKIQDSLSSTASALGKLQDVVNQNAQALNTLVKQLSSNFGAISSVLNDILSRLDPPEAEVQIDRLITGRLQSLQTYVTQQLIRAAEIRASANLAATKMSECVLGQSKRVDFCGKGYHLMSFPQSAPHGVVFLHVTYVPAQEKNFTTAPAICHDGKAHFPREGVFVSNGTHWFVTQRNFYEPQIITTDNTFVSGNCDVVIGVVNNTVYDPLQPELDS

SEQ ID NO: 2715 - protein, 1147 aa, Artificial Sequence
  SARS-CoV-2/Netherlands/ZuidHolland_9/2020__EPI_ISL_414445 spike protein (1-1147)(K986P_V987P)
MFVFLVLLPLVSSQCVNLTTRTQLPPAYTNSFTRGVYYPDKVFRSSVLHSTQDLFLPFFSNVTWFHAIHVSGTNGTKRFDNPVLPFNDGVYFASTEKSNIIRGWIFGTTLDSKTQSLLIVNNATNVVIKVCEFQFCNDPFLGVYYHKNNKSWMESEFRVYSSANNCTFEYVSQPFLMDLEGKQGNFKNLREFVFKNIDGYFKIYSKHTPINLVRDLPQGFSALEPLVDLPIGINITRFQTLLALHRSYLTPGDSSSGWTAGAAAYYVGYLQPRTFLLKYNENGTITDAVDCALDPLSETKCTLKSFTVEKGIYQTSNFRVQPTESIVRFPNITNLCPFGEVFNATRFASVYAWNRKRISNCVADYSVLYNSASFSTFKCYGVSPTKLNDLCFTNVYADSFVIRGDEVRQIAPGQTGKIADYNYKLPDDFTGCVIAWNSNNLDSKVGGNYNYLYRLFRKSNLKPFERDISTEIYQAGSTPCNGVEGFNCYFPLQSYGFQPTNGVGYQPYRVVVLSFELLHAPATVCGPKKSTNLVKNKCVNFNFNGLTGTGVLTESNKKFLPFQQFGRDIADTTDAVRDPQTLEILDITPCSFGGVSVITPGTNTSNQVAVLYQGVNCTEVPVAIHADQLTPTWRVYSTGSNVFQTRAGCLIGAEHVNNSYECDIPIGAGICASYQTQTNSPRRARSVASQSIIAYTMSLGAENSVAYSNNSIAIPTNFTISVTTEILPVSMTKTSVDCTMYICGDSTECSNLLLQYGSFCTQLNRALTGIAVEQDKNTQEVFAQVKQIYKTPPIKDFGGFNFSQILPDPSKPSKRSFIEDLLFNKVTLADAGFIKQYGDCLGDIAARDLICVQKFNGLTVLPPLLTDEMIAQYTSALLAGTITSGWTFGAGAALQIPFAMQMAYRFNGIGVTQNVLYENQKLIANQFNSAIGKIQDSLSSTASALGKLQDVVNQNAQALNTLVKQLSSNFGAISSVLNDILSRLDPPEAEVQIDRLITGRLQSLQTYVTQQLIRAAEIRASANLAATKMSECVLGQSKRVDFCGKGYHLMSFPQSAPHGVVFLHVTYVPAQEKNFTTAPAICHDGKAHFPREGVFVSNGTHWFVTQRNFYEPQIITTDNTFVSGNCDVVIGIVNNTVYDPLQPELDS

SEQ ID NO: 2716 - protein, 1147 aa, Artificial Sequence
  SARS-CoV-2/Finland/FIN03032020A/2020__EPI_ISL_413602 spike protein (1-1147)(K986P_V987P)
MFVFLVLLPLVSSQCVNLTTRTQLPPAYTNSFTRGVYYPDKVFRSSVLHSTQDLFLPFFSNVTWFHAIHVSGTNGTKRFDNPVLPFNDGVYFASTEKSNIIRGWIFGTTLDSKTQSLLIVNNATNVVIKVCEFQFCNDPFLGVYYHKNNKSWMESEFRVYSSANNCTFEYVSQPFLMDLEGKQGNFKNLREFVFKNIDGYFKIYSKHTPINLVRDLPQGFSALEPLVDLPIGINITRFQTLLALHRSYLTPGDSSSGWTAGAAAYYVGYLQPRTFLLKYNENGTITDAVDCALDPLSETKCTLKSFTVEKGIYQTSNFRVQPTESIVRFPNITNLCPFGEVFNATRFASVYAWNRKRISNCVADYSVLYNSASFSTFKCYGVSPTKLNDLCFTNVYADSFVIRGDEVRQIAPGQTGKIADYNYKLPDDFTGCVISWNSNNLDSKVGGNYNYLYRLFRKSNLKPFERDISTEIYQAGSTPCNGVEGFNCYFPLQSYGFQPTNGVGYQPYRVVVLSFELLHAPATVCGPKKSTNLVKNKCVNFNFNGLTGTGVLTESNKKFLPFQQFGRDIADTTDAVRDPQTLEILDITPCSFGGVSVITPGTNTSNQVAVLYQGVNCTEVPVAIHADQLTPTWRVYSTGSNVFQTRAGCLIGAEHVNNSYECDIPIGAGICASYQTQTNSPRRARSVASQSIIAYTMSLGAENSVAYSNNSIAIPTNFTISVTTEILPVSMTKTSVDCTMYICGDSTECSNLLLQYGSFCTQLNRALTGIAVEQDKNTQEVFAQVKQIYKTPPIKDFGGFNFSQILPDPSKPSKRSFIEDLLFNKVTLADAGFIKQYGDCLGDIAARDLICAQKFNGLTVLPPLLTDEMIAQYTSALLAGTITSGWTFGAGAALQIPFAMQMAYRFNGIGVTQNVLYENQKLIANQFNSAIGKIQDSLSSTASALGKLQDVVNQNAQALNTLVKQLSSNFGAISSVLNDILSRLDPPEAEVQIDRLITGRLQSLQTYVTQQLIRAAEIRASANLAATKMSECVLGQSKRVDFCGKGYHLMSFPQSAPHGVVFLHVTYVPAQEKNFTTAPAICHDGKAHFPREGVFVSNGTHWFVTQRNFYEPQIITTDNTFVSGNCDVVIGIVNNTVYDPLQPELDS

SEQ ID NO: 2717 - protein, 1147 aa, Artificial Sequence
  SARS-CoV-2/France/GE1977/2020__EPI_ISL_414632 spike protein (1-1147)(K986P_V987P)
MFVFLVLLPLVSSQCVNLTTRTQLPPAYTNSFTRGVYYPDKVFRSSVLHSTQDLFLPFFSNVTWFHAIHVSGTNGTKRFDNPVLPFNDGVYFASTEKSNIIRGWIFGTTLDSKTQSLLIVNNATNVVIKVCEFQFCNDPFLGVYYHKNNKSWMESEFRVYSSANNCTFEYVSQPFLMDLEGKQGNFKNLREFVFKNIDGYFKIYSKHTPINLVRDLPQGFSALEPLVDLPIGINITRFQTLLALHRSYLTPGDSSSGWTAGAAAYYVGYLQPRTFLLKYNENGTITDAVDCALDPLSETKCTLKSFTVEKGIYQTSNFRVQPTESIVRFPNITNLCPFGEVFNATRFASVYAWNRKRISNCVADYSVLYNSASFSTFKCYGVSPTKLNDLCFTNVYADSFVIRGDEVRQIAPGQTGKIADYNYKLPDDFTGCVIAWNSNNLDSKVGGNYNYLYRLFRKSNLKPFERDISTEIYQAGSTPCNGVEGFNCYFPLQSYGFQPTNGVGYQPYRVVVLSFELLHAPATVCGPKKSTNLVKNKCVNFNFNGLTGTGVLTESNKKFLPFQQFGRDIADTTDAVRDPQTLEILDITPCSFGGVSVITPGTNTSNQVAVLYQGVNCTEVPVAIHADQLTPTWRVYSTGSNVFQTRAGCLIGAEHVNNSYECDIPIGAGICASYQTQTNSPRRARSVASQSIIAYTMSLGAENSVAYSNNSIAIPTNFTISVTTEILPVSMTKTSVDCTMYICGDSTECSNLLLQYGSFCTQLNRALTGIAVEQDKNTQEVFAQVKQIYKTPPIKDFGGFNFSQILPDPSKPSKRSFIEDLLFNKVTLADAGFIKQYGDCLGDIAARDLICAQKFNGLTVLPPLLTDEMIAQYTSALLAGTITSGWTFGAGAALQIPFAMQMAYRFNGIGVTQNVLYENQKLIANQFNSAIGKIQDSLFSTASALGKLQDVVNQNAQALNTLVKQLSSNFGAISSVLNDILSRLDPPEAEVQIDRLITGRLQSLQTYVTQQLIRAAEIRASANLAATKMSECVLGQSKRVDFCGKGYHLMSFPQSAPHGVVFLHVTYVPAQEKNFTTAPAICHDGKAHFPREGVFVSNGTHWFVTQRNFYEPQIITTDNTFVSGNCDVVIGIVNNTVYDPLQPELDS

SEQ ID NO: 2718 - protein, 1147 aa, Artificial Sequence
  SARS-CoV-2/Finland/FIN-313/2020__EPI_ISL_414641 spike protein (1-1147)(K986P_V987P)
MFVFLVLLPLVSSQCVNLTTRTQLPPAYTNSFTRGVYYPDKVFRSSVLHSTQDLFLPFFSNVTWFHAIHVSGTNGTKRFDNPVLPFNDGVYFASTEKSNIIRGWIFGTTLDSKTQSLLIVNNATNVVIKVCEFQFCNDPFLGVYYHKNNKSWMESEFRVYSSANNCTFEYVSQPFLMDLEGKQGNFKNLREFVFKNIDGYFKIYSKHTPINLVRDLPQGFSALEPLVDLPIGINITRFKTLLALHRSYLTPGDSSSGWTAGAAAYYVGYLQPRTFLLKYNENGTITDAVDCALDPLSETKCTLKSFTVEKGIYQTSNFRVQPTESIVRFPNITNLCPFGEVFNATRFASVYAWNRKRISNCVADYSVLYNSASFSTFKCYGVSPTKLNDLCFTNVYADSFVIRGDEVRQIAPGQTGKIADYNYKLPDDFTGCVIAWNSNNLDSKVGGNYNYLYRLFRKSNLKPFERDISTEIYQAGSTPCNGVEGFNCYFPLQSYGFQPTNGVGYQPYRVVVLSFELLHAPATVCGPKKSTNLVKNKCVNFNFNGLTGTGVLTESNKKFLPFQQFGRDIADTTDAVRDPQTLEILDITPCSFGGVSVITPGTNTSNQVAVLYQGVNCTEVPVAIHADQLTPTWRVYSTGSNVFQTRAGCLIGAEHVNNSYECDIPIGAGICASYQTQTNSPRRARSVASQSIIAYTMSLGAENSVAYSNNSIAIPTNFTISVTTEILPVSMTKTSVDCTMYICGDSTECSNLLLQYGSFCTQLNRALTGIAVEQDKNTQEVFAQVKQIYKTPPIKDFGGFNFSQILPDPSKPSKRSFIEDLLFNKVTLADAGFIKQYGDCLGDIAARDLICAQKFNGLTVLPPLLTDEMIAQYTSALLAGTITSGWTFGAGAALQIPFAMQMAYRFNGIGVTQNVLYENQKLIANQFNSAIGKIQDSLSSTASALGKLQDVVNQNAQALNTLVKQLSSNFGAISSVLNDILSRLDPPEAEVQIDRLITGRLQSLQTYVTQQLIRAAEIRASANLAATKMSECVLGQSKRVDFCGKGYHLMSFPQSAPHGVVFLHVTYVPAQEKNFTTAPAICHDGKAHFPREGVFVSNGTHWFVTQRNFYEPQIITTDNTFVSGNCDVVIGIVNNTVYDPLQPELDS

SEQ ID NO: 2719 - protein, 1147 aa, Artificial Sequence
  SARS-CoV-2/Netherlands/ZuidHolland_2/2020__EPI_ISL_414556 spike protein (1-1147)(K986P_V987P)
MFVFLVLLPLVSSQCVNLTTRTQLPPAYTNSFTRGVYYPDKVFRSSVLHSTQDLFLPFFSNVTWFHAIHVSGTNGTKRFDNPVLPFNDGVYFASTEKSNIIRGWIFGTTLDSKTQSLLIVNNATNVVIKVCEFQFCNDPFLGVYYHKNNKSWMESEFRVYSSANNCTFEYVSQPFLMDLEGKQGNFKNLREFVFKNIDGYFKIYSKHTPINLVRDLPQGFSALEPLVDLPIGINITRFQTLLALHRSYLTPGDSSSGWTAGAAAYYVGYLQPRTFLLKYNENGTITDAVDCALDPLSETKCTLKSFTVEKGIYQTSNFRVQPTESIVRFPNITNLCPFGEVFNATRFASVYAWNRKRISNCVADYSVLYNSASFSTFKCYGVSPTKLNDLCFTNVYADSFVIRGDEVRQIAPGQTGKIADYNYKLPDDFTGCVIAWNSNNLDSKVGGNYNYLYRLFRKSNLKPFERDISTEIYQAGSTPCNGVEGFNCYFPLQSYGFQPTNGVGYQPYRVVVLSFELLHAPATVCGPKKSTNLVKNKCVNFNFNGLTGTGVLTESNKKFLPFQQFGRDIADTTDAVRDPQTLEILDITPCSFGGVSVITPGTNTSNQVAVLYQGVNCTEVPVAIHADQLTPTWRVYSTGSNVFQTRAGCLIGAEHVNNSYECDIPIGAGICASYQTQTNSPRRARSVASQSIIAYTMSLGAENSVAYSNNSIAIPTNFTISVTTEILPVSMTKTSVDCTMYICGDSTECSNLLLQYGSFCTQLNRALTGIALEQDKNTQEVFAQVKQIYKTPPIKDFGGFNFSQILPDPSKPSKRSFIEDLLFNKVTLADAGFIKQYGDCLGDIAARDLICAQKFNGLTVLPPLLTDEMIAQYTSALLAGTITSGWTFGAGAALQIPFAMQMAYRFNGIGVTQNVLYENQKLIANQFNSAIGKIQDSLSSTASALGKLQDVVNQNAQALNTLVKQLSSNFGAISSVLNDILSRLDPPEAEVQIDRLITGRLQSLQTYVTQQLIRAAEIRASANLAATKMSECVLGQSKRVDFCGKGYHLMSFPQSAPHGVVFLHVTYVPAQEKNFTTAPAICHDGKAHFPREGVFVSNGTHWFVTQRNFYEPQIITTDNTFVSGNCDVVIGIVNNTVYDPLQPELDS

SEQ ID NO: 2720 - protein, 1147 aa, Artificial Sequence
  SARS-CoV-2/USA/WA-UW31/2020__EPI_ISL_414618 spike protein (1-1147)(K986P_V987P)
MFVFLVLLPLVSSQCVNLTTRTQLPPAYTNSFTRGVYYPDKVFRSSVLHSTQDLFLPFFSNVTWFHAIHVSGTNGTKRFDNPVLPFNDGVYFASTEKSNIIRGWIFGTTLDSKTQSLLIVNNATNVVIKVCEFQFCNDPFLGVYYHKNNKSWMESEFRVYSSANNCTFEYVSQPFLMDLEGKQGNFKNLREFVFKNIDGYFKIYSKHTPINLVRDLPQGFSALEPLVDLPIGINITRFQTLLALHRSYLTPGDSSSGWTAGAAAYYVGYLQPRTFLLKYNENGTITDAVDCALDPLSETKCTLKSFTVEKGIYQTSNFRVQPTESIVRFPNITNLCPFGEVFNATRFASVYAWNRKRISNCVADYSVLYNSASFSTFKCYGVSPTKLNDLCFTNVYADSFVIRGDEVRQIAPGQTGKIADYNYKLPDDFTGCVIAWNSNNLDSKVGGNYNYLYRLFRKSNLKPFERDISTEIYQAGSTPCNGAEGFNCYFPLQSYGFQPTNGVGYQPYRVVVLSFELLHAPATVCGPKKSTNLVKNKCVNFNFNGLTGTGVLTESNKKFLPFQQFGRDIADTTDAVRDPQTLEILDITPCSFGGVSVITPGTNTSNQVAVLYQDVNCTEVPVAIHADQLTPTWRVYSTGSNVFQTRAGCLIGAEHVNNSYECDIPIGAGICASYQTQTNSPRRARSVASQSIIAYTMSLGAENSVAYSNNSIAIPTNFTISVTTEILPVSMTKTSVDCTMYICGDSTECSNLLLQYGSFCTQLNRALTGIAVEQDKNTQEVFAQVKQIYKTPPIKDFGGFNFSQILPDPSKPSKRSFIEDLLFNKVTLADAGFIKQYGDCLGDIAARDLICAQKFNGLTVLPPLLTDEMIAQYTSALLAGTITSGWTFGAGAALQIPFAMQMAYRFNGIGVTQNVLYENQKLIANQFNSAIGKIQDSLSSTASALGKLQDVVNQNAQALNTLVKQLSSNFGAISSVLNDILSRLDPPEAEVQIDRLITGRLQSLQTYVTQQLIRAAEIRASANLAATKMSECVLGQSKRVDFCGKGYHLMSFPQSAPHGVVFLHVTYVPAQEKNFTTAPAICHDGKAHFPREGVFVSNGTHWFVTQRNFYEPQIITTDNTFVSGNCDVVIGIVNNTVYDPLQPELDS

SEQ ID NO: 2721 - protein, 1147 aa, Artificial Sequence
  SARS-CoV-2/South Korea/SNU01/2020__EPI_ISL_411929 spike protein (1-1147)(K986P_V987P)
MFVFLVLLPLVSSQCVNLTTRTQLPPAYTNSFTRGVYYPDKVFRSSVLHSTQDLFLPFFSNVTWFHAIHVSGTNGTKRFDNPVLPFNDGVYFASTEKSNIIRGWIFGTTLDSKTQSLLIVNNATNVVIKVCEFQFCNDPFLGVYYHKNNKSWMESEFRVYSSANNCTFEYVSQPFLMDLEGKQGNFKNLREFVFKNIDGYFKIYSKHTPINLVRDLPQGFWALEPLVDLPIGINITRFQTLLALHRSYLTPGDSSSGWTAGAAAYYVGYLQPRTFLLKYNENGTITDAVDCALDPLSETKCTLKSFTVEKGIYQTSNFRVQPTESIVRFPNITNLCPFGEVFNATRFASVYAWNRKRISNCVADYSVLYNSASFSTFKCYGVSPTKLNDLCFTNVYADSFVIRGDEVRQIAPGQTGKIADYNYKLPDDFTGCVIAWNSNNLDSKVGGNYNYLYRLFRKSNLKPFERDISTEIYQAGSTPCNGVEGFNCYFPLQSYGFQPTNGVGYQPYRVVVLSFELLHAPATVCGPKKSTNLVKNKCVNFNFNGLTGTGVLTESNKKFLPFQQFGRDIADTTDAVRDPQTLEILDITPCSFGGVSVITPGTNTSNQVAVLYQDVNCTEVPVAIHADQLTPTWRVYSTGSNVFQTRAGCLIGAEHVNNSYECDIPIGAGICASYQTQTNSPRRARSVASQSIIAYTMSLGAENSVAYSNNSIAIPTNFTISVTTEILPVSMTKTSVDCTMYICGDSTECSNLLLQYGSFCTQLNRALTGIAVEQDKNTQEVFAQVKQIYKTPPIKDFGGFNFSQILPDPSKPSKRSFIEDLLFNKVTLADAGFIKQYGDCLGDIAARDLICAQKFNGLTVLPPLLTDEMIAQYTSALLAGTITSGWTFGAGAALQIPFAMQMAYRFNGIGVTQNVLYENQKLIANQFNSAIGKIQDSLSSTASALGKLQDVVNQNAQALNTLVKQLSSNFGAISSVLNDILSRLDPPEAEVQIDRLITGRLQSLQTYVTQQLIRAAEIRASANLAATKMSECVLGQSKRVDFCGKGYHLMSFPQSAPHGVVFLHVTYVPAQEKNFTTAPAICHDGKAHFPREGVFVSNGTHWFVTQRNFYEPQIITTDNTFVSGNCDVVIGIVNNTVYDPLQPELDS

SEQ ID NO: 2722 - protein, 1147 aa, Artificial Sequence
  SARS-CoV-2/China/WF0004/2020__EPI_ISL_413694 spike protein (1-1147)(K986P_V987P)
MFVFLVLLPLVSSQCVNLTTRTQLPPAYTNSFTRGVYYPDKVFRSSVLHSTQDLFLPFFSNVTWFHAIHVSGTNGTKRFDNPVLPFNDGVYFASTEKSNIIRGWIFGTTLDSKTQSLLIVNNATNVVIKVCEFQFCNDPFLGVYYHKNNKSWTESEFRVYSSANNCTFEYVSQPFLMDLEGKQGNFKNLREFVFKNIDGYFKIYSKHTPINLVRDLPQGFSALEPLVDLPIGINITRFQTLLALHRSYLTPGDSSSGWTAGAAAYYVGYLQPRTFLLKYNENGTITDAVDCALDPLSETKCTLKSFTVEKGIYQTSNFRVQPTESIVRFPNITNLCPFGEVFNATRFASVYAWNRKRISNCVADYSVLYNSASFSTFKCYGVSPTKLNDLCFTNVYADSFVIRGDEVRQIAPGQTGKIADYNYKLPDDFTGCVIAWNSNNLDSKVGGNYNYLYRLFRKSNLKPFERDISTEIYQAGSTPCNGVEGFNCYFPLQSYGFQPTNGVGYQPYRVVVLSFELLHAPATVCGPKKSTNLVKNKCVNFNFNGLTGTGVLTESNKKFLPFQQFGRDIADTTDAVRDPQTLEILDITPCSFGGVSVITPGTNTSNQVAVLYQDVNCTEVPVAIHADQLTPTWRVYSTGSNVFQTRAGCLIGAEHVNNSYECDIPIGAGICASYQTQTNSPRRARSVASQSIIAYTMSLGAENSVAYSNNSIAIPTNFTISVTTEILPVSMTKTSVDCTMYICGDSTECSNLLLQYGSFCTQLNRALTGIAVEQDKNTQEVFAQVKQIYKTPPIKDFGGFNFSQILPDPSKPSKRSFIEDLLFNKVTLADAGFIKQYGDCLGDIAARDLICAQKFNGLTVLPPLLTDEMIAQYTSALLAGTITSGWTFGAGAALQIPFAMQMAYRFNGIGVTQNVLYENQKLIANQFNSAIGKIQDSLSSTASALGKLQDVVNQNAQALNTLVKQLSSNFGAISSVLNDILSRLDPPEAEVQIDRLITGRLQSLQTYVTQQLIRAAEIRASANLAATKMSECVLGQSKRFDFCGKGYHLMSFPQSAPHGVVFLHVTYVPAQEKNFTTAPAICHDGKAHFPREGVFVSNGTHWFVTQRNFYEPQIITTDNTFVSGNCDVVIGIVNNTVYDPLQPELDS

SEQ ID NO: 2723 - protein, 1147 aa, Artificial Sequence
  SARS-CoV-2/China/WF0028/2020__EPI_ISL_413791 spike protein (1-1147)(K986P_V987P)
MFVFLVLLPLVSSQCVNLTTRTQLPPAYTNSFTRGVYYPDKVFRSSVLHSTQDLFLPFFSNVTWFHAIHVSGTNGTKRFDNPVLPFNDGVYFASTEKSNIIRGWIFGTTLDSKTQSLLIVNNATNVVIKVCEFQFCNDPFLGVYYHKNNKSWMESEFRVYSSANNCTFEYVSQPFLMDLEGKQGNFKNLREFVFKNIDGYFKIYSKHTPINLVRDLPQGFSALEPLVDLPIGINITRFQTLLALHRSYLTPGDSSSGWTAGAAAYYVGYLQPRTFLLKYNENGTITDAVDCALDPLSETKCTLKSFTVEKGIYQTSNFRVQPTESIVRFPNITNLCPFGEVFNATRFASVYAWNRKRISNCVADYSVLYNSASFSTFKCYGVSPTKLNDLCFTNVYADSFVIRGDEVRQIAPGQTGKIADYNYKLPDDFTGCVIAWNSNNLDSKVGGNYNYLYRLFRKSNLKPFERDISTEIYQAGSTPCNGVEGFNCYFPLQSYGFQPTNGVGYQPYRVVVLSFELLHAPATVCGPKKSTNLVKNKCVNFNFNGLTGTGVLTESNKKFLPFQQFGRDIADTTDAVRDPQTLEILDITPCSFGGVSVITPGTNTSNQVAVLYQDVNCTEVPVAIHADQLTPTWRVYSTGSNVFQTRAGCLIGAEHVNNSYECDIPIGAGICASYQTQTNSPRRARSVASQSIIAYTMSLGAENSVAYSNNSIAIPTNFTISVTTEILPVSMTKTSVDCTMYICGDSTECSNLLLQYGSFCTQLNRALTGIAVEQDKNTQEVFAQVKQIYKTPPIKDFGGFNFSQILPDPSKPSKRSFIEDLLFNKVTLADAGFIKQYGDCLGDIAARDLICAQKFNGLTVLPPLLTDEMIAQYTSALLAGTITSGWTFGAGAALQIPFAMQMAYRFNGIGVTQNVLYENQKLIANQFNSAIGKIQDSLSSTASALGKLQDVVNQNAQALNTLVKQLSSNFGAISSVLNDILSRLDPPEAEVQIDRLITGRLQSLQTYVTQQLIRAAEIRASANLAATKMSECVLGQSKRVDFCGKGYHLMSFPQSAPHGVVFLHVTYVPAQEKNFTTAPAICHDGKAHFPREGVFVSNGTHWFVTQRNFYEPQIITTDNTFVSGNCDVVIGIVNNTVYDPLQPELES

SEQ ID NO: 2724 - protein, 1147 aa, Artificial Sequence
  SARS-CoV-2/2019-nCoV/USA-CruiseA-18/2020__MT159716.1 spike protein (1-1147)(K986P_V987P)
MFVFLVLLPLVSSQCVNLTTRTQLPPAYTNSFTRGVYYPDKVFRSSVLHSTQDLFLPFFSNVTWFHAIHVSGTNGTKRFDNPVLPFNDGVYFASTEKSNIIRGWIFGTTLDSKTQSLLIVNNATNVVIKVCEFQFCNDPFLGVYYHKNNKSWMESELRVYSSANNCTFEYVSQPFLMDLEGKQGNFKNLREFVFKNIDGYFKIYSKHTPINLVRDLPQGFSALEPLVDLPIGINITRFQTLLALHRSYLTPGDSSSGWTAGAAAYYVGYLQPRTFLLKYNENGTITDAVDCALDPLSETKCTLKSFTVEKGIYQTSNFRVQPTESIVRFPNITNLCPFGEVFNATRFASVYAWNRKRISNCVADYSVLYNSASFSTFKCYGVSPTKLNDLCFTNVYADSFVIRGDEVRQIAPGQTGKIADYNYKLPDDFTGCVIAWNSNNLDSKVGGNYNYLYRLFRKSNLKPFERDISTEIYQAGSTPCNGVEGFNCYFPLQSYGFQPTNGVGYQPYRVVVLSFELLHAPATVCGPKKSTNLVKNKCVNFNFNGLTGTGVLTESNKKFLPFQQFGRDIADTTDAVRDPQTLEILDITPCSFGGVSVITPGTNTSNQVAVLYQDVNCTEVPVAIHADQLTPTWRVYSTGSNVFQTRAGCLIGAEHVNNSYECDIPIGAGICASYQTQTNSPRRARSVASQSIIAYTMSLGAENSVAYSNNSIAIPTNFTISVTTEILPVSMTKTSVDCTMYICGDSTECSNLLLQYGSFCTQLNRALTGIAVEQDKNTQEVFAQVKQIYKTPPIKDFGGFNFSQILPDPSKPSKRSFIEDLLFNKVTLADAGFIKQYGDCLGDIAARDLICAQKFNGLTVLPPLLTDEMIAQYTSALLAGTITSGWTFGAGAALQIPFAMQMAYRFNGIGVTQNVLYENQKLIANQFNSAIGKIQDSLSSTASALGKLQDVVNQNAQALNTLVKQLSSNFGAISSVLNDILSRLDPPEAEVQIDRLITGRLQSLQTYVTQQLIRAAEIRASANLAATKMSECVLGQSKRVDFCGKGYHLMSFPQSAPHGVVFLHVTYVPAQEKNFTTAPAICHDGKAHFPREGVFVSNGTHWFVTQRNFYEPQIITTDNTFVSGNCDVVIGIVNNTVYDPLQPELDS

SEQ ID NO: 2725 - protein, 1147 aa, Artificial Sequence
  SARS-CoV-2/SARS-CoV-2/Yunnan-01/human/2020/CHN__MT049951.1 spike protein (1-1147)(K986P_V987P)
MFVFLVLLPLVSSQCVNLTTRTQLPPANTNSFTRGVYYPDKVFRSSVLHSTQDLFLPFFSNVTWFHAIHVSGTNGTKRFDNPVLPFNDGVYFASTEKSNIIRGWIFGTTLDSKTQSLLIVNNATNVVIKVCEFQFCNDPFLGVYYHKNNKSWMESEFRVYSSANNCTFEYVSQPFLMDLEGKQGNFKNLREFVFKNIDGYFKIYSKHTPINLVRDLPQGFSALEPLVDLPIGINITRFQTLLALHRSYLTPGDSSSGWTAGAAAYYVGYLQPRTFLLKYNENGTITDAVDCALDPLSETKCTLKSFTVEKGIYQTSNFRVQPTESIVRFPNITNLCPFGEVFNATRFASVYAWNRKRISNCVADYSVLYNSASFSTFKCYGVSPTKLNDLCFTNVYADSFVIRGDEVRQIAPGQTGKIADYNYKLPDDFTGCVIAWNSNNLDSKVGGNYNYLYRLFRKSNLKPFERDISTEIYQAGSTPCNGVEGFNCYFPLQSYGFQPTNGVGYQPYRVVVLSFELLHAPATVCGPKKSTNLVKNKCVNFNFNGLTGTGVLTESNKKFLPFQQFGRDIADTTDAVRDPQTLEILDITPCSFGGVSVITPGTNTSNQVAVLYQDVNCTEVPVAIHADQLTPTWRVYSTGSNVFQTRAGCLIGAEHVNNSYECDIPIGAGICASYQTQTNSPRRARSVASQSIIAYTMSLGAENSVAYSNNSIAIPTNFTISVTTEILPVSMTKTSVDCTMYICGDSTECSNLLLQYGSFCTQLNRALTGIAVEQDKNTQEVFAQVKQIYKTPPIKDFGGFNFSQILPDPSKPSKRSFIEDLLFNKVTLADAGFIKQYGDCLGDIAARDLICAQKFNGLTVLPPLLTDEMIAQYTSALLAGTITSGWTFGAGAALQIPFAMQMAYRFNGIGVTQNVLYENQKLIANQFNSAIGKIQDSLSSTASALGKLQDVVNQNAQALNTLVKQLSSNFGAISSVLNDILSRLDPPEAEVQIDRLITGRLQSLQTYVTQQLIRAAEIRASANLAATKMSECVLGQSKRVDFCGKGYHLMSFPQSAPHGVVFLHVTYVPAQEKNFTTAPAICHDGKAHFPREGVFVSNGTHWFVTQRNFYEPQIITTDNTFVSGNCDVVIGIVNNTVYDPLQPELDS

SEQ ID NO: 2726 - protein, 1147 aa, Artificial Sequence
  SARS-CoV-2/USA/WA-UW292/2020__EPI_ISL_418077 spike protein (1-1147)(K986P_V987P)
MFVFLVLLPLVSSQCVNLTTRTQLPPAYTNSFTRGVYYPDKVFRSSVLHSTQDLFLPFFSNVTWFHAIHVSGTNGTKRFDNPVLPFNDGVYFASTEKSNIIRGWIFGTTLDSKTQSLLIVNNATNVVIKVCEFQFCNDPFLGVYYHKNNKSWMESEFRVYSSANNCTFEYVSQPFLMDLEGKQGNFKNLREFVFKNIDGYFKIYSKHTPINLVRDLPQGFSALEPLVDLPIGINITRFQTLLALHRSYLTPGDSSSGWTAGAAAYYVGYLQPRTFLLKYNENGTITDAVDCALDPLSETKCTLKSFTVEKGIYQTSNFRVQPTESIVRFPNITNLCPFGEVFNATRFASVYAWNRKRISNCVADYSVLYNSASFSTFKCYGVSPTKLNDLCFTNVYADSFVIRGDEVRQIAPGQTGKIADYNYKLPDDFTGCVIAWNSNNLDSKVGGNYNYLYRLFRKSNLKPFERDISTEIYQASSTPCNGVEGFNCYFPLQSYGFQPTNGVGYQPYRVVVLSFELLHAPATVCGPKKSTNLVKNKCVNFNFNGLTGTGVLTESNKKFLPFQQFGRDIADTTDAVRDPQTLEILDITPCSFGGVSVITPGTNTSNQVAVLYQDVNCTEVPVAIHADQLTPTWRVYSTGSNVFQTRAGCLIGAEHVNNSYECDIPIGAGICASYQTQTNSPRRARSVASQSIIAYTMSLGAENSVAYSNNSIAIPTNFTISVTTEILPVSMTKTSVDCTMYICGDSTECSNLLLQYGSFCTQLNRALTGIAVEQDKNTQEVFAQVKQIYKTPPIKDFGGFNFSQILPDPSKPSKRSFIEDLLFNKVTLADAGFIKQYGDCLGDIAARDLICAQKFNGLTVLPPLLTDEMIAQYTSALLAGTITSGWTFGAGAALQIPFAMQMAYRFNGIGVTQNVLYENQKLIANQFNSAIGKIQDSLSSTASALGKLQDVVNQNAQALNTLVKQLSSNFGAISSVLNDILSRLDPPEAEVQIDRLITGRLQSLQTYVTQQLIRAAEIRASANLAATKMSECVLGQSKRVDFCGKGYHLMSFPQSAPHGVVFLHVTYVPAQEKNFTTAPAICHDGKAHFPREGVFVSNGTHWFVTQRNFYEPQIITTDNTFVSGNCDVVIGIVNNTVYDPLQPELDS

SEQ ID NO: 2727 - protein, 1147 aa, Artificial Sequence
  SARS-CoV-2/Iceland/192/2020__EPI_ISL_417819 spike protein (1-1147)(K986P_V987P)
MFVFFVLLPLVSSQCVNLTTRTQLPPAYTNSFTRGVYYPDKVFRSSVLHSTQDLFLPFFSNVTWFHAIHVSGTNGTKRFDNPVLPFNDGVYFASTEKSNIIRGWIFGTTLDSKTQSLLIVNNATNVVIKVCEFQFCNDPFLGVYYHKNNKSWMESEFRVYSSANNCTFEYVSQPFLMDLEGKQGNFKNLREFVFKNIDGYFKIYSKHTPINLVRDLPQGFSALEPLVDLPIGINITRFQTLLALHRSYLTPGDSSSGWTAGAAAYYVGYLQPRTFLLKYNENGTITDAVDCALDPLSETKCTLKSFTVEKGIYQTSNFRVQPTESIVRFPNITNLCPFGEVFNATRFASVYAWNRKRISNCVADYSVLYNSASFSTFKCYGVSPTKLNDLCFTNVYADSFVIRGDEVRQIAPGQTGKIADYNYKLPDDFTGCVIAWNSNNLDSKVGGNYNYLYRLFRKSNLKPFERDISTEIYQAGSTPCNGVEGFNCYFPLQSYGFQPTNGVGYQPYRVVVLSFELLHAPATVCGPKKSTNLVKNKCVNFNFNGLTGTGVLTESNKKFLPFQQFGRDIADTTDAVRDPQTLEILDITPCSFGGVSVITPGTNTSNQVAVLYQGVNCTEVPVAIHADQLTPTWRVYSTGSNVFQTRAGCLIGAEHVNNSYECDIPIGAGICASYQTQTNSPRRARSVASQSIIAYTMSLGAENSVAYSNNSIAIPTNFTISVTTEILPVSMTKTSVDCTMYICGDSTECSNLLLQYGSFCTQLNRALTGIAVEQDKNTQEVFAQVKQIYKTPPIKDFGGFNFSQILPDPSKPSKRSFIEDLLFNKVTLADAGFIKQYGDCLGDIAARDLICAQKFNGLTVLPPLLTDEMIAQYTSALLAGTITSGWTFGAGAALQIPFAMQMAYRFNGIGVTQNVLYENQKLIANQFNSAIGKIQDSLSSTASALGKLQDVVNQNAQALNTLVKQLSSNFGAISSVLNDILSRLDPPEAEVQIDRLITGRLQSLQTYVTQQLIRAAEIRASANLAATKMSECVLGQSKRVDFCGKGYHLMSFPQSAPHGVVFLHVTYVPAQEKNFTTAPAICHDGKAHFPREGVFVSNGTHWFVTQRNFYEPQIITTDNTFVSGNCDVVIGIVNNTVYDPLQPELDS

SEQ ID NO: 2728 - protein, 1147 aa, Artificial Sequence
  SARS-CoV-2/Belgium/ULG-6939/2020__EPI_ISL_417020 spike protein (1-1147)(K986P_V987P)
MFVFLVLLPLVSSQCVNLTTRTQLPPAYTNSFTRGVYYPDKVFRSSVLHSTQDLFLPFFSNVTWFHAIHVSGTNGTKRFDNPVLPFNDGVYFASTEKSNIIRGWIFGTTLDSKTQSLLIVNNATNVVIKVCEFQFCNDPFLGVYYHKNNKSWMESEFRVYSSANNCTFEYVSQPFLMDLEGKQGNFKNLREFVFKNIDGYFKIYSKHTPINLVRDLPQGFSALEPLVDLPIGINITRFQTLLALHRSYLTPGDSSSGWTAGAAAYYVGYLQPRTFLLKYNENGTITDAVDCALDPLSETKCTLKSFTVEKGIYQTSNFRVQPTESIVRFPNITNLCPFGEVFNATRFASVYAWNRKRISNCVADYSVLYNSASFSTFKCYGVSPTKLNDLCFTNVYADSFVIRGDEVRQIAPGQTGKIADYNYKLPDDFTGCVIAWNSNNLDSKVGGNYNYLYRLFRKSNLKPFERDISTEIYQAGSTPCNGVEGFNCYFPLQSYGFQPTNGVGYQPYRVVVLSFELLHAPATVCGPKKSTNLVKNKCVNFNFNGLTGTGVLTESNKKFLPFQQFGRDIADTTDAVRDPQTLEILDITPCSFGGVSVITPGTNTSNQVAVLYQGVNCTEVPVAIHADQLTPTWRVYSTGSNVFQTRAGCLIGAEHVNNSYECDIPIGAGICASYQTQTNSPRRARSVASQSIIAYTMSLGAENSVVYSNNSIAIPTNFTISVTTEILPVSMTKTSVDCTMYICGDSTECSNLLLQYGSFCTQLNRALTGIAVEQDKNTQEVFAQVKQIYKTPPIKDFGGFNFSQILPDPSKPSKRSFIEDLLFNKVTLADAGFIKQYGDCLGDIAARDLICAQKFNGLTVLPPLLTDEMIAQYTSALLAGTITSGWTFGAGAALQIPFAMQMAYRFNGIGVTQNVLYENQKLIANQFNSAIGKIQDSLSSTASALGKLQDVVNQNAQALNTLVKQLSSNFGAISSVLNDILSRLDPPEAEVQIDRLITGRLQSLQTYVTQQLIRAAEIRASANLAATKMSECVLGQSKRVDFCGKGYHLMSFPQSAPHGVVFLHVTYVPAQEKNFTTAPAICHDGKAHFPREGVFVSNGTHWFVTQRNFYEPQIITTDNTFVSGNCDVVIGIVNNTVYDPLQPELDS

SEQ ID NO: 2729 - protein, 1147 aa, Artificial Sequence
  SARS-CoV-2/France/HF2496/2020__EPI_ISL_418231 spike protein (1-1147)(K986P_V987P)
MFVFLVLLPLVSSQCVNLTTRTQLPPAYTNSFTRGVYYPDKVFRSSVLHSTQDLFLPFFSNVTWFHAIHVSGTNGTKRFDNPVLPFNDGVYFASTEKSNIIRGWIFGTTLDSKTQSLLIVNNATNVVIKVCEFQFCNDPFLGVYYHKNNKSWMESEFRVYSSANNCTFEYVSQPFLMDLEGKQGNFKNLREFVFKNIDGYFKIYSKHTPINLVRDLPQGFSALEPLVDLPIGINITRFQTLLALHRSYLTPGDSSSGWTAGAAAYYVGYLQPRTFLLKYNENGTITDAVDCALDPLSETKCTLKSFTVEKGIYQTSNFRVQPTESIVRFPNITNLCPFGEVFNATRFASVYAWNRKRISNCVADYSVLYNSASFSTFKCYGVSPTKLNDLCFTNVYADSFVIRGDEVRQIAPGQTGKIADYNYKLPDDFTGCVIAWNSNNLDSKVGGNYNYLYRLFRKSNLKPFERDISTEIYQAGSTPCNGVEGFNCYFPLQSYGFQPTNGVGYQPYRVVVLSFELLHAPATVCGPKKSTNLVKNKCVNFNFNGLTGTGVLTESNKKFLPFQQFGRDIADTTDAVRDPQTLEILDITPCSFGGVSVITPGTNTSNQVAVLYQGVNCTEVPVAIHADQLTPTWRVYSTGSNVFQTRAGCLIGAEHVNNSYECDIPIGAGICASYQTQTNSPRRARSVASQSIIAYTMSLGAENSVAYSNNSIAIPTNFTISVTTEILPVSMTKTSVDCTMYICGDSTECSNLLLQYGSFCTQLNRALTGIAVEQDKNTQEVFAQVKQIYKTPPIKDFGGFNFSQILPDPSKPSKRSFIEDLLFNKVTLADAGFIKQYGDCLGDIVARDLICAQKFNGLTVLPPLLTDEMIAQYTSALLAGTITSGWTFGAGAALQIPFAMQMAYRFNGIGVTQNVLYENQKLIANQFNSAIGKIQDSLSSTASALGKLQDVVNQNAQALNTLVKQLSSNFGAISSVLNDILSRLDPPEAEVQIDRLITGRLQSLQTYVTQQLIRAAEIRASANLAATKMSECVLGQSKRVDFCGKGYHLMSFPQSAPHGVVFLHVTYVPAQEKNFTTAPAICHDGKAHFPREGVFVSNGTHWFVTQRNFYEPQIITTDNTFVSGNCDVVIGIVNNTVYDPLQPELDS

SEQ ID NO: 2730 - protein, 1147 aa, Artificial Sequence
  SARS-CoV-2/USA/WA-UW291/2020__EPI_ISL_418076 spike protein (1-1147)(K986P_V987P)
MFVFLVLLPLVSSQCVNLTTRTQLPPAYTNSFTRGVYYPDKVFRSSVLHSTQDLFLPFFSNVTWFHAIHVSGTNGTKRFDNPVLPFNDGVYFASTEKSNIIRGWIFGTTLDSKTQSLLIVNNATNVVIKVCEFQFCNDPFLGVYYHKNNKSWMESEFRVYSSANNCTFEYVSQPFLMDLEGKQGNFKNLREFVFKNIDGYFKIYSKHTPINLVRDLPQGFSALEPLVDLPIGINITRFQTLLALHRSYLTPGDSSSGWTAGAAAYYVGYLQPRTFLLKYNENGTITDAVDCALDPLSETKCTLKSFTVEKGIYQTSNFRVQPTESIVRFPNITNLCPFGEVFNATRFASVYAWNRKRISNCVADYSVLYNSASFSTFKCYGVSPTKLNDLCFTNVYADSFVIRGDEVRQIAPGQTGKIADYNYKLPDDFTGCVIAWNSNNLDSKVGGNYNYLYRLFRKSNLKPFERDISTEIYQAGSTPCNGVEGFNCYFPLQSYGFQPTNGVGYQPYRVVVLSFELLHAPATVCGPKKSTNLVKNKCVNFNFNGLTGTGVLTESNKKFLPFQQFGRDIADTTDAVRDPQTLEILDITPCSFGGVSVITPGTNTSNQVAVLYQGVNCTEVPVAIHADQLTPTWRVYSTGSNVFQTRAGCLIGAEHVNNSYECDIPIGAGICASYQTQTNSPRRARSVASQSIIAYTMSLGAENSVAYSNNSIAIPTNFTISVTTEILPVSMTKTSVDCTMYICGDSTECSNLLLQYGSFCTQLNRALTGIAVEQDKNTQEVFAQVKQIYKTPPIKDFGGFNFSQILPDPSKPSKRSFIEDLLFNKVTLADAGFIKQYGDCLGDIAARDLICAQKFNGLTVLPPLLTDEMIAQYTSALLAGTITSGWTFGAGAALQIPFAMQMAYRFNGIGVTQNVLYENQKLIANQFNSAIGKIQYSLSSTASALGKLQDVVNQNAQALNTLVKQLSSNFGAISSVLNDILSRLDPPEAEVQIDRLITGRLQSLQTYVTQQLIRAAEIRASANLAATKMSECVLGQSKRVDFCGKGYHLMSFPQSAPHGVVFLHVTYVPAQEKNFTTAPAICHDGKAHFPREGVFVSNGTHWFVTQRNFYEPQIITTDNTFVSGNCDVVIGIVNNTVYDPLQPELDS

SEQ ID NO: 2731 - protein, 1147 aa, Artificial Sequence; identical to SEQ ID NO: 2694
  SARS-CoV-2/Portugal/PT0034/2020__EPI_ISL_418019 spike protein (1-1147)(K986P_V987P)

SEQ ID NO: 2732 - protein, 1147 aa, Artificial Sequence; identical to SEQ ID NO: 2686
  SARS-CoV-2/Iceland/202/2020__EPI_ISL_417750 spike protein (1-1147)(K986P_V987P)

SEQ ID NO: 2733 - protein, 1147 aa, Artificial Sequence
  SARS-CoV-2/USA/WA-UW261/2020__EPI_ISL_418046 spike protein (1-1147)(K986P_V987P)
MFVFLVLLPLVSSQCVNLTTRTQLPPAYTNSFTRGVYYPDKVFRSSVLHSTQDLFLPFFSNVTWFHAIHVSGTNGTKRFDNPVLPFNDGVYFASTEKSNIIRGWIFGTTLDSKTQSLLIVNNATNVVIKVCEFQFCNDPFLGVYYHKNNKSWMESEFRVYSSANNCTFEYVSQPFLMDLEGKQGNFKNLREFVFKNIDGYFKIYSKHTPINLVRDLPQGFSALEPLVDLPIGINITRFQTLLALHRSYLTPGDSSSGWTAGAAAYYVGYLQPRTFLLKYNENGTITDAVDCALDPLSETKCTLKSFTVEKGIYQTSNFRVQPTESIVRFPNITNLCPFGEVFNATRFTSVYAWNRKRISNCVADYSVLYNSASFSTFKCYGVSPTKLNDLCFTNVYADSFVIRGDEVRQIAPGQTGKIADYNYKLPDDFTGCVIAWNSNNLDSKVGGNYNYLYRLFRKSNLKPFERDISTEIYQAGSTPCNGVEGFNCYFPLQSYGFQPTNGVGYQPYRVVVLSFELLHAPATVCGPKKSTNLVKNKCVNFNFNGLTGTGVLTESNKKFLPFQQFGRDIADTTDAVRDPQTLEILDITPCSFGGVSVITPGTNTSNQVAVLYQDVNCTEVPVAIHADQLTPTWRVYSTGSNVFQTRAGCLIGAEHVNNSYECDIPIGAGICASYQTQTNSPRRARSVASQSIIAYTMSLGAENSVAYSNNSIAIPTNFTISVTTEILPVSMTKTSVDCTMYICGDSTECSNLLLQYGSFCTQLNRALTGIAVEQDKNTQEVFAQVKQIYKTPPIKDFGGFNFSQILPDPSKPSKRSFIEDLLFNKVTLADAGFIKQYGDCLGDIAARDLICAQKFNGLTVLPPLLTDEMIAQYTSALLAGTITSGWTFGAGAALQIPFAMQMAYRFNGIGVTQNVLYENQKLIANQFNSAIGKIQDSLSSTASALGKLQDVVNQNAQALNTLVKQLSSNFGAISSVLNDILSRLDPPEAEVQIDRLITGRLQSLQTYVTQQLIRAAEIRASANLAATKMSECVLGQSKRVDFCGKGYHLMSFPQSAPHGVVFLHVTYVPAQEKNFTTAPAICHDGKAHFPREGVFVSNGTHWFVTQRNFYEPQIITTDNTFVSGNCDVVIGIVNNTVYDPLQPELDS

SEQ ID NO: 2734 - protein, 1147 aa, Artificial Sequence
  SARS-CoV-2/Portugal/PT0035/2020__EPI_ISL_418020 spike protein (1-1147)(K986P_V987P)
MFVFLVLLPLVSSQCVNLTTRTQLPPAYTNSFTRGVYYPDKVFRSSVLHSTQDLFLPFFSNVTWFHAIHVSGTNGTKRFDNPVLPFNDGVYFASTEKSNIIRGWIFGTTLDSKTQSLLIVNNATNVVIKVCEFQFCNDPFLGVYYHKNNKSWMESEFRVYSSANNCTFEYVSQPFLMDLEGKQGNFKNLREFVFKNIDGYFKIYSKHTPINLVRDLPQGFSALEPLVDLPIGINITRFQTLLALHRSYLTPGDSSSGWTAGAAAYYVGYLQPRTFLLKYNENGTITDAVDCALDPLSETKCTLKSFTVEKGIYQTSNFRVQPTESIVRFPNITNLCPFGEVFNATRFASVYAWNRKRISNCVADYSVLYNSASFSTFKCYGVSPTKLNDLCFTNVYADSFVIRGDEVRQIAPGQTGKIADYNYKLPDDFTGCVIAWNSNNLDSKVGGNYNYLYRLFRKSNLKPFERDISTEIYQAGSTPCNGVEGFNCYFPLQSYGFQPTNGVGYQPYRVVVLSFELLHAPATVCGPKKSTNLVKNKCVNFNFNGLTGTGVLTESNKKFLPFQQFGRDIADTTDAVRDPQTLEILDITPCSFGGVSVITPGTNTSNQVAVLYQDVNCTEVPVAIHADQLTPTWRVYSTGSNVFQTRAGCLIGAEHVNNSYECDIPIGAGICASYQTQTNSPRRARSVASQSIIAYTMSLGAENSVAYSNNSIAIPTNFTISVTTEILPVSMTKTSVDCTMYICGDSTECSNLLLQYGSFCTQLNRALTGIAVEQDKNTQEVFAQVKQIYKTPPIKDFGGFNFSQILPDPSKPSKRSFIEDLLFNKVTLADAGFIKQYGDCLGDISARDLICAQKFNGLTVLPPLLTDEMIAQYTSALLAGTITSGWTFGAGAALQIPFAMQMAYRFNGIGVTQNVLYENQKLIANQFNSAIGKIQDSLSSTASALGKLQDVVNQNAQALNTLVKQLSSNFGAISSVLNDILSRLDPPEAEVQIDRLITGRLQSLQTYVTQQLIRAAEIRASANLAATKMSECVLGQSKRVDFCGKGYHLMSFPQSAPHGVVFLHVTYVPAQEKNFTTAPAICHDGKAHFPREGVFVSNGTHWFVTQRNFYEPQIITTDNTFVSGNCDVVIGIVNNTVYDPLQPELDS

SEQ ID NO: 2735 - protein, 1147 aa, Artificial Sequence
  SARS-CoV-2/USA/NY-NYUMC7/2020__EPI_ISL_418192 spike protein (1-1147)(K986P_V987P)
MFVFLVLLPLVSSQCVNLTTRTQLPPAYTNSFTRGVYYPDKVFRSSVLHSTQDLFLPFFSNVTWFHAIHVSGTNGTKRFDNPVLPFNDGVYFASTEKSNIIRGWIFGTTLDSKTQSLLIVNNATNVVIKVCEFQFCNDPFLGVYHHKNNKSWMESEFRVYSSANNCTFEYVSQPFLMDLEGKQGNFKNLREFVFKNIDGYFKIYSKHTPINLVRDLPQGFSALEPLVDLPIGINITRFQTLLALHRSYLTPGDSSSGWTAGAAAYYVGYLQPRTFLLKYNENGTITDAVDCALDPLSETKCTLKSFTVEKGIYQTSNFRVQPTESIVRFPNITNLCPFGEVFNATRFASVYAWNRKRISNCVADYSVLYNSASFSTFKCYGVSPTKLNDLCFTNVYADSFVIRGDEVRQIAPGQTGKIADYNYKLPDDFTGCVIAWNSNNLDSKVGGNYNYLYRLFRKSNLKPFERDISTEIYQAGSTPCNGVEGFNCYFPLQSYGFQPTNGVGYQPYRVVVLSFELLHAPATVCGPKKSTNLVKNKCVNFNFNGLTGTGVLTESNKKFLPFQQFGRDIADTTDAVRDPQTLEILDITPCSFGGVSVITPGTNTSNQVAVLYQGVNCTEVPVAIHADQLTPTWRVYSTGSNVFQTRAGCLIGAEHVNNSYECDIPIGAGICASYQTQTNSPRRARSVASQSIIAYTMSLGAENSVAYSNNSIAIPTNFTISVTTEILPVSMTKTSVDCTMYICGDSTECSNLLLQYGSFCTQLNRALTGIAVEQDKNTQEVFAQVKQIYKTPPIKDFGGFNFSQILPDPSKPSKRSFIEDLLFNKVTLADAGFIKQYGDCLGDIAARDLICAQKFNGLTVLPPLLTDEMIAQYTSALLAGTITSGWTFGAGAALQIPFAMQMAYRFNGIGVTQNVLYENQKLIANQFNSAIGKIQDSLSSTASALGKLQDVVNQNAQALNTLVKQLSSNFGAISSVLNDILSRLDPPEAEVQIDRLITGRLQSLQTYVTQQLIRAAEIRASANLAATKMSECVLGQSKRVDFCGKGYHLMSFPQSAPHGVVFLHVTYVPAQEKNFTTAPAICHDGKAHFPREGVFVSNGTHWFVTQRNFYEPQIITTDNTFVSGNCDVVIGIVNNTVYDPLQPELDS

SEQ ID NO: 2736 - protein, 1147 aa, Artificial Sequence
  SARS-CoV-2/Iceland/189/2020__EPI_ISL_417709 spike protein (1-1147)(K986P_V987P)
MFVFLVLLPLVSSQCVNLTTRTQLPPAYTNSFTRGVYYPDKVFRSSVLHSTQDLFLPFFSNVTWFHAIHVSGTNGTKRFDNPVLPFNDGVYFASTEKSNIIRGWIFGTTLDSKTQSLLIVNNATNVVIKVCEFQFCNDPFLGVYYHKNNKSWMESEFRVYSSANNCTFEYVSQPFLMDLEGKQGNFKNLREFVFKNIDGYFKIYSKHTPINLVRDLPQGFSALEPLVDLPIGINITRFQTLLALHRSYLTPGDSSSGWTAGAAAYYVGYLQPRTFLLKYNENGTITDAVDCALDPLSETKCTLKSFTVEKGIYQTSNFRVQPTESIVRFPNITNLCPFGEVFNATRFASVYAWNRKRISNCVADYSVLYNSASFSTFKCYGVSPTKLNDLCFTNVYADSFVIRGDEVRQIAPGQTGKIADYNYKLPDDFTGCVIAWNSNNLDSKVGGNYNYLYRLFRKSNLKPFERDISTEIYQAGSTPCNGVEGFNCYFPLQSYGFQPTNGVGYQPYRVVVLSFELLHAPATVCGPKKSTNLVKNKCVNFNFNGLTGTGVLTESNKKFLPFQQFGRDIADTTDAVRDPQTLEILDITPCSFGGVSVITPGTNTSNQVAVLYQGVNCTEVPVAIHADQLTPTWRVYSTGSNVFQTRAGCLIGAEHVNNSYECDIPIGAGICASYQTQTNSPRRARSVASQSIIAYTMSLGAENSVAYSNNSIAIPTNFTISVTTEILPVSMTKTSVDCTMYICGDSTECSNLLLQYGSFCTQLNRALTGIAVEQDKNTQEVFAQVKQIYKTPPIKDFGGFNFSQILPDPSKPSKRSFIEDLLFNKVTLADAGFTKQYGDCLGDIAARDLICAQKFNGLTVLPPLLTDEMIAQYTSALLAGTITSGWTFGAGAALQIPFAMQMAYRFNGIGVTQNVLYENQKLIANQFNSAIGKIQDSLSSTASALGKLQDVVNQNAQALNTLVKQLSSNFGAISSVLNDILSRLDPPEAEVQIDRLITGRLQSLQTYVTQQLIRAAEIRASANLAATKMSECVLGQSKRVDFCGKGYHLMSFPQSAPHGVVFLHVTYVPAQEKNFTTAPAICHDGKAHFPREGVFVSNGTHWFVTQRNFYEPQIITTDNTFVSGNCDVVIGIVNNTVYDPLQPELDS

SEQ ID NO: 2737 - protein, 1147 aa, Artificial Sequence
  SARS-CoV-2/Australia/NSW56/2020__EPI_ISL_417408 spike protein (1-1147)(K986P_V987P)
MFVFLVLLPLVSSQCVNLTTRTQLPPAYTNSFTRGVYYPDKVFRSSVLHSTQDLFLPFFSNVTWFHAIHVSGTNGTKRFDNPVLPFNDGVYFASTEKSNIIRGWIFGTTLDSKTQSLLIVNNATNVVIKVCEFQFCNDPFLGVYYHKNNKSWMESEFRVYSSANNCTFEYVSQPFLMDLEGKQGNFKNLREFVFKNIDGYFKIYSKHTPINLVRDLPQGFSALEPLVDLPIGINITRFQTLLALHRSYLTPGDSSSGWTAGAAAYYVGYLQPRTFLLKYNENGTITDAVDCALDPLSETKCTLKSFTVEKGIYQTSNFRVQPTESIVRFPNITNLCPFGEVFNATRFASVYAWNRKRISNCVADYSVLYNSASFSTFKCYGVSPTKLNDLCFTNVYADSFVIRGDEVRQIAPGQTGKIADYNYKLPDDFTGCVIAWNSNNLDSKVGGNYNYLYRLFRKSNLKPFERDISTEIYQAGSTPCNGVEGFNCYFPLQSYGFQPTNGVGYQPYRVVVLSFELLHAPATVCGPKKSTNLVKNKCVNFNFNGLTGTGVLTESNKKFLPFQQFGRDIADTTDAVRDPQTLEILDITPCSFGGVSVITPGTNTSNQVAVLYQDVNCTEVPVAIHADQLTPTWRVYSTGSNVFQTRAGCLIGAEHVNNSYECDIPIGAGICASYQTQTNSPRRARSVASQSIIAYTMSLGAENSVAYSNNSIAIPTNFTISVTTEILPVSMTKTSVDCTMYICGDSTECSNLLLQYGSFCTQLNRALTGIAVEQDKNTQEVFAQVKQIYKTPPIKDFGGFNFSQILPDSSKPSKRSFIEDLLFNKVTLADAGFIKQYGDCLGDIAARDLICAQKFNGLTVLPPLLTDEMIAQYTSALLAGTITSGWTFGAGAALQIPFAMQMAYRFNGIGVTQNVLYENQKLIANQFNSAIGKIQDSLSSTASALGKLQDVVNQNAQALNTLVKQLSSNFGAISSVLNDILSRLDPPEAEVQIDRLITGRLQSLQTYVTQQLIRAAEIRASANLAATKMSECVLGQSKRVDFCGKGYHLMSFPQSAPHGVVFLHVTYVPAQEKNFTTAPAICHDGKAHFPREGVFVSNGTHWFVTQRNFYEPQIITTDNTFVSGNCDVVIGIVNNTVYDPLQPELDS

SEQ ID NO: 2738 - protein, 1147 aa, Artificial Sequence
  SARS-CoV-2/Iceland/280/2020__EPI_ISL_417608 spike protein (1-1147)(K986P_V987P)
MFVFLVLLPLVSSQCVNLTTRTQLPPAYTNSFTRGVYYPDKVFRSSVLHSTQDLFLPFFSNVTWFHAIHVSGTNGTKRFDNPVLPFNDGVYFASTEKSNIIRGWIFGTTLDSKTQSLLIVNNATNVVIKVCEFQFCNDPFLGVYYHKNNKSWMESEFRVYSSANNCTFEYVSQPFLMDLEGKQGNFKNLREFVFKNIDGYFKIYSKHTPINLVRDLPQGFSALEPLVDLPIGINITRFQTLLALHRSYLTPGDSSSGWTAGAAAYYVGYLQPRTFLLKYNENGTITDAVDCALDPLSETKCTLKSFTVEKGIYQTSNFRVQPTESIVRFPNITNLCPFGEVFNATRFASVYAWNRKRISNCVADYSVLYNSASFSTFKCYGVSPTKLNDLCFTNVYADSFVIRGDEVRQIAPGQTGKIADYNYKLPDDFTGCVIAWNSNNLDSKVGGNYNYLYRLFRKSNLKPFERDISTEIYQAGSTPCNGVEGFNCYFPLQSYGFQPTNGVGYQPYRVVVLSFELLHAPATVCGPKKSTNLVKNKCVNFNFNGLTGTGVLTESNKKFLPFQQFGRDIADTTDAVRDPQTLEILDITPCSFGGVSVITPGTNTSNQVAVLYQGVNCTEVPVAIHADQLTPTWRVYSTGSNVFQTRAGCLIGAEHVNNSYECDIPIGAGICASYHTQTNSPRRARSVASQSIIAYTMSLGAENSVAYSNNSIAIPTNFTISVTTEILPVSMTKTSVDCTMYICGDSTECSNLLLQYGSFCTQLNRALTGIAVEQDKNTQEVFAQVKQIYKTPPIKDFGGFNFSQILPDPSKPSKRSFIEDLLFNKVTLADAGFIKQYGDCLGDIAARDLICAQKFNGLTVLPPLLTDEMIAQYTSALLAGTITSGWTFGAGAALQIPFAMQMAYRFNGIGVTQNVLYENQKLIANQFNSAIGKIQDSLSSTASALGKLQDVVNQNAQALNTLVKQLSSNFGAISSVLNDILSRLDPPEAEVQIDRLITGRLQSLQTYVTQQLIRAAEIRASANLAATKMSECVLGQSKRVDFCGKGYHLMSFPQSAPHGVVFLHVTYVPAQEKNFTTAPAICHDGKAHFPREGVFVSNGTHWFVTQRNFYEPQIITTDNTFVSGNCDVVIGIVNNTVYDPLQPELDS

SEQ ID NO: 2739 - protein, 1147 aa, Artificial Sequence; identical to SEQ ID NO: 2694
  SARS-CoV-2/Iceland/247/2020__EPI_ISL_417575 spike protein (1-1147)(K986P_V987P)

SEQ ID NO: 2740 - protein, 1147 aa, Artificial Sequence
  SARS-CoV-2/Iceland/238/2020__EPI_ISL_417566 spike protein (1-1147)(K986P_V987P)
MFVFLVLLPLVSSQCVNLTTRTQLPPAYTNSFTRGVYYPDKVFRSSVLHSTQDLFLPFFSNVTWFHAIHVSGTNGTKRFDNPVLPFNDGVYFASTEKSNIIRGWIFGTTLDSKTQSLLIVNNATNVVIKVCEFQFCNDPFLGVYYHKNNKSWMESEFRVYSSANNCTFEYVSQPFLMDLEGKQGNFKNLREFVFKNIDGYFKIYSKHTPINLVRDLPQGFSALEPLVDLPIGINITRFQTLLALHRSYLTPGDSSSGWTAGAAAYYVGYLQPRTFLLKYNENGTITDAVDCALDPLSETKCTLKSFTVEKGIYQTSNFRVQPTESIVRFPNITNLCPFGEVFNATRFASVYAWNRKRISNCVADYSVLYNSASFSTFKCYGVSPTKLNDLCFTNVYADSFVIRGDEVRQIAPGQTGKIADYNYKLPDDFTGCVIAWNSNNLDSKVGGNYNYLYRLFRKSNLKPFERDISTEIYQAGSTPCNGVEGFNCYFPLQSYGFQPTNGVGYQPYRVVVLSFELLHAPATVCGPKKSTNLVKNKCVNFNFNGLTGTGVLTESNKKFLPFQQFGRDIADTTDAVRDPQTLEILDITPCSFGGVSVITPGTNTSNQVAVLYQGVNCTEVPVAIHADQLTPTWRVYSTGSNVFQTRAGCLIGAEHVNNSYECDIPIGAGICASYQTQTNSPRRARSVASQSIIAYTMSLGAENSVAYSNNSIAIPTNFTISVTTEILPVSMTKTSVDCTMYICGDSTECSNLLLQYGSFCTQLNRALTGIAVEQDKNTQEVFAQVKQIYKTPPIKDFGGFNFSQILPDPSKPSKRSFIEDLLFNKVTLADVGFIKQYGDCLGDIAARDLICAQKFNGLTVLPPLLTDEMIAQYTSALLAGTITSGWTFGAGAALQIPFAMQMAYRFNGIGVTQNVLYENQKLIANQFNSAIGKIQDSLSSTASALGKLQDVVNQNAQALNTLVKQLSSNFGAISSVLNDILSRLDPPEAEVQIDRLITGRLQSLQTYVTQQLIRAAEIRASANLAATKMSECVLGQSKRVDFCGKGYHLMSFPQSAPHGVVFLHVTYVPAQEKNFTTAPAICHDGKAHFPREGVFVSNGTHWFVTQRNFYEPQIITTDNTFVSGNCDVVIGIVNNTVYDPLQPELDS

SEQ ID NO: 2741 - protein, 1147 aa, Artificial Sequence
  SARS-CoV-2/Greece/16/2020__EPI_ISL_418265 spike protein (1-1147)(K986P_V987P)
MFVFLVLLPLVSSQCVNLTTRTQLPPAYTNSFTRGVYYPDKVFRSSVLHSTQDLFLPFFSNVTWFHAIHVSGTNGTKRFDNPVLPFNDGVYFASTEKSNIIRGWIFGTTLDSKTQSLLIVNNATNVVIKVCEFQFCNDPFLGVYYHKNNKSWMESEFRVYSSANNCTFEYVSQPFLMDLEGKQGNFKNLREFVFKNVDGYFKIYSKHTPINLVRDLPQGFSALEPLVDLPIGINITRFQTLLALHRSYLTPGDSSSGWTAGAAAYYVGYLQPRTFLLKYNENGTITDAVDCALDPLSETKCTLKSFTVEKGIYQTSNFRVQPTESIVRFPNITNLCPFGEVFNATRFASVYAWNRKRISNCVADYSVLYNSASFSTFKCYGVSPTKLNDLCFTNVYADSFVIRGDEVRQIAPGQTGKIADYNYKLPDDFTGCVIAWNSNNLDSKVGGNYNYLYRLFRKSNLKPFERDISTEIYQAGSTPCNGVEGFNCYFPLQSYGFQPTNGVGYQPYRVVVLSFELLHAPATVCGPKKSTNLVKNKCVNFNFNGLTGTGVLTESNKKFLPFQQFGRDIADTTDAVRDPQTLEILDITPCSFGGVSVITPGTNTSNQVAVLYQDVNCTEVPVAIHADQLTPTWRVYSTGSNVFQTRAGCLIGAEHVNNSYECDIPIGAGICASYQTQTNSPRRARSVASQSIIAYTMSLGAENSVAYSNNSIAIPTNFTISVTTEILPVSMTKTSVDCTMYICGDSTECSNLLLQYGSFCTQLNRALTGIAVEQDKNTQEVFAQVKQIYKTPPIKDFGGFNFSQILPDPSKPSKRSFIEDLLFNKVTLADAGFIKQYGDCLGDIAARDLICAQKFNGLTVLPPLLTDEMIAQYTSALLAGTITSGWTFGAGAALQIPFAMQMAYRFNGIGVTQNVLYENQKLIANQFNSAIGKIQDSLSSTASALGKLQDVVNQNAQALNTLVKQLSSNFGAISSVLNDILSRLDPPEAEVQIDRLITGRLQSLQTYVTQQLIRAAEIRASANLAATKMSECVLGQSKRVDFCGKGYHLMSFPQSAPHGVVFLHVTYVPAQEKNFTTAPAICHDGKAHFPREGVFVSNGTHWFVTQRNFYEPQIITTDNTFVSGNCDVVIGIVNNTVYDPLQPELDS

SEQ ID NO: 2742 - protein, 1147 aa, Artificial Sequence
  SARS-CoV-2/Iceland/319/2020__EPI_ISL_417648 spike protein (1-1147)(K986P_V987P)
MFVFLVLLPLVSSQCVNLTTRTQLPPAYTNSFTRGVYYPDKVFRSSVLHSTQDLFLPFFSNVTWFHAIHVSGTNGTKRFDNPVLPFNDGVYFASTEKSNIIRGWIFGTTLDSKTQSLLIVNNATNVVIKVCEFQFCNDPFLGVYYHKNNKSWMESEFRVYSSANNCTFEYVSQPFLIDLEGKQGNFKNLREFVFKNIDGYFKIYSKHTPINLVRDLPQGFSALEPLVDLPIGINITRFQTLLALHRSYLTPGDSSSGWTAGAAAYYVGYLQPRTFLLKYNENGTITDAVDCALDPLSETKCTLKSFTVEKGIYQTSNFRVQPTESIVRFPNITNLCPFGEVFNATRFASVYAWNRKRISNCVADYSVLYNSASFSTFKCYGVSPTKLNDLCFTNVYADSFVIRGDEVRQIAPGQTGKIADYNYKLPDDFTGCVIAWNSNNLDSKVGGNYNYLYRLFRKSNLKPFERDISTEIYQAGSTPCNGVEGFNCYFPLQSYGFQPTNGVGYQPYRVVVLSFELLHAPATVCGPKKSTNLVKNKCVNFNFNGLTGTGVLTESNKKFLPFQQFGRDIADTTDAVRDPQTLEILDITPCSFGGVSVITPGTNTSNQVAVLYQGVNCTEVPVAIHADQLTPTWRVYSTGSNVFQTRAGCLIGAEHVNNSYECDIPIGAGICASYQTQTNSPRRARSVASQSIIAYTMSLGAENSVAYSNNSIAIPTNFTISVTTEILPVSMTKTSVDCTMYICGDSTECSNLLLQYGSFCTQLNRALTGIAVEQDKNTQEVFAQVKQIYKTPPIKDFGGFNFSQILPDPSKPSKRSFIEDLLFNKVTLADAGFIKQYGDCLGDIAARDLICAQKFNGLTVLPPLLTDEMIAQYTSALLAGTITSGWTFGAGAALQIPFAMQMAYRFNGIGVTQNVLYENQKLIANQFNSAIGKIQDSLSSTASALGKLQDVVNQNAQALNTLVKQLSSNFGAISSVLNDILSRLDPPEAEVQIDRLITGRLQSLQTYVTQQLIRAAEIRASANLAATKMSECVLGQSKRVDFCGKGYHLMSFPQSAPHGVVFLHVTYVPAQEKNFTTAPAICHDGKAHFPREGVFVSNGTHWFVTQRNFYEPQIITTDNTFVSGNCDVVIGIVNNTVYDPLQPELDS

SEQ ID NO: 2743 - protein, 1147 aa, Artificial Sequence
  SARS-CoV-2/Congo/94/2020__EPI_ISL_417947 spike protein (1-1147)(K986P_V987P)
MFVFLVLLPLVSSQCVNLTTRTQLPPAYTNSFTRGVYYPDKVFRSSVLHSTQDLFLPFFSNVTWFHAIHVSGTNGTKRFDNPVLPFNDGVYFASTEKSNIIRGWIFGTTLDSKTQSLLIVNNATNVVIKVCEFQFCNDPFLGVYYHKNNKSWMESEFRVYSSANNCTFEYVSQPFLMDLEGKQGNFKNLREFVFKNIDGYFKIYSKHTPINLVRDLPQGFSALEPLVDLPIGINITRFQTLLALHRSYLTPGDSSSGWTAGAAAYYVGYLQPRTFLLKYNENGTITDAVDCALDPLSETKCTLKSFTVEKGIYQTSNFRVQPTESIVRFPNITNLCPFGEVFNATRFASVYAWNRKRISNCVADYSVLYNSASFSTFKCYGVSPTKLNDLCFTNVYADSFVIRGDEVRQIAPGQTGKIADYNYKLPDDFTGCVIAWNSNNLDSKVGGNYNYLYRLFRKSNLKPFERDISTEIYQAGSTPCNGVEGFNCYFPLQSYGFQPTNGVGYQPYRVVVLSFELLHAPATVCGPKKSTNLVKNKCVNFNFNGLTGTGVLTESNKKFLPFQQFGRDIADTTDAVRDPQTLEILDITPCSFGGVSVITPGTNTSNQVAVLYQGVNCTEVPVAIHADQLTPTWRVYSTGSNVFQTRAGCLIGAEHVNNSYECDIPIGAGICASYQTQTNSPRRARSVASQSIIAYTMSLGAENSVAYSNNSIAIPTNFTISVTTEILPVSMTKTSVDCTMYICGDSTECSNLLLQYGSFCTQLNRALTGIAVEQDKNTQEVFAQVKQIYKTPPIKDFGGFNFSQILPDPSKPSKRSFIEDILFNKVTLADAGFIKQYGDCLGDIAARDLICAQKFNGLTVLPPLLTDEMIAQYTSALLAGTITSGWTFGAGAALQIPFAMQMAYRFNGIGVTQNVLYENQKLIANQFNSAIGKIQDSLSSTASALGKLQDVVNQNAQALNTLVKQLSSNFGAISSVLNDILSRLDPPEAEVQIDRLITGRLQSLQTYVTQQLIRAAEIRASANLAATKMSECVLGQSKRVDFCGKGYHLMSFPQSAPHGVVFLHVTYVPAQEKNFTTAPAICHDGKAHFPREGVFVSNGTHWFVTQRNFYEPQIITTDNTFVSGNCDVVIGIVNNTVYDPLQPELDS

SEQ ID NO: 2744 - protein, 1147 aa, Artificial Sequence
  SARS-CoV-2/Congo/158/2020__EPI_ISL_417950 spike protein (1-1147)(K986P_V987P)
MFVFLVLLPLVSSQCVNLTTRTQLPPAYTNSFTRGVYYPDKVFRSSVLHSTQDLFLPFFSNVTWFHAIHVSGTNGTKRFDNPVLPFNDGVYFASTEKSNIIRGWIFGTTLDSKTQSLLIVNNATNVVIKVCEFQFCNDPFLGVYYHKNNKSWMESEFRVYSSANNCTFEYVSQPFLMDLEGKQGNFKNLREFVFKNIDGYFKIYSKHTPINLVRDLPQGFSALEPLVDLPIGINITRFQTLLALHRSYLTPGDSSSGWTAGAAAYYVGYLQPRTFLLKYNENGTITDAVDCALDPLSETKCTLKSFTVEKGIYQTSNFRVQPTESIVRFPNITNLCPFGEVFNATRFASVYAWNRKRISNCVADYSVLYNSASFSTFKCYGVSPTKLNDLCFTNVYADSFVIRGDEVRQIAPGQTGKIADYNYKLPDDFTGCVIAWNSNNLDSKVGGNYNYLYRLFRKSNLKPFERDISTEIYQAGSTPCNGVEGFNCYFPLQSYGFQPTNGVGYQPYRVVVLSFELLHAPATVCGPKKSTNLVKNKCVNFNFNGLTGTGVLTESNKKFLPFQQFGRDIADTTDAVRDPQTLEILDITPCSFGGVSVITPGTNTSNQVAVLYQDVNCTEVPVAIHADQLTPTWRVYSTGSNVFQTRAGCLIGAEHVNNSYECDIPIGAGICASYQTQTNSPRRARSVASQSIIAYTMSLGAENSVAYSNNSIAIPTNFTISVTTEILPVSMTKTSVDCTMYICGDSTECSNLLLQYGSFCTQLNRALTGIAVEQDKNTQEVFAQVKQIYKTPPIKDFGGFNFSQILPDPSKPSKRSFIEDLLFNKVTLADAGFIKQYGDCLGDIAARDLICAQKFNGLTVLPPLLTDEMIAQYTSALLAGTITSGWTFGAGAALQIPFAMQMAYRFNGIGVTQNVLYENQKLIANQFNSAIGKIQDSLSSTASALGKLQDVVNQNAQALNTLVKQLSSNFGAISSVLNDILSRLDPPEAEVQIDRLITGRLQSLQTYVTQQLIRAAEIRASANLAATKMSECVLGQSKRVDFCGKGYHLMSFPQSAPHGVVFLHVTYVPAQEKNFTTAPAICHDGKAHFPREGVFVSNGTHWFVTQRNFYEPQIITTDNTFLSGNCDVVIGIVNNTVYDPLQPELDS

SEQ ID NO: 2745 - protein, 1147 aa, Artificial Sequence
  SARS-CoV-2/USA/UT-00034/2020__EPI_ISL_417977 spike protein (1-1147)(K986P_V987P)
MFVFLVLLPLVSSQCVNLTTRTQLPPAYTNSFTRGVYYPDKVFRSSVLHSTQDLFLPFFSNVTWFHAIHVSGTNGTKRFDNPVLPFNDGVYFASTEKSNIIRGWIFGTTLDSKTQSLLIVNNATNVVIKVCEFQFCNDPFLGVYYYKNNKSWMESEFRVYSSANNCTFEYVSQPFLMDLEGKQGNFKNLREFVFKNIDGYFKIYSKHTPINLVRDLPQGFSALEPLVDLPIGINITRFQTLLALHRSYLTPGDSSSGWTAGAAAYYVGYLQPRTFLLKYNENGTITDAVDCALDPLSETKCTLKSFTVEKGIYQTSNFRVQPTESIVRFPNITNLCPFGEVFNATRFASVYAWNRKRISNCVADYSVLYNSASFSTFKCYGVSPTKLNDLCFTNVYADSFVIRGDEVRQIAPGQTGKIADYNYKLPDDFTGCVIAWNSNNLDSKVGGNYNYLYRLFRKSNLKPFERDISTEIYQAGSTPCNGVEGFNCYFPLQSYGFQPTNGVGYQPYRVVVLSFELLHAPATVCGPKKSTNLVKNKCVNFNFNGLTGTGVLTESNKKFLPFQQFGRDIADTTDAVRDPQTLEILDITPCSFGGVSVITPGTNTSNQVAVLYQGVNCTEVPVAIHADQLTPTWRVYSTGSNVFQTRAGCLIGAEHVNNSYECDIPIGAGICASYQTQTNSPRRARSVASQSIIAYTMSLGAENSVAYSNNSIAIPTNFTISVTTEILPVSMTKTSVDCTMYICGDSTECSNLLLQYGSFCTQLNRALTGIAVEQDKNTQEVFAQVKQIYKTPPIKDFGGFNFSQILPDPSKPSKRSFIEDLLFNKVTLADAGFIKQYGDCLGDIAARDLICAQKFNGLTVLPPLLTDEMIAQYTSALLAGTITSGWTFGAGAALQIPFAMQMAYRFNGIGVTQNVLYENQKLIANQFNSAIGKIQDSLSSTASALGKLQDVVNQNAQALNTLVKQLSSNFGAISSVLNDILSRLDPPEAEVQIDRLITGRLQSLQTYVTQQLIRAAEIRASANLAATKMSECVLGQSKRVDFCGKGYHLMSFPQSAPHGVVFLHVTYVPAQEKNFTTAPAICHDGKAHFPREGVFVSNGTHWFVTQRNFYEPQIITTDNTFVSGNCDVVIGIVNNTVYDPLQPELDS

SEQ ID NO: 2746 - protein, 1147 aa, Artificial Sequence
  SARS-CoV-2/USA/UT-00033/2020__EPI_ISL_417976 spike protein (1-1147)(K986P_V987P)
MFVFLVLLPLVSSQCVNLTTRTQLPPAYTNSFTRGVYYPDKVFRSSVLHSTQDLFLPFFSNVTWFHAIHVSGTNGTKRFDNPVLPFNDGVYFASTEKSNIIRGWIFGTTLDSKTQSLLIVNNATNVVIKVCEFQFCNDPFLGVYYHKNNKSWMESEFRVYSSANNCTFEYVSQPFLMDLEGKQGNFKNLREFVFKNIDGYFKIYSKHTPINLVRDLPQGFSALEPLVDLPIGINITRFQTLLALHRSYLTPGDSSSGLTAGAAAYYVGYLQPRTFLLKYNENGTITDAVDCALDPLSETKCTLKSFTVEKGIYQTSNFRVQPTESIVRFPNITNLCPFGEVFNATRFASVYAWNRKRISNCVADYSVLYNSASFSTFKCYGVSPTKLNDLCFTNVYADSFVIRGDEVRQIAPGQTGKIADYNYKLPDDFTGCVIAWNSNNLDSKVGGNYNYLYRLFRKSNLKPFERDISTEIYQAGSTPCNGVEGFNCYFPLQSYGFQPTNGVGYQPYRVVVLSFELLHAPATVCGPKKSTNLVKNKCVNFNFNGLTGTGVLTESNKKFLPFQQFGRDIADTTDAVRDPQTLEILDITPCSFGGVSVITPGTNTSNQVAVLYQGVNCTEVPVAIHADQLTPTWRVYSTGSNVFQTRAGCLIGAEHVNNSYECDIPIGAGICASYQTQTNSPRRARSVASQSIIAYTMSLGAENSVAYSNNSIAIPTNFTISVTTEILPVSMTKTSVDCTMYICGDSTECSNLLLQYGSFCTQLNRALTGIAVEQDKNTQEVFAQVKQIYKTPPIKDFGGFNFSQILPDPSKPSKRSFIEDLLFNKVTLADAGFIKQYGDCLGDIAARDLICAQKFNGLTVLPPLLTDEMIAQYTSALLAGTITSGWTFGAGAALQIPFAMQMAYRFNGIGVTQNVLYENQKLIANQFNSAIGKIQDSLSSTASALGKLQDVVNQNAQALNTLVKQLSSNFGAISSVLNDILSRLDPPEAEVQIDRLITGRLQSLQTYVTQQLIRAAEIRASANLAATKMSECVLGQSKRVDFCGKGYHLMSFPQSAPHGVVFLHVTYVPAQEKNFTTAPAICHDGKAHFPREGVFVSNGTHWFVTQRNFYEPQIITTDNTFVSGNCDVVIGIVNNTVYDPLQPELDS

SEQ ID NO: 2747 - protein, 1147 aa, Artificial Sequence
  SARS-CoV-2/USA/WI-13/2020__EPI_ISL_417516 spike protein (1-1147)(K986P_V987P)
MFVFLVLLPLVSSQCVNLTTRTQLPPAYTNSFTRGVYYPDKVFRSSVLHSTQDLFLPFFSNVTWFHAIHVSGTNGTKRFDNPVLPFNDGVYFASTEKSNIIRGWIFGTTLDSKTQSLLIVNNATNVVIKVCEFQFCNDPFLGVYYHKNNKSWMESEFRVYSSANNCTFEYVSQPFLMDLEGKQGNFKNLREFVFKNIDGYFKIYSKHTPINLVRDLPQGFSALEPLVDLPIGINITRFQTLLALHRSYLTPGDSSSGWTAGAAAYYVGYLQPRTFLLKYNENGTITDAVDCALDPLSETKCTLKSFTVEKGIYQTSNFRVLPTESIVRFPNITNLCPFGEVFNATRFASVYAWNRKRISNCVADYSVLYNSASFSTFKCYGVSPTKLNDLCFTNVYADSFVIRGDEVRQIAPGQTGKIADYNYKLPDDFTGCVIAWNSNNLDSKVGGNYNYLYRLFRKSNLKPFERDISTEIYQAGSTPCNGVEGFNCYFPLQSYGFQPTNGVGYQPYRVVVLSFELLHAPATVCGPKKSTNLVKNKCVNFNFNGLTGTGVLTESNKKFLPFQQFGRDIADTTDAVRDPQTLEILDITPCSFGGVSVITPGTNTSNQVAVLYQGVNCTEVPVAIHADQLTPTWRVYSTGSNVFQTRAGCLIGAEHVNNSYECDIPIGAGICASYQTQTNSPRRARSVASQSIIAYTMSLGAENSVAYSNNSIAIPTNFTISVTTEILPVSMTKTSVDCTMYICGDSTECSNLLLQYGSFCTQLNRALTGIAVEQDKNTQEVFAQVKQIYKTPPIKDFGGFNFSQILPDPSKPSKRSFIEDLLFNKVTLADAGFIKQYGDCLGDIAARDLICAQKFNGLTVLPPLLTDEMIAQYTSALLAGTITSGWTFGAGAALQIPFAMQMAYRFNGIGVTQNVLYENQKLIANQFNSAIGKIQDSLSSTASALGKLQDVVNQNAQALNTLVKQLSSNFGAISSVLNDILSRLDPPEAEVQIDRLITGRLQSLQTYVTQQLIRAAEIRASANLAATKMSECVLGQSKRVDFCGKGYHLMSFPQSAPHGVVFLHVTYVPAQEKNFTTAPAICHDGKAHFPREGVFVSNGTHWFVTQRNFYEPQIITTDNTFVSGNCDVVIGIVNNTVYDPLQPELDS

SEQ ID NO: 2748 - protein, 1146 aa, Artificial Sequence
  SARS-CoV-2/India/1-27/2020__EPI_ISL_413522 spike protein (1-1146)(K985P_V986P)
MFVFLVLLPLVSSQCVNLTTRTQLPPAYTNSFTRGVYYPDKVFRSSVLHSTQDLFLPFFSNVTWFHAIHVSGTNGTKRFDNPVLPFNDGVYFASTEKSNIIRGWIFGTTLDSKTQSLLIVNNATNVVIKVCEFQFCNDPFLGVYHKNNKSWMESEFRVYSSANNCTFEYVSQPFLMDLEGKQGNFKNLREFVFKNIDGYFKIYSKHTPINLVRDLPQGFSALEPLVDLPIGINITRFQTLLALHRSYLTPGDSSSGWTAGAAAYYVGYLQPRTFLLKYNENGTITDAVDCALDPLSETKCTLKSFTVEKGIYQTSNFRVQPTESIVRFPNITNLCPFGEVFNATRFASVYAWNRKRISNCVADYSVLYNSASFSTFKCYGVSPTKLNDLCFTNVYADSFVIRGDEVIQIAPGQTGKIADYNYKLPDDFTGCVIAWNSNNLDSKVGGNYNYLYRLFRKSNLKPFERDISTEIYQAGSTPCNGVEGFNCYFPLQSYGFQPTNGVGYQPYRVVVLSFELLHAPATVCGPKKSTNLVKNKCVNFNFNGLTGTGVLTESNKKFLPFQQFGRDIADTTDAVRDPQTLEILDITPCSFGGVSVITPGTNTSNQVAVLYQDVNCTEVPVAIHADQLTPTWRVYSTGSNVFQTRAGCLIGAEHVNNSYECDIPIGAGICASYQTQTNSPRRARSVASQSIIAYTMSLGAENSVAYSNNSIAIPTNFTISVTTEILPVSMTKTSVDCTMYICGDSTECSNLLLQYGSFCTQLNRALTGIAVEQDKNTQEVFAQVKQIYKTPPIKDFGGFNFSQILPDPSKPSKRSFIEDLLFNKVTLADAGFIKQYGDCLGDIAARDLICAQKFNGLTVLPPLLTDEMIAQYTSALLAGTITSGWTFGAGAALQIPFAMQMAYRFNGIGVTQNVLYENQKLIANQFNSAIGKIQDSLSSTASALGKLQDVVNQNAQALNTLVKQLSSNFGAISSVLNDILSRLDPPEAEVQIDRLITGRLQSLQTYVTQQLIRAAEIRASANLAATKMSECVLGQSKRVDFCGKGYHLMSFPQSAPHGVVFLHVTYVPAQEKNFTTAPAICHDGKAHFPREGVFVSNGTHWFVTQRNFYEPQIITTDNTFVSGNCDVVIGIVNNTVYDPLQPELDS

SEQ ID NO: 2749 - protein, 1141 aa, Artificial Sequence
  SARS-CoV-2/pangolin/Guangxi/P4L/2017__EPI_ISL_410538 spike protein (1-1141)(K980P_V981P)
MFVFLFVLPLVSSQCVNLTTRTGIPPGYTNSSTRGVYYPDKVFRSSILHLTQDLFLPFFSNVTWFNTINYQGGFKKFDNPVLPFNDGVYFASTEKSNIIRGWIFGTTLDARTQSLLIVNNATNVVIKVCEFQFCTDPFLGVYYHNNNKTWVENEFRVYSSANNCTFEYISQPFLMDLEGKQGNFKNLREFVFKNVDGYFKIYSKHTPIDLVRDLPRGFAALEPLVDLPIGINITRFQTLLALHRSYLTPGNLESGWTTGAAAYYVGYLQQRTFLLSYNQNGTITDAVDCSLDPLSETKCTLKSLTVEKGIYQTSNFRVQPTISIVRFPNITNLCPFGEVFNASKFASVYAWNRKRISNCVADYSVLYNSTSFSTFKCYGVSPTKLNDLCFTNVYADSFVVKGDEVRQIAPGQTGVIADYNYKLPDDFTGCVIAWNSVKQDALTGGNYGYLYRLFRKSKLKPFERDISTEIYQAGSTPCNGQVGLNCYYPLERYGFHPTTGVNYQPFRVVVLSFELLNGPATVCGPKLSTTLVKDKCVNFNFNGLTGTGVLTTSKKQFLPFQQFGRDISDTTDAVRDPQTLEILDITPCSFGGVSVITPGTNTSNQVAVLYQDVNCTEVPMAIHAEQLTPAWRVYSAGANVFQTRAGCLVGAEHVNNSYECDIPVGAGICASYHSMSSLRSVNQRSIIAYTMSLGAENSVAYSNNSIAIPTNFTISVTTEILPVSMTKTSVDCTMYICGDSIECSNLLLQYGSFCTQLNRALTGIAVEQDKNTQEVFAQVKQIYKTPPIKDFGGFNFSQILPDPSKPSKRSFIEDLLFNKVTLADAGFIKQYGDCLGDIAARDLICAQKFNGLTVLPPLLTDEMIAQYTSALLAGTITSGWTFGAGAALQIPFAMQMAYRFNGIGVTQNVLYENQKLIANQFNSAIGKIQDSLSSTASALGKLQDVVNQNAQALNTLVKQLSSNFGAISSVLNDILSRLDPPEAEVQIDRLITGRLQSLQTYVTQQLIRAAEIRASANLAATKMSECVLGQSKRVDFCGKGYHLMSFPQSAPHGVVFLHVTYVPAQEKNFTTAPAICHEGKAHFPREGVFVSNGTHWFITQRNFYEPQIITTDNTFVSGSCDVVIGIVNNTVYDPLQPELDS

SEQ ID NO: 2750 - protein, 1141 aa, Artificial Sequence
  SARS-CoV-2/pangolin/Guangxi/P5L/2017__EPI_ISL_410540 spike protein (1-1141)(K980P_V981P)
MFVFLFVLPLVSSQCVNLTTRTGIPPGYTNSSTRGVYYPDKVFRSSILHLTQDLFLPFFSNVTWFNTINYQGGFKKFDNPVLPFNDGVYFASTEKSNIIRGWIFGTTLDARTQSLLIVNNATNVVIKVCEFQFCTDPFLGVYYHNNNKTWVENEFRVYSSANNCTFEYISQPFLMDLEGKQGNFKNLREFVFKNVDGYFKIYSKHTPIDLVRDLPRGFAALEPLVDLPIGINITRFQTLLALHRSYLTPGKLESGWTTGAAAYYVGYLQQRTFLLSYNQNGTITDAVDCSLDPLSETKCTLKSLTVEKGIYQTSNFRVQPTISIVRFPNITNLCPFGEVFNASKFASVYAWNRKRISNCVADYSVLYNSTSFSTFKCYGVSPTKLNDLCFTNVYADSFVVKGDEVRQIAPGQTGVIADYNYKLPDDFTGCVIAWNSVKQDALTGGNYGYLYRLFRKSKLKPFERDISTEIYQAGSTPCNGQVGLNCYYPLERYGFHPTTGVNYQPFRVVVLSFELLNGPATVCGPKLSTTLVKDKCVNFNFNGLTGTGVLTTSKKQFLPFQQFGRDISDTTDAVRDPQTLEILDITPCSFGGVSVITPGTNTSNQVAVLYQDVNCTEVPMAIHAEQLTPAWRVYSAGANVFQTRAGCLVGAEHVNNSYECDIPVGAGICASYHSMSSFRSVNQRSIIAYTMSLGAENSVAYSNNSIAIPTNFTISVTTEILPVSMTKTSVDCTMYICGDSIECSNLLLQYGSFCTQLNRALTGIAVEQDKNTQEVFAQVKQIYKTPPIKDFGGFNFSQILPDPSKPSKRSFIEDLLFNKVTLADAGFIKQYGDCLGDIAARDLICAQKFNGLTVLPPLLTDEMIAQYTSALLAGTITSGWTFGAGAALQIPFAMQMAYRFNGIGVTQNVLYENQKLIANQFNSAIGKIQDSLSSTASALGKLQDVVNQNAQALNTLVKQLSSNFGAISSVLNDILSRLDPPEAEVQIDRLITGRLQSLQTYVTQQLIRAAEIRASANLAATKMSECVLGQSKRVDFCGKGYHLMSFPQSAPHGVVFLHVTYVPAQEKNFTTAPAICHEGKAHFPREGVFVSNGTHWFITQRNFYEPQIITTDNTFVSGSCDVVIGIVNNTVYDPLQPELDS

SEQ ID NO: 2751 - protein, 1141 aa, Artificial Sequence
  SARS-CoV-2/pangolin/Guangxi/P5E/2017__EPI_ISL_410541 spike protein (1-1141)(K980P_V981P)
MFVFLFVLPLVSSQCVNLTTRTGIPPGYTNSSTRGVYYPDKVFRSSILHLTQDLFLPFFSNVTWFNTITYQGGSKKFDNPVLPFNDGVYFASTEKSNIIRGWIFGTTLDARTQSLLIVNNATNVVIKVCEFQFCTDPFLGVYYHNNNKTWVENEFRVYSSANNCTFEYISQPFLMDLEGKQGNFKNLREFVFKNVDGYFKIYSKHTPIDLVRDLPRGFAALEPLVDLPIGINITRFQTLLALHRSYLTPGKLESGWTTGAAAYYVGYLQQRTFLLSYNQNGTITDAVDCSLDPLSETKCTLKSLTVEKGIYQTSNFRVQPTISIVRFPNITNLCPFGEVFNASKFASVYAWNRKRISNCVADYSVLYNSTSFSTFKCYGVSPTKLNDLCFTNVYADSFVVKGDEVRQIAPGQTGVIADYNYKLPDDFTGCVIAWNSVKQDALTGDNYGYLYRLFRKSKLKPFERDISTEIYQAGSTPCNGQVGLNCYYPLERYGFHPTTGVNYQPFRVVVLSFELLNGPATVCGPKLSTTLVKDKCVNFNFNGLTGTGVLTTSKKQFLPFQQFGRDISDTTDAVRDPQTLEILDITPCSFGGVSVITPGTNTSNQVAVLYQDVNCTEVPMAIHAEQLTPAWRVYSAGANVFQTRAGCLVGAEHVNNSYECDIPVGAGICASYHSMSSFRSVNQRSIIAYTMSLGAENSVAYSNNSIAIPTNFTISVTTEILPVSMTKTSVDCTMYICGDSIECSNLLLQYGSFCTQLNRALTGIAVEQDKNTQEVFAQVKQIYKTPPIKDFGGFNFSQILPDPSKPSKRSFIEDLLFNKVTLADAGFIKQYGDCLGDIAARDLICAQKFNGLTVLPPLLTDEMIAQYTSALLAGTITSGWTFGAGAALQIPFAMQMAYRFNGIGVTQNVLYENQKLIANQFNSAIGKIQDSLSSTASALGKLQDVVNQNAQALNTLVKQLSSNFGAISSVLNDILSRLDPPEAEVQIDRLITGRLQSLQTYVTQQLIRAAEIRASANLAATKMSECVLGQSKRVDFCGKGYHLMSFPQSAPHGVVFLHVTYVPAQEKNFTTAPAICHEGKAHFPREGVFVSNGTHWFITQRNFYEPQIITTDNTFVSGSCDVVIGIVNNTVYDPLQPELDS

SEQ ID NO: 2752 - protein, 1139 aa, Artificial Sequence
  SARS-CoV-2/pangolin/Guangxi/P1E/2017__EPI_ISL_410539 spike protein (1-1139)(K978P_V979P)
MFVFLFVLPLVSSQCVNLTTRTGIQPGYTNSSTRGVYYPDKVFRSSILHLTQDLFLPFFSNVTWFNTINYQGGFKKFDNPVLPFNDGVYFASTEKSNIIRGWIFGTTLDARTQSLLIVNNATNVVIKVCEFQFCTDPFLGVYYHNNNKTWVENEFRVYSSANNCTFEYISQPFLMDLEGKQGNFKNLREFVFKNVDGYFKIYSKHTPIDLVRDLPRGFAALEPLVDLPIGINITRFQTLLALHRSYLTPGKLESGWTTGAAAYYVGYLQQRTFLLSYNQNGTITDAVDCSLDPLSETKCTLKSLTVEKGIYQTSNFRVQPTISIVRFPNITNLCPFGEVFNASKFASVYAWNRKRISNCVADYSVLYNSTSFSTFKCYGVSPTKLNDLCFTNVYADSFVVKGDEVRQIAPGQTGVIADYNYKLPDDFTGCVIAWNSVKQDALTGGNYLYRLFRKSKLKPFERDISTEIYQAGSTPCNGQVGLNCYYPLERYGFHPTTGVNYQPFRVVVLSFELLNGPATVCGPKLSTTLVKDKCVNFNFNGLTGTGVLTTSKKQFLPFQQFGRDISDTTDAVRDPQTLEILDITPCSFGGVSVITPGTNTSNQVAVLYQDVNCTEVPMAIHAEQLTPAWRVYSAGANVFQTRAGCLVGAEHVNNSYECDIPVGAGICASYHSMSSLRSVNQRSIIAYTMSLGAENSVAYSNNSIAIPTNFTISVTTEILPVSMTKTSVDCTMYICGDSIECSNLLLQYGSFCTQLNRALTGIAVEQDKNTQEVFAQVKQIYKTPPIKDFGGFNFSQILPDPSKPSKRSFIEDLLFNKVTLADAGFIKQYGDCLGDIAARDLICAQKFNGLTVLPPLLTDEMIAQYTSALLAGTITSGWTFGAGAALQIPFAMQMAYRFNGIGVTQNVLYENQKLIANQFNSAIGKIQDSLSSTASALGKLQDVVNQNAQALNTLVKQLSSNFGAISSVLNDILSRLDPPEAEVQIDRLITGRLQSLQTYVTQQLIRAAEIRASANLAATKMSECVLGQSKRVDFCGKGYHLMSFPQSAPHGVVFLHVTYVPAQEKNFTTAPAICHEGKAHFPREGVFVSNGTHWFITQRNFYEPQIITTDNTFVSGSCDVVIGIVNNTVYDPLQPELDS

SEQ ID NO: 2753 - protein, 1147 aa, Artificial Sequence
  SARS-CoV-2/Wuhan/WIV05/2019__EPI_ISL_402128 spike protein (1-1147)(K986P_V987P_T887W_A1020W)
MFVFLVLLPLVSSQCVNLTTRTQLPPAYTNSFTRGVYYPDKVFRSSVLHSTQDLFLPFFSNVTWFHAIHVSGTNGTKRFDNPVLPFNDGVYFASTEKSNIIRGWIFGTTLDSKTQSLLIVNNATNVVIKVCEFQFCNDPFLGVYYHKNNKSWMESEFRVYSSANNCTFEYVSQPFLMDLEGKQGNFKNLREFVFKNIDGYFKIYSKHTPINLVRDLPQGFSALEPLVDLPIGINITRFQTLLALHRSYLTPGDSSSGWTAGAAAYYVGYLQPRTFLLKYNENGTITDAVDCALDPLSETKCTLKSFTVEKGIYQTSNFRVQPTESIVRFPNITNLCPFGEVFNATRFASVYAWNRKRISNCVADYSVLYNSASFSTFKCYGVSPTKLNDLCFTNVYADSFVIRGDEVRQIAPGQTGKIADYNYKLPDDFTGCVIAWNSNNLDSKVGGNYNYLYRLFRKSNLKPFERDISTEIYQAGSTPCNGVEGFNCYFPLQSYGFQPTNGVGYQPYRVVVLSFELLHAPATVCGPKKSTNLVKNKCVNFNFNGLTGTGVLTESNKKFLPFQQFGRDIADTTDAVRDPQTLEILDITPCSFGGVSVITPGTNTSNQVAVLYQDVNCTEVPVAIHADQLTPTWRVYSTGSNVFQTRAGCLIGAEHVNNSYECDIPIGAGICASYQTQTNSPRRARSVASQSIIAYTMSLGAENSVAYSNNSIAIPTNFTISVTTEILPVSMTKTSVDCTMYICGDSTECSNLLLQYGSFCTQLNRALTGIAVEQDKNTQEVFAQVKQIYKTPPIKDFGGFNFSQILPDPSKPSKRSFIEDLLFNKVTLADAGFIKQYGDCLGDIAARDLICAQKFNGLTVLPPLLTDEMIAQYTSALLAGTITSGWWFGAGAALQIPFAMQMAYRFNGIGVTQNVLYENQKLIANQFNSAIGKIQDSLSSTASALGKLQDVVNQNAQALNTLVKQLSSNFGAISSVLNDILSRLDPPEAEVQIDRLITGRLQSLQTYVTQQLIRAAEIRWSANLAATKMSECVLGQSKRVDFCGKGYHLMSFPQSAPHGVVFLHVTYVPAQEKNFTTAPAICHDGKAHFPREGVFVSNGTHWFVTQRNFYEPQIITTDNTFVSGNCDVVIGIVNNTVYDPLQPELDS

SEQ ID NO: 2754 - protein, 1143 aa, Artificial Sequence
  SARS-CoV-2/bat/Yunnan/RaTG13/2013__EPI_ISL_402131 spike protein (1-1143)(K982P_V983P_T883W_A1016W)
MFVFLVLLPLVSSQCVNLTTRTQLPPAYTNSSTRGVYYPDKVFRSSVLHLTQDLFLPFFSNVTWFHAIHVSGTNGIKRFDNPVLPFNDGVYFASTEKSNIIRGWIFGTTLDSKTQSLLIVNNATNVVIKVCEFQFCNDPFLGVYYHKNNKSWMESEFRVYSSANNCTFEYVSQPFLMDLEGKQGNFKNLREFVFKNIDGYFKIYSKHTPINLVRDLPPGFSALEPLVDLPIGINITRFQTLLALHRSYLTPGDSSSGWTAGAAAYYVGYLQPRTFLLKYNENGTITDAVDCALDPLSETKCTLKSFTVEKGIYQTSNFRVQPTDSIVRFPNITNLCPFGEVFNATTFASVYAWNRKRISNCVADYSVLYNSTSFSTFKCYGVSPTKLNDLCFTNVYADSFVITGDEVRQIAPGQTGKIADYNYKLPDDFTGCVIAWNSKHIDAKEGGNFNYLYRLFRKANLKPFERDISTEIYQAGSKPCNGQTGLNCYYPLYRYGFYPTDGVGHQPYRVVVLSFELLNAPATVCGPKKSTNLVKNKCVNFNFNGLTGTGVLTESNKKFLPFQQFGRDIADTTDAVRDPQTLEILDITPCSFGGVSVITPGTNASNQVAVLYQDVNCTEVPVAIHADQLTPTWRVYSTGSNVFQTRAGCLIGAEHVNNSYECDIPIGAGICASYQTQTNSRSVASQSIIAYTMSLGAENSVAYSNNSIAIPTNFTISVTTEILPVSMTKTSVDCTMYICGDSTECSNLLLQYGSFCTQLNRALTGIAVEQDKNTQEVFAQVKQIYKTPPIKDFGGFNFSQILPDPSKPSKRSFIEDLLFNKVTLADAGFIKQYGDCLGDIAARDLICAQKFNGLTVLPPLLTDEMIAQYTSALLAGTITSGWWFGAGAALQIPFAMQMAYRFNGIGVTQNVLYENQKLIANQFNSAIGKIQDSLSSTASALGKLQDVVNQNAQALNTLVKQLSSNFGAISSVLNDILSRLDPPEAEVQIDRLITGRLQSLQTYVTQQLIRAAEIRWSANLAATKMSECVLGQSKRVDFCGKGYHLMSFPQSAPHGVVFLHVTYVPAQEKNFTTAPAICHDGKAHFPREGVFVSNGTHWFVTQRNFYEPQIITTDNTFVSGSCDVVIGIVNNTVYDPLQPELDS

SEQ ID NO: 2755 - protein, 1147 aa, Artificial Sequence
  SARS-CoV-2/Wuhan/HBCDC-HB-01/2019__EPI_ISL_402132 spike protein (1-1147)(K986P_V987P_T887W_A1020W)
MFVFLVLLPLVSSQCVNLTTRTQLPPAYTNSITRGVYYPDKVFRSSVLHSTQDLFLPFFSNVTWFHAIHVSGTNGTKRFDNPVLPFNDGVYFASTEKSNIIRGWIFGTTLDSKTQSLLIVNNATNVVIKVCEFQFCNDPFLGVYYHKNNKSWMESEFRVYSSANNCTFEYVSQPFLMDLEGKQGNFKNLREFVFKNIDGYFKIYSKHTPINLVRDLPQGFSALEPLVDLPIGINITRFQTLLALHRSYLTPGDSSSGWTAGAAAYYVGYLQPRTFLLKYNENGTITDAVDCALDPLSETKCTLKSFTVEKGIYQTSNFRVQPTESIVRFPNITNLCPFGEVFNATRFASVYAWNRKRISNCVADYSVLYNSASFSTFKCYGVSPTKLNDLCFTNVYADSFVIRGDEVRQIAPGQTGKIADYNYKLPDDFTGCVIAWNSNNLDSKVGGNYNYLYRLFRKSNLKPFERDISTEIYQAGSTPCNGVEGFNCYFPLQSYGFQPTNGVGYQPYRVVVLSFELLHAPATVCGPKKSTNLVKNKCVNFNFNGLTGTGVLTESNKKFLPFQQFGRDIADTTDAVRDPQTLEILDITPCSFGGVSVITPGTNTSNQVAVLYQDVNCTEVPVAIHADQLTPTWRVYSTGSNVFQTRAGCLIGAEHVNNSYECDIPIGAGICASYQTQTNSPRRARSVASQSIIAYTMSLGAENSVAYSNNSIAIPTNFTISVTTEILPVSMTKTSVDCTMYICGDSTECSNLLLQYGSFCTQLNRALTGIAVEQDKNTQEVFAQVKQIYKTPPIKDFGGFNFSQILPDPSKPSKRSFIEDLLFNKVTLADAGFIKQYGDCLGDIAARDLICAQKFNGLTVLPPLLTDEMIAQYTSALLAGTITSGWWFGAGAALQIPFAMQMAYRFNGIGVTQNVLYENQKLIANQFNSAIGKIQDSLSSTASALGKLQDVVNQNAQALNTLVKQLSSNFGAISSVLNDILSRLDPPEAEVQIDRLITGRLQSLQTYVTQQLIRAAEIRWSANLAATKMSECVLGQSKRVDFCGKGYHLMSFPQSAPHGVVFLHVTYVPAQEKNFTTAPAICHDGKAHFPREGVFVSNGTHWFVTQRNFYEPQIITTDNTFVSGNCDVVIGIVNNTVYDPLQPELDS

SEQ ID NO: 2756 - protein, 1147 aa, Artificial Sequence
  SARS-CoV-2/Guangdong/20SF028/2020__EPI_ISL_403936 spike protein (1-1147)(K986P_V987P_T887W_A1020W)
MFVFLVLLPLVSSQCVNLTTRTQLPPAYTNSFTRGVYYPDKVFRSSVLYSTQDLFLPFFSNVTWFHAIHVSGTNGTKRFDNPVLPFNDGVYFASTEKSNIIRGWIFGTTLDSKTQSLLIVNNATNVVIKVCEFQFCNDPFLGVYYHKNNKSWMESEFRVYSSANNCTFEYVSQPFLMDLEGKQGNFKNLREFVFKNIDGYFKIYSKHTPINLVRDLPQGFSALEPLVDLPIGINITRFQTLLALHRSYLTPGDSSSGWTAGAAAYYVGYLQPRTFLLKYNENGTITDAVDCALDPLSETKCTLKSFTVEKGIYQTSNFRVQPTESIVRFPNITNLCPFGEVFNATRFASVYAWNRKRISNCVADYSVLYNSASFSTFKCYGVSPTKLNDLCFTNVYADSFVIRGDEVRQIAPGQTGKIADYNYKLPDDFTGCVIAWNSNNLDSKVGGNYNYLYRLFRKSNLKPFERDISTEIYQAGSTPCNGVEGFNCYFPLQSYGFQPTNGVGYQPYRVVVLSFELLHAPATVCGPKKSTNLVKNKCVNFNFNGLTGTGVLTESNKKFLPFQQFGRDIADTTDAVRDPQTLEILDITPCSFGGVSVITPGTNTSNQVAVLYQDVNCTEVPVAIHADQLTPTWRVYSTGSNVFQTRAGCLIGAEHVNNSYECDIPIGAGICASYQTQTNSPRRARSVASQSIIAYTMSLGAENSVAYSNNSIAIPTNFTISVTTEILPVSMTKTSVDCTMYICGDSTECSNLLLQYGSFCTQLNRALTGIAVEQDKNTQEVFAQVKQIYKTPPIKDFGGFNFSQILPDPSKPSKRSFIEDLLFNKVTLADAGFIKQYGDCLGDIAARDLICAQKFNGLTVLPPLLTDEMIAQYTSALLAGTITSGWWFGAGAALQIPFAMQMAYRFNGIGVTQNVLYENQKLIANQFNSAIGKIQDSLSSTASALGKLQDVVNQNAQALNTLVKQLSSNFGAISSVLNDILSRLDPPEAEVQIDRLITGRLQSLQTYVTQQLIRAAEIRWSANLAATKMSECVLGQSKRVDFCGKGYHLMSFPQSAPHGVVFLHVTYVPAQEKNFTTAPAICHDGKAHFPREGVFVSNGTHWFVTQRNFYEPQIITTDNTFVSGNCDVVIGIVNNTVYDPLQPELDS

SEQ ID NO: 2757 - protein, 1147 aa, Artificial Sequence
  SARS-CoV-2/Shenzhen/SZTH-001/2020__EPI_ISL_406592 spike protein (1-1147)(K986P_V987P_T887W_A1020W)
MFVFLVLLPLVSSQCVNLTTRTQLPPAYTNSFTRGVYYPDKVFRSSVLHSTQDLFLPFFSNVTWFHAIHVSGTNGTKRFDNPVLPFNDGVYFASTEKSNIIRGWIFGTTLDSKTQSLLIVNNATNVVIKVCEFQFCNDPFLGVYYHKNNKSWMESEFRVYSSANNCTFEYVSQPFLMDLEGKQGNFKNLREFVFKNIDGYFKIYSKHTPINLVRDLPQGFSALEPLVDLPIGINITRFQTLLALHRSYLTPGDSSSGWTAGAAAYYVGYLQPRTFLLKYNENGTITDAVDCALDPLSETKCTLKSFTVEKGIYQTSNFRVQPTESIVRFPNITNLCPFGEVFNATRFASVYAWNRKRISNCVADYSVLYNSASFSTFKCYGVSPTKLNDLCFTNVYADSFVIRGDEVRQIAPGQTGKIADYNYKLPDDFTGCVIAWNSNNLDSKVGGNYNYLYRLFRKSNLKPFERDISTEIYQAGSTPCNGVEGFNCYFPLQSYGFQPTNGVGYQPYRVVVLSFELLHAPATVCGPKKSTNLVKNKCVNFNFNGLTGTGVLTESNKKFLPFQQFGRDIADTTDAVRDPQTLEILDITPCSFGGVSVITPGTNTSNQVAVLYQDVNCTEVPVAIHADQLTPTWRVYSTGSNVFQTRAGCLIGAEHVNNSYECDIPIGAGICASYQTQTNSPRRARSVASQSIIAYTMSLGAENSVAYSNNSIAIPTNFTISVTTEILPVSMTKTSVDCTMYICGDSTECSNLLLQYGSFCTQLNRALTGIAVEQDKNTQEVFAQVKQIYKTPPIKDFGGFNFSQILPDPSKPSKRSFIEDLLFNKVTLADAGFIKQYGDCLGDIAARDLICAQKFNGLTVLPPLLTDEMIAQYTSALLAGTITSGWWFGAGAALQIPFAMQMAYRFNGIGVTQNVLYENQKLIANQFNSAIGKIQDSLSSTASALGKLQDVVNQNAQALNTLVKQLSSNFGAISSVLNDILSRLDPPEAEVQIDRLITGRLQSLQTYVTQQLIRAAEIRWSANLAATKMSECVLGQSKRVDFCGKGYHLMSFPQSAPHGVVFLHVTYVPAQEKNFTTAPAICHDGKAHFPREGVFVSNGTHWFVTQRNFYEPQIITTDNTFVSGNCDVLIGIVNNTVYDPLQPELDS

SEQ ID NO: 2758 - protein, 1147 aa, Artificial Sequence
  SARS-CoV-2/Shenzhen/SZTH-004/2020__EPI_ISL_406595 spike protein (1-1147)(K986P_V987P_T887W_A1020W)
MFVFLVLLPLVSSQCVNLTTRTQLPPAYTNSFTRGVYYPDKVFRSSVLHSTQDLFLPFFSNVTWFHAIHVSGTNGTKRFDNPVLPFNDGVYFASTEKSNIIRGWIFGTTLDSKTQSLLIVNNATNVVIKVCEFQFCNDPFLGVYYHKNNKSWMESEFRVYSSANNCTFEYVSQPFLMDLEGKQGNFKNLREFVFKNIDGYFKIYSKHTPINLVRDLPQGFSALEPLVDLPIGINITRFQTLLALHRSYLTPGDSSSGWTAGAAAYYVGYLQPRTFLLKYNENGTITDAVDCALDPLSETKCTLKSFTVEKGIYQTSNFRVQPTESIVRFPNITNLCPFGEVFNATRFASVYAWDRKRISNCVAYYSVLYNSASFSTFKCYGVSPTKLNDLCFTNVYADSFVIRGDEVRQIAPGQTGKIADYNYKLPDDFTGCVIAWNSNNLDSKVGGNYNYLYRLFRKSNLKPFERDISTEIYQAGSTPCNGVEGFNCYFPLQSYGFQPTNGVGYQPYRVVVLSFELLHAPATVCGPKKSTNLVKNKCVNFNFNGLTGTGVLTESNKKFLPFQQFGRDIADTTDAVRDPQTLEILDITPCSFGGVSVITPGTNTSNQVAVLYQDVNCTEVPVAIHADQLTPTWRVYSTGSNVFQTRAGCLIGAEHVNNSYECDIPIGAGICASYQTQTNSPRRARSVASQSIIAYTMSLGAENSVAYSNNSIAIPTNFTISVTTEILPVSMTKTSVDCTMYICGDSTECSNLLLQYGSFCTQLNRALTGIAVEQDKNTQEVFAQVKQIYKTPPIKDFGGFNFSQILPDPSKPSKRSFIEDLLFNKVTLADAGFIKQYGDCLGDIAARDLICAQKFNGLTVLPPLLTDEMIAQYTSALLAGTITSGWWFGAGAALQIPFAMQMAYRFNGIGVTQNVLYENQKLIANQFNSAIGKIQDSLSSTASALGKLQDVVNQNAQALNTLVKQLSSNFGAISSVLNDILSRLDPPEAEVQIDRLITGRLQSLQTYVTQQLIRAAEIRWSANLAATKMSECVLGQSKRVDFCGKGYHLMSFPQSAPHGVVFLHVTYVPAQEKNFTTAPAICHDGKAHFPREGVFVSNGTHWFVTQRNFYEPQIITTDNTFVSGNCDVVIGIVNNTVYDPLQPELDS

SEQ ID NO: 2759 - protein, 1147 aa, Artificial Sequence
  SARS-CoV-2/France/IDF0372/2020__EPI_ISL_406596 spike protein (1-1147)(K986P_V987P_T887W_A1020W)
MFVFLVLLPLVSSQCVNLTTRTQLPPAYTNSFTRGVYYPDKVFRSSVLHSTQDLFLPFFSNVTWFHAIHVSGTNGTKRFDNPVLPFNDGVYFASTEKSNIIRGWIFGTTLDSKTQSLLIVNNATNVVIKVCEFQFCNDPFLGVYYHKNNKSWMESEFRVYSSANNCTFEYVSQPFLMDLEGKQGNFKNLREFVFKNIDGYFKIYSKHTPINLVRDLPQGFSALEPLVDLPIGINITRFQTLLALHRSYLTPGDSSSGWTAGAAAYYVGYLQPRTFLLKYNENGTITDAVDCALDPLSETKCTLKSFTVEKGIYQTSNFRVQPTESIVRFPNITNLCPFGEVFNATRFASVYAWNRKRISNCVADYSFLYNSASFSTFKCYGVSPTKLNDLCFTNVYADSFVIRGDEVRQIAPGQTGKIADYNYKLPDDFTGCVIAWNSNNLDSKVGGNYNYLYRLFRKSNLKPFERDISTEIYQAGSTPCNGVEGFNCYFPLQSYGFQPTNGVGYQPYRVVVLSFELLHAPATVCGPKKSTNLVKNKCVNFNFNGLTGTGVLTESNKKFLPFQQFGRDIADTTDAVRDPQTLEILDITPCSFGGVSVITPGTNTSNQVAVLYQDVNCTEVPVAIHADQLTPTWRVYSTGSNVFQTRAGCLIGAEHVNNSYECDIPIGAGICASYQTQTNSPRRARSVASQSIIAYTMSLGAENSVAYSNNSIAIPTNFTISVTTEILPVSMTKTSVDCTMYICGDSTECSNLLLQYGSFCTQLNRALTGIAVEQDKNTQEVFAQVKQIYKTPPIKDFGGFNFSQILPDPSKPSKRSFIEDLLFNKVTLADAGFIKQYGDCLGDIAARDLICAQKFNGLTVLPPLLTDEMIAQYTSALLAGTITSGWWFGAGAALQIPFAMQMAYRFNGIGVTQNVLYENQKLIANQFNSAIGKIQDSLSSTASALGKLQDVVNQNAQALNTLVKQLSSNFGAISSVLNDILSRLDPPEAEVQIDRLITGRLQSLQTYVTQQLIRAAEIRWSANLAATKMSECVLGQSKRVDFCGKGYHLMSFPQSAPHGVVFLHVTYVPAQEKNFTTAPAICHDGKAHFPREGVFVSNGTHWFVTQRNFYEPQIITTDNTFVSGNCDVVIGIVNNTVYDPLQPELDS

SEQ ID NO: 2760 - protein, 1147 aa, Artificial Sequence
  SARS-CoV-2/Australia/VIC01/2020__EPI_ISL_406844 spike protein (1-1147)(K986P_V987P_T887W_A1020W)
MFVFLVLLPLVSSQCVNLTTRTQLPPAYTNSFTRGVYYPDKVFRSSVLHSTQDLFLPFFSNVTWFHAIHVSGTNGTKRFDNPVLPFNDGVYFASTEKSNIIRGWIFGTTLDSKTQSLLIVNNATNVVIKVCEFQFCNDPFLGVYYHKNNKSWMESEFRVYSSANNCTFEYVSQPFLMDLEGKQGNFKNLREFVFKNIDGYFKIYSKHTPINLVRDLPQGFSALEPLVDLPIGINITRFQTLLALHRRYLTPGDSSSGWTAGAAAYYVGYLQPRTFLLKYNENGTITDAVDCALDPLSETKCTLKSFTVEKGIYQTSNFRVQPTESIVRFPNITNLCPFGEVFNATRFASVYAWNRKRISNCVADYSVLYNSASFSTFKCYGVSPTKLNDLCFTNVYADSFVIRGDEVRQIAPGQTGKIADYNYKLPDDFTGCVIAWNSNNLDSKVGGNYNYLYRLFRKSNLKPFERDISTEIYQAGSTPCNGVEGFNCYFPLQSYGFQPTNGVGYQPYRVVVLSFELLHAPATVCGPKKSTNLVKNKCVNFNFNGLTGTGVLTESNKKFLPFQQFGRDIADTTDAVRDPQTLEILDITPCSFGGVSVITPGTNTSNQVAVLYQDVNCTEVPVAIHADQLTPTWRVYSTGSNVFQTRAGCLIGAEHVNNSYECDIPIGAGICASYQTQTNSPRRARSVASQSIIAYTMSLGAENSVAYSNNSIAIPTNFTISVTTEILPVSMTKTSVDCTMYICGDSTECSNLLLQYGSFCTQLNRALTGIAVEQDKNTQEVFAQVKQIYKTPPIKDFGGFNFSQILPDPSKPSKRSFIEDLLFNKVTLADAGFIKQYGDCLGDIAARDLICAQKFNGLTVLPPLLTDEMIAQYTSALLAGTITSGWWFGAGAALQIPFAMQMAYRFNGIGVTQNVLYENQKLIANQFNSAIGKIQDSLSSTASALGKLQDVVNQNAQALNTLVKQLSSNFGAISSVLNDILSRLDPPEAEVQIDRLITGRLQSLQTYVTQQLIRAAEIRWSANLAATKMSECVLGQSKRVDFCGKGYHLMSFPQSAPHGVVFLHVTYVPAQEKNFTTAPAICHDGKAHFPREGVFVSNGTHWFVTQRNFYEPQIITTDNTFVSGNCDVVIGIVNNTVYDPLQPELDS

SEQ ID NO: 2761 - protein, 1147 aa, Artificial Sequence
  SARS-CoV-2/Germany/BavPat1/2020__EPI_ISL_406862 spike protein (1-1147)(K986P_V987P_T887W_A1020W)
MFVFLVLLPLVSSQCVNLTTRTQLPPAYTNSFTRGVYYPDKVFRSSVLHSTQDLFLPFFSNVTWFHAIHVSGTNGTKRFDNPVLPFNDGVYFASTEKSNIIRGWIFGTTLDSKTQSLLIVNNATNVVIKVCEFQFCNDPFLGVYYHKNNKSWMESEFRVYSSANNCTFEYVSQPFLMDLEGKQGNFKNLREFVFKNIDGYFKIYSKHTPINLVRDLPQGFSALEPLVDLPIGINITRFQTLLALHRSYLTPGDSSSGWTAGAAAYYVGYLQPRTFLLKYNENGTITDAVDCALDPLSETKCTLKSFTVEKGIYQTSNFRVQPTESIVRFPNITNLCPFGEVFNATRFASVYAWNRKRISNCVADYSVLYNSASFSTFKCYGVSPTKLNDLCFTNVYADSFVIRGDEVRQIAPGQTGKIADYNYKLPDDFTGCVIAWNSNNLDSKVGGNYNYLYRLFRKSNLKPFERDISTEIYQAGSTPCNGVEGFNCYFPLQSYGFQPTNGVGYQPYRVVVLSFELLHAPATVCGPKKSTNLVKNKCVNFNFNGLTGTGVLTESNKKFLPFQQFGRDIADTTDAVRDPQTLEILDITPCSFGGVSVITPGTNTSNQVAVLYQGVNCTEVPVAIHADQLTPTWRVYSTGSNVFQTRAGCLIGAEHVNNSYECDIPIGAGICASYQTQTNSPRRARSVASQSIIAYTMSLGAENSVAYSNNSIAIPTNFTISVTTEILPVSMTKTSVDCTMYICGDSTECSNLLLQYGSFCTQLNRALTGIAVEQDKNTQEVFAQVKQIYKTPPIKDFGGFNFSQILPDPSKPSKRSFIEDLLFNKVTLADAGFIKQYGDCLGDIAARDLICAQKFNGLTVLPPLLTDEMIAQYTSALLAGTITSGWWFGAGAALQIPFAMQMAYRFNGIGVTQNVLYENQKLIANQFNSAIGKIQDSLSSTASALGKLQDVVNQNAQALNTLVKQLSSNFGAISSVLNDILSRLDPPEAEVQIDRLITGRLQSLQTYVTQQLIRAAEIRWSANLAATKMSECVLGQSKRVDFCGKGYHLMSFPQSAPHGVVFLHVTYVPAQEKNFTTAPAICHDGKAHFPREGVFVSNGTHWFVTQRNFYEPQIITTDNTFVSGNCDVVIGIVNNTVYDPLQPELDS

SEQ ID NO: 2762 - protein, 1147 aa, Artificial Sequence
  SARS-CoV-2/Wuhan/HBCDC-HB-02/2020__EPI_ISL_412978 spike protein (1-1147)(K986P_V987P_T887W_A1020W)
MFVFLVLLPLVSSQCVNLTTRTQLPPAYTNSFTRGVYYPDKVFRSSVLHSTQDLFLPFFSNVTWFHAIHVSGTNGTKRFDNPVLPFNDGVYFASTEKSNIIRGWIFGTTLDSKTQSLLIVNNATNVVIKVCEFQFCNDPFLGVYYHKNNKSWMESEFRVYSSANNCTFEYVSQPFLMDLEGKQGNFKNLREFVFKNIDGYFKIYSKHTPINLVRDLPQGFSALEPLVDLPIGINITRFQTLLALHRSYLTPGDSSSGWTAGAAAYYVGYLQPRTFLLKYNENGTITDAVDCALDPLSETKCTLKSFTVEKGIYQTSNFRVQPTESIVRFPNITNLCPFGEVFNATRFASVYAWNRKRISNCVADYSVLYNSASFSTFKCYGVSPTKLNDLCFTNVYADSFVIRGDEVRQIAPGQTGKIADYNYKLPDDFTGCVIAWNSNNLDSKVGGNYNYLYRLFRKSNLKPFERDISTEIYQAGSTPCNGVEGFNCYFPLQSYGFQPTNGVGYQPYRVVVLSFELLHAPATVCGPKKSTNLVKNKCVNFNFNGLTGTGVLTESNKKFLPFQQFGRDIADTTDAVRDPQTLEILDITPCSFGGVSVITPGTNTSNQVAVLYQDVNCTEVPVAIHADQLTPTWRVYSTGSNVFQTRAGCLIGAEHVNNSYECDIPIGAGICASYQTQTNSPRRARSVASQSIIAYTMSLGAENSVAYSNNSIAIPTNFTISVTTEILPVSMTKTSVDCTMYICGDSTECSNFLLQYGSFCTQLNRALTGIAVEQDKNTQEVFAQVKQIYKTPPIKDFGGFNFSQILPDPSKPSKRSFIEDLLFNKVTLADAGFIKQYGDCLGDIAARDLICAQKFNGLTVLPPLLTDEMIAQYTSALLAGTITSGWWFGAGAALQIPFAMQMAYRFNGIGVTQNVLYENQKLIANQFNSAIGKIQDSLSSTASALGKLQDVVNQNAQALNTLVKQLSSNFGAISSVLNDILSRLDPPEAEVQIDRLITGRLQSLQTYVTQQLIRAAEIRWSANLAATKMSECVLGQSKRVDFCGKGYHLMSFPQSAPHGVVFLHVTYVPAQEKNFTTAPAICHDGKAHFPREGVFVSNGTHWFVTQRNFYEPQIITTDNTFVSGNCDVVIGIVNNTVYDPLQPELDS

SEQ ID NO: 2763 - protein, 1147 aa, Artificial Sequence
  SARS-CoV-2/Australia/QLD02/2020__EPI_ISL_407896 spike protein (1-1147)(K986P_V987P_T887W_A1020W)
MFVFLVLLPLVSSQCVNLTTRTQLPPAYTNSFTRGVYYPDKVFRSSVLHSTQDLFLPFFSNVTWFHAIHVSGTNGTKRFDNPVLPFNDGVYFASTEKSNIIRGWIFGTTLDSKTQSLLIVNNATNVVIKVCEFQFCNDPFLGVYYHKNNKSWMESEFRVYSSANNCTFEYVSQPFLMDLEGKQGNFKNLREFVFKNIDGYFKIYSKHTPINLVRDLPQGFSALEPLVDLPIGINITRFQTLLALHRSYLTPGDSSSGWTAGAAAYYVGYLQPRTFLLKYNENGTITDAVDCALDPLSETKCTLKSFTVEKGIYQTSNFRVQPTESIVRFPNITNLCPFGEVFNATRFASVYAWNRKRISNCVADYSVLYNSASFSTFKCYGVSPTKLNDLCFTNVYADSFVIRGDEVRQIAPGQTGKIADYNYKLPDDFTGCVIAWNSNNLDSKVGGNYNYLYRLFRKSNLKPFERDISTEIYQAGSTPCNGVEGFNCYFPLQSYGFQPTNGVGYQPYRVVVLSFELLHAPATVCGPKKSTNLVKNKCVNFNFNGLTGTGVLTESNKKFLPFQQFGRDIADTTDAVRDPQTLEILDITPCSFGGVSVITPGTNTSNQVAVLYQDVNCTEVPVAIHADQLTPTWRVYSTGSNVFQTRAGCLIGAEHVNNSYECDIPIGAGICASYQTQTNSPRRARSVASQSIIAYTMSLGAENSVAYSNNSIAIPTNFTISVTTEILPVSMTKTSVDCTMYICGDSTECSNLLLQYGSFCTQLNRALTGIAVEQDKNTQEVFAQVKQIYKTPPIKDFGGFNFSQILPDPSKPSKRSFIEDLLFNKVTLADAGFIKQYGDCLGDIAARDLICAQKFNGLTVLPPLLTDEMIAQYTSALLAGTITSGWWFGAGAALQIPFAMQMAYRFNGIGVTQNVLYENQKLIANQFNSAIGKIQDSLSSTASALGKLQDVVNQNAQALNTLVKQLSSNFGAISSVLNDILSRLDPPEAEVQIDRLITGRLQSLQTYVTQQLIRAAEIRWSANLAATKMSECVLGQSKRVDFCGKGYHLMSFPQSAPHGVVFLHVTYVPAQEKNFTTAPAICHDGKAHFPREGVFVSNGTHWFVTQRNFYEPQIITTDNTFVSGNCDVVIGIVNNTVYDPLQLELDS

SEQ ID NO: 2764 - protein, 1147 aa, Artificial Sequence
  SARS-CoV-2/India/1-31/2020__EPI_ISL_413523 spike protein (1-1147)(K986P_V987P_T887W_A1020W)
MFVFLVLLPLVSSQCVNLTTRTQLPPAYTNSFTRGVYYPDKVFRSSVLHSTQDLFLPFFSNVTWFHAIHVSGTNGTKRFDNPVLPFNDGVYFASTEKSNIIRGWIFGTTLDSKTQSLLIVNNATNVVIKVCEFQFCNDPFLGVYYHKNNKSWMESEFRVYSSANNCTFEYVSQPFLMDLEGKQGNFKNLREFVFKNIDGYFKIYSKHTPINLVRDLPQGFSALEPLVDLPIGINITRFQTLLALHRSYLTPGDSSSGWTAGAAAYYVGYLQPRTFLLKYNENGTITDAVDCALDPLSETKCTLKSFTVEKGIYQTSNFRVQPTESIVRFPNITNLCPFGEVFNATRFASVYAWNRKRISNCVADYSVLYNSASFSTFKCYGVSPTKLNDLCFTNVYADSFVIRGDEVRQIAPGQTGKIADYNYKLPDDFTGCVIAWNSNNLDSKVGGNYNYLYRLFRKSNLKPFERDISTEIYQAGSTPCNGVEGFNCYFPLQSYGFQPTNGVGYQPYRVVVLSFELLHAPATVCGPKKSTNLVKNKCVNFNFNGLTGTGVLTESNKKFLPFQQFGRDIADTTDAVRDPQTLEILDITPCSFGGVSVITPGTNTSNQVAVLYQDVNCTEVPVAIHADQLTPTWRVYSTGSNVFQTRAGCLIGAEHVNNSYECDIPIGAGICASYQTQTNSPRRARSVASQSIIAYTMSLGAENSVAYSNNSIAIPTNFTISVTTEILPVSMTKTSVDCTMYICGDSTECSNLLLQYGSFCTQLNRALTGIAVEQDKNTQEVFAQVKQIYKTPPIKDFGGFNFSQILPDPSKPSKRSFIEDLLFNKVTLADAGFIKQYGDCLGDIAARDLICAQKFNGLTVLPPLLTDEMIAQYTSALLAGTITSGWWFGAGAALQIPFAMQMAYRFNGIGVTQNVLYENQKLIANQFNSVIGKIQDSLSSTASALGKLQDVVNQNAQALNTLVKQLSSNFGAISSVLNDILSRLDPPEAEVQIDRLITGRLQSLQTYVTQQLIRAAEIRWSANLAATKMSECVLGQSKRVDFCGKGYHLMSFPQSAPHGVVFLHVTYVPAQEKNFTTAPAICHDGKAHFPREGVFVSNGTHWFVTQRNFYEPQIITTDNTFVSGNCDVVIGIVNNTVYDPLQPELDS

SEQ ID NO: 2765 - protein, 1147 aa, Artificial Sequence
  SARS-CoV-2/Guangdong/GD2020087-P0008/2020__EPI_ISL_413863 spike protein (1-1147)(K986P_V987P_T887W_A1020W)
MFVFLVLLPLVSSQCVNLTTRTQLPPAYTNSFTRGVYYPDKVFRSSVLHSTQDLFLPFFSNVTWFHAIHVSGTNGTKRFDNPVLPFNDGVYFASTEKSNIIRGWIFGTTLDSKTQSLLIVNNATNVVIKVCEFQFCNDPFLGVYYHKNNKSWMESEFRVYSSANNCTFEYVSQPFLMDLEGKQGNFKNLREFVFKNIDGYFKIYSKHTPINLVRDLPQGFSALEPLVDLPIGINITRFQTLLALHRSYLTPGDSSSGWTAGAAAYYVGYLQPRTFLLKYNENGTITDAVDCALDPLSETKCTLKSFTVEKGIYQTSNFRVQPTESIVRFPNITNLCPFGEVFNATRFASVYAWNRKRISNCVADYSVLYNSASFSTFKCYGVSPTKLNDLCFTNVYADSFVIRGDEVREIAPGQTGKIADYNYKLPDDFTGCVIAWNSNNLDSKVGGNYNYLYRLFRKSNLKPFERDISTEIYQAGSTPCNGVEGFNCYFPLQSYGFQPTNGVGYQPYRVVVLSFELLHAPATVCGPKKSTNLVKNKCVNFNFNGLTGTGVLTESNKKFLPFQQFGRDIADTTDAVRDPQTLEILDITPCSFGGVSVITPGTNTSNQVAVLYQDVNCTEVPVAIHADQLTPTWRVYSTGSNVFQTRAGCLIGAEHVNNSYECDIPIGAGICASYQTQTNSPRRARSVASQSIIAYTMSLGAENSVAYSNNSIAIPTNFTISVTTEILPVSMTKTSVDCTMYICGDSTECSNLLLQYGSFCTQLNRALTGIAVEQDKNTQEVFAQVKQIYKTPPIKDFGGFNFSQILPDPSKPSKRSFIEDLLFNKVTLADAGFIKQYGDCLGDIAARDLICAQKFNGLTVLPPLLTDEMIAQYTSALLAGTITSGWWFGAGAALQIPFAMQMAYRFNGIGVTQNVLYENQKLIANQFNSAIGKIQDSLSSTASALGKLQDVVNQNAQALNTLVKQLSSNFGAISSVLNDILSRLDPPEAEVQIDRLITGRLQSLQTYVTQQLIRAAEIRWSANLAATKMSECVLGQSKRVDFCGKGYHLMSFPQSAPHGVVFLHVTYVPAQEKNFTTAPAICHDGKAHFPREGVFVSNGTHWFVTQRNFYEPQIITTDNTFVSGNCDVVIGIVNNTVYDPLQPELDS

SEQ ID NO: 2766 - protein, 1147 aa, Artificial Sequence
  SARS-CoV-2/Sweden/01/2020__EPI_ISL_411951 spike protein (1-1147)(K986P_V987P_T887W_A1020W)
MFVFLVLLPLVSSQCVNLTTRTQLPPAYTNSFTRGVYYPDKVFRSSVLHSTQDLFLPFFSNVTWFHAIHVSGTNGTKRFDNPVLPFNDGVYFASTEKSNIIRGWIFGTTLDSKTQSLLIVNNATNVVIKVCEFQFCNDPFLGVYYHKNNKSWMESEFRVYSSANNCTFEYVSQPFLMDLEGKQGNFKNLREFVFKNIDGYFKIYSKHTPINLVRDLPQGFSALEPLVDLPIGINITRFQTLLALHRSYLTPGDSSSGWTAGAAAYYVGYLQPRTFLLKYNENGTITDAVDCALDPLSETKCTLKSFTVEKGIYQTSNFRVQPTESIVRFPNITNLCPFGEVFNATRFASVYAWNRKRISNCVADYSVLYNSASFSTFKCYGVSPTKLNDLCFTNVYADSFVIRGDEVRQIAPGQTGKIADYNYKLPDDFTGCVIAWNSNNLDSKVGGNYNYLYRLFRKSNLKPFERDISTEIYQAGSTPCNGVEGFNCYFPLQSYGFQPTNGVGYQPYRVVVLSFELLHAPATVCGPKKSTNLVKNKCVNFNFNGLTGTGVLTESNKKFLPFQQFGRDIADTTDAVRDPQTLEILDITPCSFGGVSVITPGTNTSNQVAVLYQDVNCTEVPVAIHADQLTPTWRVYSTGSNVFQTRAGCLIGAEHVNNSYECDIPIGAGICASYQTQTNSPRRARSVASQSIIAYTMSLGAENSVAYSNNSIAIPTNFTISVTTEILPVSMTKTSVDCTMYICGDSTECSNLLLQYGSFCTQLNRALTGIAVEQDKNTQEVFAQVKQIYKTPPIKDCGGFNFSQILPDPSKPSKRSFIEDLLFNKVTLADAGFIKQYGDCLGDIAARDLICAQKFNGLTVLPPLLTDEMIAQYTSALLAGTITSGWWFGAGAALQIPFAMQMAYRFNGIGVTQNVLYENQKLIANQFNSAIGKIQDSLSSTASALGKLQDVVNQNAQALNTLVKQLSSNFGAISSVLNDILSRLDPPEAEVQIDRLITGRLQSLQTYVTQQLIRAAEIRWSANLAATKMSECVLGQSKRVDFCGKGYHLMSFPQSAPHGVVFLHVTYVPAQEKNFTTAPAICHDGKAHFPREGVFVSNGTHWFVTQRNFYEPQIITTDNTFVSGNCDVVIGIVNNTVYDPLQPELDS

SEQ ID NO: 2767 - protein, 1147 aa, Artificial Sequence
  SARS-CoV-2/Tianmen/HBCDC-HB-07/2020__EPI_ISL_412983 spike protein (1-1147)(K986P_V987P_T887W_A1020W)
MFVFLVLLPLVSSQCVNLTTRTQLPPAYTNSFTRGVYYPDKVFRSSVLHSTQDLFLPFFSNVTWFHAIHVSGTNGTKRFDNPVLPFNDGVYFASTEKSNIIRGWIFGTTLDSKTQSLLIVNNATNVVIKVCEFQFCNDPFLGVYYHKNNKSWMESEFRVYSSANNCTFEYVSQPFLMDLEGKQGNFKNLREFVFKNIDGYFKIYSKHTPINLVRDLPQGFSALEPLVDLPIGINITRFQTLLALHRSYLTPGDSSSGWTAGAAAYYVGYLQPRTFLLKYNENGTITDAVDCALDPLSETKCTLKSFTVEKGIYQTSNFRVQPTESIVRFPNITNLCPFGEVFNATRFASVYAWNRKRISNCVADYSVLYNSASFSTFKCYGVSPTKLNDLCFTNVYADSFVIRGDEVRQIAPGQTGKIADYNYKLPDDFTGCVIAWNSNNLDSKVGGNYNYLYRLFRKSNLKPFERDISTEIYQAGSTPCNGVEGFNCYFPLQSYGFQPTNGVGYQPYRVVVLSFELLHAPATVCGPKKSTNLVKNKCVNFNFNGLTGTGVLTESNKKFLPFQQFGRDIADTTDAVRDPQTLEILDITPCSFGGVSVITPGTNTSNQVAVLYQDLNCTEVPVAIHADQLTPTWRVYSTGSNVFQTRAGCLIGAEHVNNSYECDIPIGAGICASYQTQTNSPRRARSVASQSIIAYTMSLGAENSVAYSNNSIAIPTNFTISVTTEILPVSMTKTSVDCTMYICGDSTECSNLLLQYGSFCTQLNRALTGIAVEQDKNTQEVFAQVKQIYKTPPIKDFGGFNFSQILPDPSKPSKRSFIEDLLFNKVTLADAGFIKQYGDCLGDIAARDLICAQKFNGLTVLPPLLTDEMIAQYTSALLAGTITSGWWFGAGAALQIPFAMQMAYRFNGIGVTQNVLYENQKLIANQFNSAIGKIQDSLSSTASALGKLQDVVNQNAQALNTLVKQLSSNFGAISSVLNDILSRLDPPEAEVQIDRLITGRLQSLQTYVTQQLIRAAEIRWSANLAATKMSECVLGQSKRVDFCGKGYHLMSFPQSAPHGVVFLHVTYVPAQEKNFTTAPAICHDGKAHFPREGVFVSNGTHWFVTQRNFYEPQIITTDNTFVSGNCDVVIGIVNNTVYDPLQPELDS

SEQ ID NO: 2768 - protein, 1147 aa, Artificial Sequence
  SARS-CoV-2/Hong Kong/case42_VM20002493/2020__EPI_ISL_414527 spike protein (1-1147)(K986P_V987P_T887W_A1020W)
MFVFLVLLPLVSSQCVNLTTRTQLPPAYTNSFTRGVYYPDKVFRSSVLHSTQDLFLPFFSNVTWFHAIHVSGTNGTKRFDNPVLPFNDGVYFASTEKSNIIRGWIFGTTLDSKTQSLLIVNNATNVVIKVCEFQFCNDPFLGVYYHKNNKSWMESEFRVYSSANNCTFEYVSQPFLMDLEGKQGNFKNLREFVFKNIDGYFKIYSKHTPINLVRDLPQGFSALEPLVDLPIGINITRFQTLLALHRSYLTPGDSSSGWTAGAAAYYVGYLQPRTFLLKYNENGTITDAVDCALDPLSETKCTLKSFTVEKGIYQTSNFRVQPTESIVRFPNITNLCPFGEVFNATRFASVYAWNRKRISNCVADYSVLYNSASFSTFKCYGVSPTKLNDLCFTNVYADSFVIRGDEVRQIAPGQTGKIADYNYKLPDDFTGCVIAWNSNNLDSKVGGNYNYLYRLFRKSNLKPFERDISTEIYQAGSTPCNGVEGFNCYFPLQSYGFQPTNGVGYQPYRVVVLSFELLHAPATVCGPKKSTNLVKNKCVNFNFNGLTGTGVLTESNKKFLPFQQFGRDIADTTDAVRDPQTLEILDITPCSFGGVSVITPGTNTSNQVAVLYQDVNCTEVPVAIHADQLTPTWRVYSTGSNVFQTRAGCLIGAEHVNNSYECDIPIGAGICASYQTQTNSPRRARSVASQSIIAYTMSLGAENSVAYSNNSIAIPTNFAISVTTEILPVSMTKTSVDCTMYICGDSTECSNLLLQYGSFCTQLNRALTGIAVEQDKNTQEVFAQVKQIYKTPPIKDFGGFNFSQILPDPSKPSKRSFIEDLLFNKVTLADAGFIKQYGDCLGDIAARDLICAQKFNGLTVLPPLLTDEMIAQYTSALLAGTITSGWWFGAGAALQIPFAMQMAYRFNGIGVTQNVLYENQKLIANQFNSAIGKIQDSLSSTASALGKLQDVVNQNAQALNTLVKQLSSNFGAISSVLNDILSRLDPPEAEVQIDRLITGRLQSLQTYVTQQLIRAAEIRWSANLAATKMSECVLGQSKRVDFCGKGYHLMSFPQSAPHGVVFLHVTYVPAQEKNFTTAPAICHDGKAHFPREGVFVSNGTHWFVTQRNFYEPQIITTDNTFVSGNCDVVIGIVNNTVYDPLQPELDS

SEQ ID NO: 2769 - protein, 1147 aa, Artificial Sequence
  SARS-CoV-2/USA/CruiseA-23/2020__EPI_ISL_414482 spike protein (1-1147)(K986P_V987P_T887W_A1020W)
MFVFLVLLPLVSSQCVNLTTRTQLPPAYTNSFTRGVYYPDKVFRSSVLHSTQDLFLPFFSNVTWFHAIHVSGTNGTKRFDNPVLPFNDGVYFASTEKSNIIRGWIFGTTLDSKTQSLLIVNNATNVVIKVCEFQFCNDPFLGVYYHKNNKSWMESEFRVYSSANNCTFEYVSQPFLMDLEVKQGNFKNLREFVFKNIDGYFKIYSKHTPINLVRDLPQGFSALEPLVDLPIGINITRFQTLLALHRSYLTPGDSSSGWTAGAAAYYVGYLQPRTFLLKYNENGTITDAVDCALDPLSETKCTLKSFTVEKGIYQTSNFRVQPTESIVRFPNITNLCPFGEVFNATRFASVYAWNRKRISNCVADYSVLYNSASFSTFKCYGVSPTKLNDLCFTNVYADSFVIRGDEVRQIAPGQTGKIADYNYKLPDDFTGCVIAWNSNNLDSKVGGNYNYLYRLFRKSNLKPFERDISTEIYQAGSTPCNGVEGFNCYFPLQSYGFQPTNGVGYQPYRVVVLSFELLHAPATVCGPKKSTNLVKNKCVNFNFNGLTGTGVLTESNKKFLPFQQFGRDIADTTDAVRDPQTLEILDITPCSFGGVSVITPGTNTSNQVAVLYQDVNCTEVPVAIHADQLTPTWRVYSTGSNVFQTRAGCLIGAEHVNNSYECDIPIGAGICASYQTQTNSPRRARSVASQSIIAYTMSLGAENSVAYSNNSIAIPTNFTISVTTEILPVSMTKTSVDCTMYICGDSTECSNLLLQYGSFCTQLNRALTGIAVEQDKNTQEVFAQVKQIYKTPPIKDFGGFNFSQILPDPSKPSKRSFIEDLLFNKVTLADAGFIKQYGDCLGDIAARDLICAQKFNGLTVLPPLLTDEMIAQYTSALLAGTITSGWWFGAGAALQIPFAMQMAYRFNGIGVTQNVLYENQKLIANQFNSAIGKIQDSLSSTASALGKLQDVVNQNAQALNTLVKQLSSNFGAISSVLNDILSRLDPPEAEVQIDRLITGRLQSLQTYVTQQLIRAAEIRWSANLAATKMSECVLGQSKRVDFCGKGYHLMSFPQSAPHGVVFLHVTYVPAQEKNFTTAPAICHDGKAHFPREGVFVSNGTHWFVTQRNFYEPQIITTDNTFVSGNCDVVIGIVNNTVYDPLQPELDS

SEQ ID NO: 2770 - protein, 1147 aa, Artificial Sequence
  SARS-CoV-2/Hong Kong/case85_VM20002868/2020__EPI_ISL_414519 spike protein (1-1147)(K986P_V987P_T887W_A1020W)
MFVFLVLVPLVSSQCVNLTTRTQLPPAYTNSFTRGVYYPDKVFRSSVLHSTQDLFLPFFSNVTWFHAIHVSGTNGTKRFDNPVLPFNDGVYFASTEKSNIIRGWIFGTTLDSKTQSLLIVNNATNVVIKVCEFQFCNDPFLGVYYHKNNKSWMESEFRVYSSANNCTFEYVSQPFLMDLEGKQGNFKNLREFVFKNIDGYFKIYSKHTPINLVRDLPQGFSALEPLVDLPIGINITRFQTLLALHRSYLTPGDSSSGWTAGAAAYYVGYLQPRTFLLKYNENGTITDAVDCALDPLSETKCTLKSFTVEKGIYQTSNFRVQPTESIVRFPNITNLCPFGEVFNATRFASVYAWNRKRISNCVADYSVLYNSASFSTFKCYGVSPTKLNDLCFTNVYADSFVIRGDEVRQIAPGQTGKIADYNYKLPDDFTGCVIAWNSNNLDSKVGGNYNYLYRLFRKSNLKPFERDISTEIYQAGSTPCNGVEGFNCYFPLQSYGFQPTNGVGYQPYRVVVLSFELLHAPATVCGPKKSTNLVKNKCVNFNFNGLTGTGVLTESNKKFLPFQQFGRDIADTTDAVRDPQTLEILDITPCSFGGVSVITPGTNTSNQVAVLYQDVNCTEVPVAIHADQLTPTWRVYSTGSNVFQTRAGCLIGAEHVNNSYECDIPIGAGICASYQTQTNSPRRARSVASQSIIAYTMSLGAENSVAYSNNSIAIPTNFTISVTTEILPVSMTKTSVDCTMYICGDSTECSNLLLQYGSFCTQLNRALTGIAVEQDKNTQEVFAQVKQIYKTPPIKDFGGFNFSQILPDPSKPSKRSFIEDLLFNKVTLADAGFIKQYGDCLGDIAARDLICAQKFNGLTVLPPLLTDEMIAQYTSALLAGTITSGWWFGAGAALQIPFAMQMAYRFNGIGVTQNVLYENQKLIANQFNSAIGKIQDSLSSTASALGKLQDVVNQNAQALNTLVKQLSSNFGAISSVLNDILSRLDPPEAEVQIDRLITGRLQSLQTYVTQQLIRAAEIRWSANLAATKMSECVLGQSKRVDFCGKGYHLMSFPQSAPHGVVFLHVTYVPAQEKNFTTAPAICHDGKAHFPREGVFVSNGTHWFVTQRNFYEPQIITTDNTFVSGNCDVVIGIVNNTVYDPLQPELDS

SEQ ID NO: 2771 - protein, 1147 aa, Artificial Sequence; identical to SEQ ID NO: 2761
  SARS-CoV-2/England/200990660/2020__EPI_ISL_414523 spike protein (1-1147)(K986P_V987P_T887W_A1020W)

SEQ ID NO: 2772 - protein, 1147 aa, Artificial Sequence
  SARS-CoV-2/Australia/NSW09/2020__EPI_ISL_413595 spike protein (1-1147)(K986P_V987P_T887W_A1020W)
MFVFLVLLPLVSSQCVNLTTRTQLPPAYTNSFTRGVYYPDKVFRSSVLHSTQDLFLPFFSNVTWFHAIHVSGTNGTKRFDNPVLPFNDGVYFASTEKSNIIRGWIFGTTLDSKTQSLLIVNNATNVVIKVCEFQFCNDPFLGVYYHKNNKSWMESEFRVYSSANNCTFEYVSQPFLMDLEGKQGNFKNLREFVFKNIDGYFKIYSKHTPINLVRDLPQGFSALEPLVDLPIGINITRFQTLLALHRSYLTPGDSSSGWTAGAAAYYVGYLQPRTFLLKYNENGTITDAVDCALDPLSETKCTLKSFTVEKGIYQTSNFRVQPTESIVRFPNITNLCPFGEVFNATRFASVYAWNRKRISNCVADYSVLYNSASFSTFKCYGVSPTKLNDLCFTNVYADSFVIRGDEVRQIAPGQTGKIADYNYKLPDDFTGCVIAWNSNNLDSKVGGNYNYLYRLFRKSNLKPFERDISTEIYQAGSTPCNGVEGFNCYFPLQSYGFQPTNGVGYQPYRVVVLSFELLHAPATVCGPKKSTNLVKNKCVNFNFNGLTGTGVLTESNKKFLPFQQFGRDIADTTDAVRDPQTLEILDITPCSFGGVSVITPGTNTSNQVAVLYQDVNCTEVPVAIHADQLTPTWRVYSTGSNVFQTRAGCLIGAEHVNNSYECDIPIGAGICASYQTQTNSPRRARSVASQSIIAYTMSLGAENSVAYSNNSIAIPTNFTISVTTEILPVSMTKTSVDCTMYICGDSTECSNLLLQYGSFCTQLNRALTGIAVEQDKNTQEVFAQVKQIYKTPPIKDFGGFNFSQILPDPSKPSKRSFIEDLLFNKVTLADAGFIKQYGDCLGDIAARDLICAQKFNGLTVLPPLLTDEMIAQYTSALLAGTITSGWWFGAGAALQIPFAMQMAYRFNGIGVTQNVLYENQKLIANQFNSAIGKIQDSLSFTASALGKLQDVVNQNAQALNTLVKQLSSNFGAISSVLNDILSRLDPPEAEVQIDRLITGRLQSLQTYVTQQLIRAAEIRWSANLAATKMSECVLGQSKRVDFCGKGYHLMSFPQSAPHGVVFLHVTYVPAQEKNFTTAPAICHDGKAHFPREGVFVSNGTHWFVTQRNFYEPQIITTDNTFVSGNCDVVIGIVNNTVYDPLQPELDS

SEQ ID NO: 2773 - protein, 1147 aa, Artificial Sequence; identical to SEQ ID NO: 2753
  SARS-CoV-2/Australia/NSW10/2020__EPI_ISL_413596 spike protein (1-1147)(K986P_V987P_T887W_A1020W)

SEQ ID NO: 2774 - protein, 1147 aa, Artificial Sequence
  SARS-CoV-2/Switzerland/1000477797/2020__EPI_ISL_413023 spike protein (1-1147)(K986P_V987P_T887W_A1020W)
MFVFLVLLPLVSSQCVNLTTRTQLPPAYTNSFTRGVYYPDKVFRSSVLHSTQDLFLPFFSNVTWFHAIHVSGTNGTKRFDNPVLPFNDGVYFASTEKSNIIRGWIFGTTLDSKTQSLLIVNNATNVVIKVCEFQFCNDPFLGVYYHKNNKSWMESEFRVYSSANNCTFEYVSQPFLMDLEGKQGNFKNLREFVFKNIDGYFNIYSKHTPINLVRDLPQGFSALEPLVDLPIGINITRFQTLLALHRSYLTPGDSSSGWTAGAAAYYVGYLQPRTFLLKYNENGTITDAVDCALDPLSETKCTLKSFTVEKGIYQTSNFRVQPTESIVRFPNITNLCPFGEVFNATRFASVYAWNRKRISNCVADYSVLYNSASFSTFKCYGVSPTKLNDLCFTNVYADSFVIRGDEVRQIAPGQTGKIADYNYKLPDDFTGCVIAWNSNNLDSKVGGNYNYLYRLFRKSNLKPFERDISTEIYQAGSTPCNGVEGFNCYFPLQSYGFQPTNGVGYQPYRVVVLSFELLHAPATVCGPKKSTNLVKNKCVNFNFNGLTGTGVLTESNKKFLPFQQFGRDIADTTDAVRDPQTLEILDITPCSFGGVSVITPGTNTSNQVAVLYQGVNCTEVPVAIHADQLTPTWRVYSTGSNVFQTRAGCLIGAEHVNNSYECDIPIGAGICASYQTQTNSPRRARSVASQSIIAYTMSLGAENSVAYSNNSIAIPTNFTISVTTEILPVSMTKTSVDCTMYICGDSTECSNLLLQYGSFCTQLNRALTGIAVEQDKNTQEVFAQVKQIYKTPPIKDFGGFNFSQILPDPSKPSKRSFIEDLLFNKVTLADAGFIKQYGDCLGDIAARDLICAQKFNGLTVLPPLLTDEMIAQYTSALLAGTITSGWWFGAGAALQIPFAMQMAYRFNGIGVTQNVLYENQKLIANQFNSAIGKIQDSLSSTASALGKLQDVVNQNAQALNTLVKQLSSNFGAISSVLNDILSRLDPPEAEVQIDRLITGRLQSLQTYVTQQLIRAAEIRWSANLAATKMSECVLGQSKRVDFCGKGYHLMSFPQSAPHGVVFLHVTYVPAQEKNFTTAPAICHDGKAHFPREGVFVSNGTHWFVTQRNFYEPQIITTDNTFVSGNCDVVIGIVNNTVYDPLQPELDS

SEQ ID NO: 2775 - protein, 1147 aa, Artificial Sequence
  SARS-CoV-2/Belgium/BA-02291/2020__EPI_ISL_415159 spike protein (1-1147)(K986P_V987P_T887W_A1020W)
MFVFLVLLPLVSSQCVNLTTRTQLPPAYTNSFTRGVYYPDKVFRSSVLHSTQDLFLPFFSNVTWFHAIHVSGTNGTKRFDNPVLPFNDGVYFASTEKSNIIRGWIFGTTLDSKTQSLLIVNNATNVVIKVCEFQFCNDPFLGVYYHKNNKSWMESEFRVYSSANNCTFEYVSQPFLMDLEGKQGNFKNLREFVFKNIDGYFKIYSKHTPINLVRDLPQGFSALEPLVDLPIGINITRFQTLLALHRSYLTPGDSSSGWTAGAAAYYVGYLQPRTFLLKYNENGTITDAVDCALDPLSETKCTLKSFTVEKGIYQTSNFRVQPTESIVRFPNITNLCPFGEVFNATRFASVYAWNRKRISNCVADYSVLYNSASFSTFKCYGVSPTKLNDLCFTNVYADSFVIRGDEVRQIAPGQTGKIADYNYKLPDDFTGCVIAWNSNNLDSKVGGNYNYLYRLFRRSNLKPFERDISTEIYQAGSTPCNGVEGFNCYFPLQSYGFQPTNGVGYQPYRVVVLSFELLPAPATVCGPKKSTNLVKNKCVNFNFNGLTGTGVLTESNKKFLPFQQFGRDIADTTDAVRDPQTLEILDITPCSFGGVSVITPGTNTSNQVAVLYQGVNCTEVPVAIHADQLTPTWRVYSTGSNVFQTRAGCLIGAEHVNNSYECDIPIGAGICASYQTQTNSPRRARSVASQSIIAYTMSLGAENSVAYSNNSIAIPTNFTISVTTEILPVSMTKTSVDCTMYICGDSTECSNLLLQYGSFCTQLNRALTGIAVEQDKNTQEVFAQVKQIYKTPPIKDFGGFNFSQILPDPSKPSKRSFIEDLLFNKVTLADAGFIKQYGDCLGDIAARDLICAQKFNGLTVLPPLLTDEMIAQYTSALLAGTITSGWWFGAGAALQIPFAMQMAYRFNGIGVTQNVLYENQKLIANQFNSAIGKIQDSLSSAAPALGKLQDVVNQNAQALNTLVKQLSSNFGAISSVLNDILSRLDPPEAEVQIDRLITGRLQSLQTYVTQQLIRAAEIRWSANLAATKMSECVLGQSKRVDFCGKGYHLMSFPQSAPHGVVFLHVTYVPAQEKNFTTAPAICHDGKAHFPREGVFVSNGTHWFVTQRNFYEPQIITTDNTFVSGNCDVVIGIVNNTVYDPLQPELDS

SEQ ID NO: 2776 - protein, 1147 aa, Artificial Sequence
  SARS-CoV-2/USA/WA8-UW5/2020__EPI_ISL_413486 spike protein (1-1147)(K986P_V987P_T887W_A1020W)
MFVFLVLLPLVSSQCVNLTTRTQLPPAYTNSFTRGVYYPDKVFRSSVLHSTQDLFLPFFSNVTWFHAIHVSGTNGTKRFDNPVLPFNDGVYFASTEKSNIIRGWIFGTTLDSKTQSLLIVNNATNVVIKVCEFQFCNDPFLGVYYHKNNKSWMESEFRVYSSANNCTFEYVSQPFLMDLEGKQGNFKNLREFVFKNIDGYFKIYSKHTPINLVRDLPQGFSALEPLVDLPIGINITRFQTLLALHRSYLTPGDSSSGWTAGAAAYYVGYLQPRTFLLKYNENGTITDAVDCALDPLSETKCTLKSFTVEKGIYQTSNFRVQPTESIVRFPNITNLCPFGEVFNATRFASVYAWNRKRISNCVADYSVLYNSASFSTFKCYGVSPTKLNDLCFTNVYADSFVIRGDEVRQIAPGQTGKIADYNYKLPDDFTGCVIAWNSNNLDSKVGGNYNYLYRLFRKSNLKPFERDISTEIYQAGSTPCNGVEGFNCYFPLQSYGFQPTNGVGYQPYRVVVLSFELLHAPATVCGPKKSTNLVKNKCVNFNFNGLTGTGVLTESNKKFLPFQQFGRDIADTTDAVRDPQTLEILDITPCSFGGVSVITPGTNTSNQVAVLYQDVNCTEVPVAIHADQLTPTWRVYSTGSNVFQTRAGCLIGAEYVNNSYECDIPIGAGICASYQTQTNSPRRARSVASQSIIAYTMSLGAENSVAYSNNSIAIPTNFTISVTTEILPVSMTKTSVDCTMYICGDSTECSNLLLQYGSFCTQLNRALTGIAVEQDKNTQEVFAQVKQIYKTPPIKDFGGFNFSQILPDPSKPSKRSFIEDLLFNKVTLADAGFIKQYGDCLGDIAARDLICAQKFNGLTVLPPLLTDEMIAQYTSALLAGTITSGWWFGAGAALQIPFAMQMAYRFNGIGVTQNVLYENQKLIANQFNSAIGKIQDSLSSTASALGKLQDVVNQNAQALNTLVKQLSSNFGAISSVLNDILSRLDPPEAEVQIDRLITGRLQSLQTYVTQQLIRAAEIRWSANLAATKMSECVLGQSKRVDFCGKGYHLMSFPQSAPHGVVFLHVTYVPAQEKNFTTAPAICHDGKAHFPREGVFVSNGTHWFVTQRNFYEPQIITTDNTFVSGNCDVVIGIVNNTVYDPLQPELDS

SEQ ID NO: 2777 - protein, 1147 aa, Artificial Sequence
  SARS-CoV-2/England/20102000506/2020__EPI_ISL_415147 spike protein (1-1147)(K986P_V987P_T887W_A1020W)
MFVFLVLLPLVSSQCVNLTTRTQLPPAYTNSFTRGVYYPDKVFRSSVLHSTQDLFLPFFSNVTWFHAIHVSGTNGTKRFDNPVLPFNDGVYFASTEKSNIIRGWIFGTTLDSKTQSLLIVNNATNVVIKVCEFQFCNDPFLGVYYHKNNKSWMESEFRVYSSANNCTFEYVSQPFLMDLEGKQGNFKNLREFVFKNIDGYFKIYSKHTPINLVRDLPQGFSALEPLVDLPIGINITRFQTLLALHRSYLTPGDSSSGWTAGAAAYYVGYLQPRTFLLKYNENGTITDAVDCALDPLSETKCTLKSFTVEKGIYQTSNFRVQPTESIVRFPNITNLCPFGEVFNATRFASVYAWNRKRISNCVADYSVLYNSASFSTFKCYGVSPTKLNDLCFTNVYADSFVIRGDEVRQIAPGQTGKIADYNYKLPDDFTGCVIAWNSNNLDSKVGGNYNYLYRLFRKSNLKPFERDISTEIYQAGSTPCNGVEGFNCYFPLQSYGFQPTNGVGYQPYRVVVLSFELLHAPATVCGPKKSTNLVKNKCVNFNFNGLTGTGVLTESNKKFLPFQQFGRDIADTTDAVRDPQTLEILDITPCSFGGVSVITPGTNTSNQVAVLYQGVNCTEVPVAIHADQLTPTWRVYSTGSNVFQTRAGCLIGAEHVNNSYECDIPIGAGICASYQTQTNSPRRARSVASQSIIAYTMSLGAENSVAYSNNSIAIPTNFTISVTTEILPVSMTKTSVDCTMYICGDSTECSNLLLQYGSFCTQLNRALTGIAVEQDKNTQEVFAQVKQIYKTPPIKDFGGFNFSQILPDPSKPSKRSFIEDLLFNKVTLADAGFIKQYGYCLGDIAARDLICAQKFNGLTVLPPLLTDEMIAQYTSALLAGTITSGWWFGAGAALQIPFAMQMAYRFNGIGVTQNVLYENQKLIANQFNSAIGKIQDSLSSTASALGKLQDVVNQNAQALNTLVKQLSSNFGAISSVLNDILSRLDPPEAEVQIDRLITGRLQSLQTYVTQQLIRAAEIRWSANLAATKMSECVLGQSKRVDFCGKGYHLMSFPQSAPHGVVFLHVTYVPAQEKNFTTAPAICHDGKAHFPREGVFVSNGTHWFVTQRNFYEPQIITTDNTFVSGNCDVVIGIVNNTVYDPLQPELDS

SEQ ID NO: 2778 - protein, 1147 aa, Artificial Sequence
  SARS-CoV-2/Belgium/VAG-03013/2020__EPI_ISL_415155 spike protein (1-1147)(K986P_V987P_T887W_A1020W)
MFVFLVLLPLVSSQCVNLTTRTQLPPAYTNSFTRGVYYPDKVFRSSVLHSTQDLFLPFFSNVTWFHAIHVSGTNGTKRFDNPVLPFNDGVYFASTEKSNIIRGWIFGTTLDSKTQSLLIVNNATNVVIKVCEFQFCNDPFLGVYYHKNNKSWMESEFRVYSSANNCTFEYVSQPFLMDLEGKQGNFKNLREFVFKNIDGYFKIYSKHTPINLVRDLPQGFSALEPLVDLPIGINITRFQTLLALHRSYLTPGDSSSGWTAGAAAYYVGYLQPRTFLLKYNENGTITDAVDCALDPLSETKCTLKSFTVEKGIYQTSNFRVQPTESIVRFPNITNLCPFGEVFNATRFASVYAWNRKRISNCVADYSVLYNSASFSTFKCYGVSPTKLNDLCFTNVYADSFVIRGDEVRQIAPGQTGKIADYNYKLPDDFTGCVIAWNSNNLDSKVGGNYNYLYRLFRKSNLKPFERDISTEIYQAGSTPCNGVEGFNCYFPLQSYGFQPTNGVGYQPYRVVVLSFELLHAPATVCGPKKSTNLVKNKCVNFNFNGLTGTGVLTESNKKFLPFQQFGRDIADTTDAVRDPQTLEILDITPCSFGGVSVITPGTNTSNQVAVLYQGVNCTEVPVAIHADQLTPTWRVYSTGSNVFQTRAGCLIGAEHVNNSYECDIPIGAGICASYQTQTNSPRRARSVASQSIIAYTMSLGAENSVAYSNNSIAIPTNFTISVTTEILPVSMTKTSVDCTMYICGDSTECSNLLLQYGSFCTQLNRALTGIAVEQDKNTQEVFAQVKQIYKTPPIKDFGGFNFSQILPDPSKPSKRSFIEDLLFNKVTLADAGFIKQYGDCLGDIAARDLICAQKFNGLTVLPPLLTDEMIAQYTSALLAGTITSGWWFGAGAALQIPFAMQMAYRFNGIGVTQNVLYENQKLIANQFNSAIGKIQDSLSSTATALGKLQDVVNQNAQALNTLVKQLSSNFGAISSVLNDILSRLDPPEAEVQIDRLITGRLQSLQTYVTQQLIRAAEIRWSANLAATKMSECVLGQSKRVDFCGKGYHLMSFPQSAPHGVVFLHVTYVPAQEKNFTTAPAICHDGKAHFPREGVFVSNGTHWFVTQRNFYEPQIITTDNTFVSGNCDVVIGIVNNTVYDPLQPELDS

SEQ ID NO: 2779 - protein, 1147 aa, Artificial Sequence
  SARS-CoV-2/Belgium/BC-03016/2020__EPI_ISL_415157 spike protein (1-1147)(K986P_V987P_T887W_A1020W)
MFVFLVLLPLVSSQCVNLTTRTQLPPAYTNSFTRGVYYPDKVFRSSVLHSTQDLFLPFFSNVTWFHAIHVSGTNGTKRFDNPVLPFNDGVYFASTEKSNIIRGWIFGTTLDSKTQSLLIVNNATNVVIKVCEFQFCNDPFLGVYYHKNNKSWMESEFRVYSSANNCTFEYVSQPFLMDLEGKQGNFKNLREFVFKNIDGYFKIYSKHTPINLVRDLPQGFSALEPLVDLPIGINITRFQTLLALHRSYLTPGDSSSGWTAGAAAYYVGYLQPRTFLLKYNENGTITDAVDCALDPLSETKCTLKSFTVEKGIYQTSNFRVQPTESIVRFPNITNLCPFGEVFNATRFASVYAWNRKRISNCVADYSVLYNSASFSTFKCYGVSPTKLNDLCFTNVYADSFVIRGDEVRQIAPGQTGKIADYNYKLPDDFTGCVIAWNSNNLDSKVGGNYNYLYRLFRKSNLKPFERDISTEIYQAGSTPCNGVEGFNCYFPLQSYGFQPTNGVGYQPYRVVVLSFELLHAPATVCGPKKSTNLVKNKCVNFNFNGLTGTGVLTESNKKFLPFQQFGRDIADTTDAVRDPQTLEILDITPCSFGGVSVITPGTNTSNQVAVLYQGVNCTEVPVAIHADQLTPTWRVYSTGSNVFQTRAGCLIGAEHVNNSYECDIPIGAGICASYQTQTNSPRRARSVASQSIIAYTMSLGAENSVAYSNNSIAIPTNFTISVTTEILPVSMTKTSVDCTMYICGDSTECSNLLLQYGSFCTQLNRALTGIAVEQDKNTQEVFAQVKQIYKTPPIKDFGGFNFSQILPDPSKPSKRSFIEDLLFNKVTLADAGFIKQYGDCLGDIAARDLICAQKFNGLTVLPPLLTDEMIAQYTSALLAGTITSGWWFGAGAALQIPFAMQMAYRFNGIGVTQNVLYENQKLIANQFNSAIGKIQDSLSSTAPALGKLQDVVNQNAQALNTLVKQLSSNFGAISSVLNDILSRLDPPEAEVQIDRLITGRLQSLQTYVTQQLIRAAEIRWSANLAATKMSECVLGQSKRVDFCGKGYHLMSFPQSAPHGVVFLHVTYVPAQEKNFTTAPAICHDGKAHFPREGVFVSNGTHWFVTQRNFYEPQIITTDNTFVSGNCDVVIGIVNNTVYDPLQPELDS

SEQ ID NO: 2780 - protein, 1147 aa, Artificial Sequence
  SARS-CoV-2/Germany/BavPat3/2020__EPI_ISL_414521 spike protein (1-1147)(K986P_V987P_T887W_A1020W)
MFVFLVLLPLVSSQCVNLTTRTQLPPAYTNSFTRGVYYPDKVFRSSVLHSTQDLFLPFFSNVTWFHAIHVSGTNGTKRFDNPVLPFNDGVYFASTEKSNIIRGWIFGTTLDSKTQSLLIVNNATNVVIKVCEFQFCNDPFLGVYYHKNNKSWMESEFRVYSSANNCTFEYVSQPFLMDLEGKQGNFKNLREFVFKNIDGYFKIYSKHTPINLVRDLPQGFSALEPLVDLPIGINITRFQTLLALHRSYLTPGDSSSGWTAGAAAYYVGYLQPRTFLLKYNENGTITDAVDCALDPLSETKCTLKSFTVEKGIYQTSNFRVQPTESIVRFPNITNLCPFGEVFNATRFASVYAWNRKRISNCVADYSVLYNSASFSTFKCYGVSPTKLNDLCFTNVYADSFVIRGDEVRQIAPGQTGKIADYNYKLPDDFTGCVIAWNSNNLDSKVGGNYNYLYRLFRKSNLKPFERDISTEIYQAGSTPCNGVEGFNCYFPLQSYGFQPTNGVGYQPYRVVVLSFELLHAPATVCGPKKSTNLVKNKCVNFNFNGLTGTGVLTESNKKFLPFQQFGRDIADTTDAVRDPQTLEILDITPCSFGGVSVITPGTNTSNQVAVLYQDVNCTEVPVAIHADQLTPTWRVYSTGSNVFQTRAGCLIGAEHVNNSYECDIPIGAGICASYQTQTNSPRRARSVASQSIIAYTMSLGAENSVAYSNNSIAIPTNFTISVTTEILPVSMTKTSVDCTMYICGDSTECSNLLLQYGSFCTQLNRALTGIAVEQDKNTQQVFAQVKQIYKTPPIKDFGGFNFSQILPDPSKPSKRSFIEDLLFNKVTLADAGFIKQYGDCLGDIAARDLICAQKFNGLTVLPPLLTDEMIAQYTSALLAGTITSGWWFGAGAALQIPFAMQMAYRFNGIGVTQNVLYENQKLIANQFNSAIGKIQDSLSSTASALGKLQDVVNQNAQALNTLVKQLSSNFGAISSVLNDILSRLDPPEAEVQIDRLITGRLQSLQTYVTQQLIRAAEIRWSANLAATKMSECVLGQSKRVDFCGKGYHLMSFPQSAPHGVVFLHVTYVPAQEKNFTTAPAICHDGKAHFPREGVFVSNGTHWFVTQRNFYEPQIITTDNTFVSGNCDVVIGIVNNTVYDPLQPELDS

SEQ ID NO: 2781 - protein, 1147 aa, Artificial Sequence
  SARS-CoV-2/France/HF1805/2020__EPI_ISL_414628 spike protein (1-1147)(K986P_V987P_T887W_A1020W)
MFVFLVLLPLVSSQCVNLTTRTQLPPAYTNSFTRGVYYPDKVFRSSVLHSTQDLFLPFFSNVTWFHAIHVSGTNGTKRFDNPVLPFNDGVYFASTEKSNIIRGWIFGTTLDSKTQSLLIVNNATNVVIKVCEFQFCNDPFLGVYYHKNNKSWMESEFRVYSSANNCTFEYVSQPFLMDLEGKQGNFKNLREFVFKNIDGYFKIYSKHTPINLVRDLPQGFSALEPLVDLPIGINITRFQTLLALHRSYLTPGDSSSGWTAGAAAYYVGYLQPRTFLLKYNENGTITDAVDCALDPLSETKCTLKSFTVEKGIYQTSNFRVQPTESIVRFPNITNLCPFGEVFNATRFASVYAWNRKRISNCVADYSVLYNSASFSTFKCYGVSPTKLNDLCFTNVYADSFVIRGDEVRQIAPGQTGKIADYNYKLPDDFTGCVIAWNSNNLDSKVGGNYNYLYRLFRKSNLKPFERDISTEIYQAGSTPCNGVEGFNCYFPLQSYGFQPTNGVGYQPYRVVVLSFELLHAPATVCGPKKSTNLVKNKCVNFNFNGLTGTGVLTESNKKFLPFQQFGRDIADTTDAVRDPQTLEILDITPCSFGGVSVITPGTNTSNQVAVLYQGVNCTEVPVAIHADQLTPTWRVYSTGSNVFQTRAGCLIGAEHVNNSYECDIPIGAGICASYQTQTNSPRRARSVASQSIIAYTMSLGAENSVAYSNNSIAIPTNFTISVTTEILPVSMTKTSVDCTMYICGDSTECSNLLLQYGSFCTQLNRALTGIAVEQDKNTQEVFAQVKQIYKTPPIKDFGGFNFSQILPDPSKPSKRSFIEDLLFNKVTLADAGFIKQYGDCLGDIAARDLICAQKFNGLTVLPPLLTDEMIAQYTSALLAGTITSGWWFGAGAALQIPFAMQMAYRFNGIGVTQNVLYENQKLIANQFNSAIGKIQDSLSSTASALGKLQDVVNQNAQALNTLVKQLSSNFGAISSVLNDILSRLDPPEAEVQIDRLITGRLQSLQTYVTQQLIRAAEIRWSANLAATKMSECVLGQSKRVDFCGKGYHLMSFPQSAPHGVVFLHVTYVPAQEKNFTTAPAICHDGKAHFPREGVFVSNGTHWFVTQRNFYEPQIITTDNTFVSGNCDVVIGVVNNTVYDPLQPELDS

SEQ ID NO: 2782 - protein, 1147 aa, Artificial Sequence
  SARS-CoV-2/Netherlands/ZuidHolland_9/2020__EPI_ISL_414445 spike protein (1-1147)(K986P_V987P_T887W_A1020W)
MFVFLVLLPLVSSQCVNLTTRTQLPPAYTNSFTRGVYYPDKVFRSSVLHSTQDLFLPFFSNVTWFHAIHVSGTNGTKRFDNPVLPFNDGVYFASTEKSNIIRGWIFGTTLDSKTQSLLIVNNATNVVIKVCEFQFCNDPFLGVYYHKNNKSWMESEFRVYSSANNCTFEYVSQPFLMDLEGKQGNFKNLREFVFKNIDGYFKIYSKHTPINLVRDLPQGFSALEPLVDLPIGINITRFQTLLALHRSYLTPGDSSSGWTAGAAAYYVGYLQPRTFLLKYNENGTITDAVDCALDPLSETKCTLKSFTVEKGIYQTSNFRVQPTESIVRFPNITNLCPFGEVFNATRFASVYAWNRKRISNCVADYSVLYNSASFSTFKCYGVSPTKLNDLCFTNVYADSFVIRGDEVRQIAPGQTGKIADYNYKLPDDFTGCVIAWNSNNLDSKVGGNYNYLYRLFRKSNLKPFERDISTEIYQAGSTPCNGVEGFNCYFPLQSYGFQPTNGVGYQPYRVVVLSFELLHAPATVCGPKKSTNLVKNKCVNFNFNGLTGTGVLTESNKKFLPFQQFGRDIADTTDAVRDPQTLEILDITPCSFGGVSVITPGTNTSNQVAVLYQGVNCTEVPVAIHADQLTPTWRVYSTGSNVFQTRAGCLIGAEHVNNSYECDIPIGAGICASYQTQTNSPRRARSVASQSIIAYTMSLGAENSVAYSNNSIAIPTNFTISVTTEILPVSMTKTSVDCTMYICGDSTECSNLLLQYGSFCTQLNRALTGIAVEQDKNTQEVFAQVKQIYKTPPIKDFGGFNFSQILPDPSKPSKRSFIEDLLFNKVTLADAGFIKQYGDCLGDIAARDLICVQKFNGLTVLPPLLTDEMIAQYTSALLAGTITSGWWFGAGAALQIPFAMQMAYRFNGIGVTQNVLYENQKLIANQFNSAIGKIQDSLSSTASALGKLQDVVNQNAQALNTLVKQLSSNFGAISSVLNDILSRLDPPEAEVQIDRLITGRLQSLQTYVTQQLIRAAEIRWSANLAATKMSECVLGQSKRVDFCGKGYHLMSFPQSAPHGVVFLHVTYVPAQEKNFTTAPAICHDGKAHFPREGVFVSNGTHWFVTQRNFYEPQIITTDNTFVSGNCDVVIGIVNNTVYDPLQPELDS

SEQ ID NO: 2783 - protein, 1147 aa, Artificial Sequence
  SARS-CoV-2/Finland/FIN03032020A/2020__EPI_ISL_413602 spike protein (1-1147)(K986P_V987P_T887W_A1020W)
MFVFLVLLPLVSSQCVNLTTRTQLPPAYTNSFTRGVYYPDKVFRSSVLHSTQDLFLPFFSNVTWFHAIHVSGTNGTKRFDNPVLPFNDGVYFASTEKSNIIRGWIFGTTLDSKTQSLLIVNNATNVVIKVCEFQFCNDPFLGVYYHKNNKSWMESEFRVYSSANNCTFEYVSQPFLMDLEGKQGNFKNLREFVFKNIDGYFKIYSKHTPINLVRDLPQGFSALEPLVDLPIGINITRFQTLLALHRSYLTPGDSSSGWTAGAAAYYVGYLQPRTFLLKYNENGTITDAVDCALDPLSETKCTLKSFTVEKGIYQTSNFRVQPTESIVRFPNITNLCPFGEVFNATRFASVYAWNRKRISNCVADYSVLYNSASFSTFKCYGVSPTKLNDLCFTNVYADSFVIRGDEVRQIAPGQTGKIADYNYKLPDDFTGCVISWNSNNLDSKVGGNYNYLYRLFRKSNLKPFERDISTEIYQAGSTPCNGVEGFNCYFPLQSYGFQPTNGVGYQPYRVVVLSFELLHAPATVCGPKKSTNLVKNKCVNFNFNGLTGTGVLTESNKKFLPFQQFGRDIADTTDAVRDPQTLEILDITPCSFGGVSVITPGTNTSNQVAVLYQGVNCTEVPVAIHADQLTPTWRVYSTGSNVFQTRAGCLIGAEHVNNSYECDIPIGAGICASYQTQTNSPRRARSVASQSIIAYTMSLGAENSVAYSNNSIAIPTNFTISVTTEILPVSMTKTSVDCTMYICGDSTECSNLLLQYGSFCTQLNRALTGIAVEQDKNTQEVFAQVKQIYKTPPIKDFGGFNFSQILPDPSKPSKRSFIEDLLFNKVTLADAGFIKQYGDCLGDIAARDLICAQKFNGLTVLPPLLTDEMIAQYTSALLAGTITSGWWFGAGAALQIPFAMQMAYRFNGIGVTQNVLYENQKLIANQFNSAIGKIQDSLSSTASALGKLQDVVNQNAQALNTLVKQLSSNFGAISSVLNDILSRLDPPEAEVQIDRLITGRLQSLQTYVTQQLIRAAEIRWSANLAATKMSECVLGQSKRVDFCGKGYHLMSFPQSAPHGVVFLHVTYVPAQEKNFTTAPAICHDGKAHFPREGVFVSNGTHWFVTQRNFYEPQIITTDNTFVSGNCDVVIGIVNNTVYDPLQPELDS

SEQ ID NO: 2784 - protein, 1147 aa, Artificial Sequence
  SARS-CoV-2/France/GE1977/2020__EPI_ISL_414632 spike protein (1-1147)(K986P_V987P_T887W_A1020W)
MFVFLVLLPLVSSQCVNLTTRTQLPPAYTNSFTRGVYYPDKVFRSSVLHSTQDLFLPFFSNVTWFHAIHVSGTNGTKRFDNPVLPFNDGVYFASTEKSNIIRGWIFGTTLDSKTQSLLIVNNATNVVIKVCEFQFCNDPFLGVYYHKNNKSWMESEFRVYSSANNCTFEYVSQPFLMDLEGKQGNFKNLREFVFKNIDGYFKIYSKHTPINLVRDLPQGFSALEPLVDLPIGINITRFQTLLALHRSYLTPGDSSSGWTAGAAAYYVGYLQPRTFLLKYNENGTITDAVDCALDPLSETKCTLKSFTVEKGIYQTSNFRVQPTESIVRFPNITNLCPFGEVFNATRFASVYAWNRKRISNCVADYSVLYNSASFSTFKCYGVSPTKLNDLCFTNVYADSFVIRGDEVRQIAPGQTGKIADYNYKLPDDFTGCVIAWNSNNLDSKVGGNYNYLYRLFRKSNLKPFERDISTEIYQAGSTPCNGVEGFNCYFPLQSYGFQPTNGVGYQPYRVVVLSFELLHAPATVCGPKKSTNLVKNKCVNFNFNGLTGTGVLTESNKKFLPFQQFGRDIADTTDAVRDPQTLEILDITPCSFGGVSVITPGTNTSNQVAVLYQGVNCTEVPVAIHADQLTPTWRVYSTGSNVFQTRAGCLIGAEHVNNSYECDIPIGAGICASYQTQTNSPRRARSVASQSIIAYTMSLGAENSVAYSNNSIAIPTNFTISVTTEILPVSMTKTSVDCTMYICGDSTECSNLLLQYGSFCTQLNRALTGIAVEQDKNTQEVFAQVKQIYKTPPIKDFGGFNFSQILPDPSKPSKRSFIEDLLFNKVTLADAGFIKQYGDCLGDIAARDLICAQKFNGLTVLPPLLTDEMIAQYTSALLAGTITSGWWFGAGAALQIPFAMQMAYRFNGIGVTQNVLYENQKLIANQFNSAIGKIQDSLFSTASALGKLQDVVNQNAQALNTLVKQLSSNFGAISSVLNDILSRLDPPEAEVQIDRLITGRLQSLQTYVTQQLIRAAEIRWSANLAATKMSECVLGQSKRVDFCGKGYHLMSFPQSAPHGVVFLHVTYVPAQEKNFTTAPAICHDGKAHFPREGVFVSNGTHWFVTQRNFYEPQIITTDNTFVSGNCDVVIGIVNNTVYDPLQPELDS

SEQ ID NO: 2785 - protein, 1147 aa, Artificial Sequence
  SARS-CoV-2/Finland/FIN-313/2020__EPI_ISL_414641 spike protein (1-1147)(K986P_V987P_T887W_A1020W)
MFVFLVLLPLVSSQCVNLTTRTQLPPAYTNSFTRGVYYPDKVFRSSVLHSTQDLFLPFFSNVTWFHAIHVSGTNGTKRFDNPVLPFNDGVYFASTEKSNIIRGWIFGTTLDSKTQSLLIVNNATNVVIKVCEFQFCNDPFLGVYYHKNNKSWMESEFRVYSSANNCTFEYVSQPFLMDLEGKQGNFKNLREFVFKNIDGYFKIYSKHTPINLVRDLPQGFSALEPLVDLPIGINITRFKTLLALHRSYLTPGDSSSGWTAGAAAYYVGYLQPRTFLLKYNENGTITDAVDCALDPLSETKCTLKSFTVEKGIYQTSNFRVQPTESIVRFPNITNLCPFGEVFNATRFASVYAWNRKRISNCVADYSVLYNSASFSTFKCYGVSPTKLNDLCFTNVYADSFVIRGDEVRQIAPGQTGKIADYNYKLPDDFTGCVIAWNSNNLDSKVGGNYNYLYRLFRKSNLKPFERDISTEIYQAGSTPCNGVEGFNCYFPLQSYGFQPTNGVGYQPYRVVVLSFELLHAPATVCGPKKSTNLVKNKCVNFNFNGLTGTGVLTESNKKFLPFQQFGRDIADTTDAVRDPQTLEILDITPCSFGGVSVITPGTNTSNQVAVLYQGVNCTEVPVAIHADQLTPTWRVYSTGSNVFQTRAGCLIGAEHVNNSYECDIPIGAGICASYQTQTNSPRRARSVASQSIIAYTMSLGAENSVAYSNNSIAIPTNFTISVTTEILPVSMTKTSVDCTMYICGDSTECSNLLLQYGSFCTQLNRALTGIAVEQDKNTQEVFAQVKQIYKTPPIKDFGGFNFSQILPDPSKPSKRSFIEDLLFNKVTLADAGFIKQYGDCLGDIAARDLICAQKFNGLTVLPPLLTDEMIAQYTSALLAGTITSGWWFGAGAALQIPFAMQMAYRFNGIGVTQNVLYENQKLIANQFNSAIGKIQDSLSSTASALGKLQDVVNQNAQALNTLVKQLSSNFGAISSVLNDILSRLDPPEAEVQIDRLITGRLQSLQTYVTQQLIRAAEIRWSANLAATKMSECVLGQSKRVDFCGKGYHLMSFPQSAPHGVVFLHVTYVPAQEKNFTTAPAICHDGKAHFPREGVFVSNGTHWFVTQRNFYEPQIITTDNTFVSGNCDVVIGIVNNTVYDPLQPELDS

SEQ ID NO: 2786 - protein, 1147 aa, Artificial Sequence
  SARS-CoV-2/Netherlands/ZuidHolland_2/2020__EPI_ISL_414556 spike protein (1-1147)(K986P_V987P_T887W_A1020W)
MFVFLVLLPLVSSQCVNLTTRTQLPPAYTNSFTRGVYYPDKVFRSSVLHSTQDLFLPFFSNVTWFHAIHVSGTNGTKRFDNPVLPFNDGVYFASTEKSNIIRGWIFGTTLDSKTQSLLIVNNATNVVIKVCEFQFCNDPFLGVYYHKNNKSWMESEFRVYSSANNCTFEYVSQPFLMDLEGKQGNFKNLREFVFKNIDGYFKIYSKHTPINLVRDLPQGFSALEPLVDLPIGINITRFQTLLALHRSYLTPGDSSSGWTAGAAAYYVGYLQPRTFLLKYNENGTITDAVDCALDPLSETKCTLKSFTVEKGIYQTSNFRVQPTESIVRFPNITNLCPFGEVFNATRFASVYAWNRKRISNCVADYSVLYNSASFSTFKCYGVSPTKLNDLCFTNVYADSFVIRGDEVRQIAPGQTGKIADYNYKLPDDFTGCVIAWNSNNLDSKVGGNYNYLYRLFRKSNLKPFERDISTEIYQAGSTPCNGVEGFNCYFPLQSYGFQPTNGVGYQPYRVVVLSFELLHAPATVCGPKKSTNLVKNKCVNFNFNGLTGTGVLTESNKKFLPFQQFGRDIADTTDAVRDPQTLEILDITPCSFGGVSVITPGTNTSNQVAVLYQGVNCTEVPVAIHADQLTPTWRVYSTGSNVFQTRAGCLIGAEHVNNSYECDIPIGAGICASYQTQTNSPRRARSVASQSIIAYTMSLGAENSVAYSNNSIAIPTNFTISVTTEILPVSMTKTSVDCTMYICGDSTECSNLLLQYGSFCTQLNRALTGIALEQDKNTQEVFAQVKQIYKTPPIKDFGGFNFSQILPDPSKPSKRSFIEDLLFNKVTLADAGFIKQYGDCLGDIAARDLICAQKFNGLTVLPPLLTDEMIAQYTSALLAGTITSGWWFGAGAALQIPFAMQMAYRFNGIGVTQNVLYENQKLIANQFNSAIGKIQDSLSSTASALGKLQDVVNQNAQALNTLVKQLSSNFGAISSVLNDILSRLDPPEAEVQIDRLITGRLQSLQTYVTQQLIRAAEIRWSANLAATKMSECVLGQSKRVDFCGKGYHLMSFPQSAPHGVVFLHVTYVPAQEKNFTTAPAICHDGKAHFPREGVFVSNGTHWFVTQRNFYEPQIITTDNTFVSGNCDVVIGIVNNTVYDPLQPELDS

SEQ ID NO: 2787 - protein, 1147 aa, Artificial Sequence
  SARS-CoV-2/USA/WA-UW31/2020__EPI_ISL_414618 spike protein (1-1147)(K986P_V987P_T887W_A1020W)
MFVFLVLLPLVSSQCVNLTTRTQLPPAYTNSFTRGVYYPDKVFRSSVLHSTQDLFLPFFSNVTWFHAIHVSGTNGTKRFDNPVLPFNDGVYFASTEKSNIIRGWIFGTTLDSKTQSLLIVNNATNVVIKVCEFQFCNDPFLGVYYHKNNKSWMESEFRVYSSANNCTFEYVSQPFLMDLEGKQGNFKNLREFVFKNIDGYFKIYSKHTPINLVRDLPQGFSALEPLVDLPIGINITRFQTLLALHRSYLTPGDSSSGWTAGAAAYYVGYLQPRTFLLKYNENGTITDAVDCALDPLSETKCTLKSFTVEKGIYQTSNFRVQPTESIVRFPNITNLCPFGEVFNATRFASVYAWNRKRISNCVADYSVLYNSASFSTFKCYGVSPTKLNDLCFTNVYADSFVIRGDEVRQIAPGQTGKIADYNYKLPDDFTGCVIAWNSNNLDSKVGGNYNYLYRLFRKSNLKPFERDISTEIYQAGSTPCNGAEGFNCYFPLQSYGFQPTNGVGYQPYRVVVLSFELLHAPATVCGPKKSTNLVKNKCVNFNFNGLTGTGVLTESNKKFLPFQQFGRDIADTTDAVRDPQTLEILDITPCSFGGVSVITPGTNTSNQVAVLYQDVNCTEVPVAIHADQLTPTWRVYSTGSNVFQTRAGCLIGAEHVNNSYECDIPIGAGICASYQTQTNSPRRARSVASQSIIAYTMSLGAENSVAYSNNSIAIPTNFTISVTTEILPVSMTKTSVDCTMYICGDSTECSNLLLQYGSFCTQLNRALTGIAVEQDKNTQEVFAQVKQIYKTPPIKDFGGFNFSQILPDPSKPSKRSFIEDLLFNKVTLADAGFIKQYGDCLGDIAARDLICAQKFNGLTVLPPLLTDEMIAQYTSALLAGTITSGWWFGAGAALQIPFAMQMAYRFNGIGVTQNVLYENQKLIANQFNSAIGKIQDSLSSTASALGKLQDVVNQNAQALNTLVKQLSSNFGAISSVLNDILSRLDPPEAEVQIDRLITGRLQSLQTYVTQQLIRAAEIRWSANLAATKMSECVLGQSKRVDFCGKGYHLMSFPQSAPHGVVFLHVTYVPAQEKNFTTAPAICHDGKAHFPREGVFVSNGTHWFVTQRNFYEPQIITTDNTFVSGNCDVVIGIVNNTVYDPLQPELDS

SEQ ID NO: 2788 - protein, 1147 aa, Artificial Sequence
  SARS-CoV-2/South Korea/SNU01/2020__EPI_ISL_411929 spike protein (1-1147)(K986P_V987P_T887W_A1020W)
MFVFLVLLPLVSSQCVNLTTRTQLPPAYTNSFTRGVYYPDKVFRSSVLHSTQDLFLPFFSNVTWFHAIHVSGTNGTKRFDNPVLPFNDGVYFASTEKSNIIRGWIFGTTLDSKTQSLLIVNNATNVVIKVCEFQFCNDPFLGVYYHKNNKSWMESEFRVYSSANNCTFEYVSQPFLMDLEGKQGNFKNLREFVFKNIDGYFKIYSKHTPINLVRDLPQGFWALEPLVDLPIGINITRFQTLLALHRSYLTPGDSSSGWTAGAAAYYVGYLQPRTFLLKYNENGTITDAVDCALDPLSETKCTLKSFTVEKGIYQTSNFRVQPTESIVRFPNITNLCPFGEVFNATRFASVYAWNRKRISNCVADYSVLYNSASFSTFKCYGVSPTKLNDLCFTNVYADSFVIRGDEVRQIAPGQTGKIADYNYKLPDDFTGCVIAWNSNNLDSKVGGNYNYLYRLFRKSNLKPFERDISTEIYQAGSTPCNGVEGFNCYFPLQSYGFQPTNGVGYQPYRVVVLSFELLHAPATVCGPKKSTNLVKNKCVNFNFNGLTGTGVLTESNKKFLPFQQFGRDIADTTDAVRDPQTLEILDITPCSFGGVSVITPGTNTSNQVAVLYQDVNCTEVPVAIHADQLTPTWRVYSTGSNVFQTRAGCLIGAEHVNNSYECDIPIGAGICASYQTQTNSPRRARSVASQSIIAYTMSLGAENSVAYSNNSIAIPTNFTISVTTEILPVSMTKTSVDCTMYICGDSTECSNLLLQYGSFCTQLNRALTGIAVEQDKNTQEVFAQVKQIYKTPPIKDFGGFNFSQILPDPSKPSKRSFIEDLLFNKVTLADAGFIKQYGDCLGDIAARDLICAQKFNGLTVLPPLLTDEMIAQYTSALLAGTITSGWWFGAGAALQIPFAMQMAYRFNGIGVTQNVLYENQKLIANQFNSAIGKIQDSLSSTASALGKLQDVVNQNAQALNTLVKQLSSNFGAISSVLNDILSRLDPPEAEVQIDRLITGRLQSLQTYVTQQLIRAAEIRWSANLAATKMSECVLGQSKRVDFCGKGYHLMSFPQSAPHGVVFLHVTYVPAQEKNFTTAPAICHDGKAHFPREGVFVSNGTHWFVTQRNFYEPQIITTDNTFVSGNCDVVIGIVNNTVYDPLQPELDS

SEQ ID NO: 2789 - protein, 1147 aa, Artificial Sequence
  SARS-CoV-2/China/WF0004/2020__EPI_ISL_413694 spike protein (1-1147)(K986P_V987P_T887W_A1020W)
MFVFLVLLPLVSSQCVNLTTRTQLPPAYTNSFTRGVYYPDKVFRSSVLHSTQDLFLPFFSNVTWFHAIHVSGTNGTKRFDNPVLPFNDGVYFASTEKSNIIRGWIFGTTLDSKTQSLLIVNNATNVVIKVCEFQFCNDPFLGVYYHKNNKSWTESEFRVYSSANNCTFEYVSQPFLMDLEGKQGNFKNLREFVFKNIDGYFKIYSKHTPINLVRDLPQGFSALEPLVDLPIGINITRFQTLLALHRSYLTPGDSSSGWTAGAAAYYVGYLQPRTFLLKYNENGTITDAVDCALDPLSETKCTLKSFTVEKGIYQTSNFRVQPTESIVRFPNITNLCPFGEVFNATRFASVYAWNRKRISNCVADYSVLYNSASFSTFKCYGVSPTKLNDLCFTNVYADSFVIRGDEVRQIAPGQTGKIADYNYKLPDDFTGCVIAWNSNNLDSKVGGNYNYLYRLFRKSNLKPFERDISTEIYQAGSTPCNGVEGFNCYFPLQSYGFQPTNGVGYQPYRVVVLSFELLHAPATVCGPKKSTNLVKNKCVNFNFNGLTGTGVLTESNKKFLPFQQFGRDIADTTDAVRDPQTLEILDITPCSFGGVSVITPGTNTSNQVAVLYQDVNCTEVPVAIHADQLTPTWRVYSTGSNVFQTRAGCLIGAEHVNNSYECDIPIGAGICASYQTQTNSPRRARSVASQSIIAYTMSLGAENSVAYSNNSIAIPTNFTISVTTEILPVSMTKTSVDCTMYICGDSTECSNLLLQYGSFCTQLNRALTGIAVEQDKNTQEVFAQVKQIYKTPPIKDFGGFNFSQILPDPSKPSKRSFIEDLLFNKVTLADAGFIKQYGDCLGDIAARDLICAQKFNGLTVLPPLLTDEMIAQYTSALLAGTITSGWWFGAGAALQIPFAMQMAYRFNGIGVTQNVLYENQKLIANQFNSAIGKIQDSLSSTASALGKLQDVVNQNAQALNTLVKQLSSNFGAISSVLNDILSRLDPPEAEVQIDRLITGRLQSLQTYVTQQLIRAAEIRWSANLAATKMSECVLGQSKRFDFCGKGYHLMSFPQSAPHGVVFLHVTYVPAQEKNFTTAPAICHDGKAHFPREGVFVSNGTHWFVTQRNFYEPQIITTDNTFVSGNCDVVIGIVNNTVYDPLQPELDS

SEQ ID NO: 2790 - protein, 1147 aa, Artificial Sequence
  SARS-CoV-2/China/WF0028/2020__EPI_ISL_413791 spike protein (1-1147)(K986P_V987P_T887W_A1020W)
MFVFLVLLPLVSSQCVNLTTRTQLPPAYTNSFTRGVYYPDKVFRSSVLHSTQDLFLPFFSNVTWFHAIHVSGTNGTKRFDNPVLPFNDGVYFASTEKSNIIRGWIFGTTLDSKTQSLLIVNNATNVVIKVCEFQFCNDPFLGVYYHKNNKSWMESEFRVYSSANNCTFEYVSQPFLMDLEGKQGNFKNLREFVFKNIDGYFKIYSKHTPINLVRDLPQGFSALEPLVDLPIGINITRFQTLLALHRSYLTPGDSSSGWTAGAAAYYVGYLQPRTFLLKYNENGTITDAVDCALDPLSETKCTLKSFTVEKGIYQTSNFRVQPTESIVRFPNITNLCPFGEVFNATRFASVYAWNRKRISNCVADYSVLYNSASFSTFKCYGVSPTKLNDLCFTNVYADSFVIRGDEVRQIAPGQTGKIADYNYKLPDDFTGCVIAWNSNNLDSKVGGNYNYLYRLFRKSNLKPFERDISTEIYQAGSTPCNGVEGFNCYFPLQSYGFQPTNGVGYQPYRVVVLSFELLHAPATVCGPKKSTNLVKNKCVNFNFNGLTGTGVLTESNKKFLPFQQFGRDIADTTDAVRDPQTLEILDITPCSFGGVSVITPGTNTSNQVAVLYQDVNCTEVPVAIHADQLTPTWRVYSTGSNVFQTRAGCLIGAEHVNNSYECDIPIGAGICASYQTQTNSPRRARSVASQSIIAYTMSLGAENSVAYSNNSIAIPTNFTISVTTEILPVSMTKTSVDCTMYICGDSTECSNLLLQYGSFCTQLNRALTGIAVEQDKNTQEVFAQVKQIYKTPPIKDFGGFNFSQILPDPSKPSKRSFIEDLLFNKVTLADAGFIKQYGDCLGDIAARDLICAQKFNGLTVLPPLLTDEMIAQYTSALLAGTITSGWWFGAGAALQIPFAMQMAYRFNGIGVTQNVLYENQKLIANQFNSAIGKIQDSLSSTASALGKLQDVVNQNAQALNTLVKQLSSNFGAISSVLNDILSRLDPPEAEVQIDRLITGRLQSLQTYVTQQLIRAAEIRWSANLAATKMSECVLGQSKRVDFCGKGYHLMSFPQSAPHGVVFLHVTYVPAQEKNFTTAPAICHDGKAHFPREGVFVSNGTHWFVTQRNFYEPQIITTDNTFVSGNCDVVIGIVNNTVYDPLQPELES

SEQ ID NO: 2791 - protein, 1147 aa, Artificial Sequence
  SARS-CoV-2/2019-nCoV/USA-CruiseA-18/2020__MT159716.1 spike protein (1-1147)(K986P_V987P_T887W_A1020W)
MFVFLVLLPLVSSQCVNLTTRTQLPPAYTNSFTRGVYYPDKVFRSSVLHSTQDLFLPFFSNVTWFHAIHVSGTNGTKRFDNPVLPFNDGVYFASTEKSNIIRGWIFGTTLDSKTQSLLIVNNATNVVIKVCEFQFCNDPFLGVYYHKNNKSWMESELRVYSSANNCTFEYVSQPFLMDLEGKQGNFKNLREFVFKNIDGYFKIYSKHTPINLVRDLPQGFSALEPLVDLPIGINITRFQTLLALHRSYLTPGDSSSGWTAGAAAYYVGYLQPRTFLLKYNENGTITDAVDCALDPLSETKCTLKSFTVEKGIYQTSNFRVQPTESIVRFPNITNLCPFGEVFNATRFASVYAWNRKRISNCVADYSVLYNSASFSTFKCYGVSPTKLNDLCFTNVYADSFVIRGDEVRQIAPGQTGKIADYNYKLPDDFTGCVIAWNSNNLDSKVGGNYNYLYRLFRKSNLKPFERDISTEIYQAGSTPCNGVEGFNCYFPLQSYGFQPTNGVGYQPYRVVVLSFELLHAPATVCGPKKSTNLVKNKCVNFNFNGLTGTGVLTESNKKFLPFQQFGRDIADTTDAVRDPQTLEILDITPCSFGGVSVITPGTNTSNQVAVLYQDVNCTEVPVAIHADQLTPTWRVYSTGSNVFQTRAGCLIGAEHVNNSYECDIPIGAGICASYQTQTNSPRRARSVASQSIIAYTMSLGAENSVAYSNNSIAIPTNFTISVTTEILPVSMTKTSVDCTMYICGDSTECSNLLLQYGSFCTQLNRALTGIAVEQDKNTQEVFAQVKQIYKTPPIKDFGGFNFSQILPDPSKPSKRSFIEDLLFNKVTLADAGFIKQYGDCLGDIAARDLICAQKFNGLTVLPPLLTDEMIAQYTSALLAGTITSGWWFGAGAALQIPFAMQMAYRFNGIGVTQNVLYENQKLIANQFNSAIGKIQDSLSSTASALGKLQDVVNQNAQALNTLVKQLSSNFGAISSVLNDILSRLDPPEAEVQIDRLITGRLQSLQTYVTQQLIRAAEIRWSANLAATKMSECVLGQSKRVDFCGKGYHLMSFPQSAPHGVVFLHVTYVPAQEKNFTTAPAICHDGKAHFPREGVFVSNGTHWFVTQRNFYEPQIITTDNTFVSGNCDVVIGIVNNTVYDPLQPELDS

SEQ ID NO: 2792 - protein, 1147 aa, Artificial Sequence
  SARS-CoV-2/SARS-CoV-2/Yunnan-01/human/2020/CHN__MT049951.1 spike protein (1-1147)(K986P_V987P_T887W_A1020W)
MFVFLVLLPLVSSQCVNLTTRTQLPPANTNSFTRGVYYPDKVFRSSVLHSTQDLFLPFFSNVTWFHAIHVSGTNGTKRFDNPVLPFNDGVYFASTEKSNIIRGWIFGTTLDSKTQSLLIVNNATNVVIKVCEFQFCNDPFLGVYYHKNNKSWMESEFRVYSSANNCTFEYVSQPFLMDLEGKQGNFKNLREFVFKNIDGYFKIYSKHTPINLVRDLPQGFSALEPLVDLPIGINITRFQTLLALHRSYLTPGDSSSGWTAGAAAYYVGYLQPRTFLLKYNENGTITDAVDCALDPLSETKCTLKSFTVEKGIYQTSNFRVQPTESIVRFPNITNLCPFGEVFNATRFASVYAWNRKRISNCVADYSVLYNSASFSTFKCYGVSPTKLNDLCFTNVYADSFVIRGDEVRQIAPGQTGKIADYNYKLPDDFTGCVIAWNSNNLDSKVGGNYNYLYRLFRKSNLKPFERDISTEIYQAGSTPCNGVEGFNCYFPLQSYGFQPTNGVGYQPYRVVVLSFELLHAPATVCGPKKSTNLVKNKCVNFNFNGLTGTGVLTESNKKFLPFQQFGRDIADTTDAVRDPQTLEILDITPCSFGGVSVITPGTNTSNQVAVLYQDVNCTEVPVAIHADQLTPTWRVYSTGSNVFQTRAGCLIGAEHVNNSYECDIPIGAGICASYQTQTNSPRRARSVASQSIIAYTMSLGAENSVAYSNNSIAIPTNFTISVTTEILPVSMTKTSVDCTMYICGDSTECSNLLLQYGSFCTQLNRALTGIAVEQDKNTQEVFAQVKQIYKTPPIKDFGGFNFSQILPDPSKPSKRSFIEDLLFNKVTLADAGFIKQYGDCLGDIAARDLICAQKFNGLTVLPPLLTDEMIAQYTSALLAGTITSGWWFGAGAALQIPFAMQMAYRFNGIGVTQNVLYENQKLIANQFNSAIGKIQDSLSSTASALGKLQDVVNQNAQALNTLVKQLSSNFGAISSVLNDILSRLDPPEAEVQIDRLITGRLQSLQTYVTQQLIRAAEIRWSANLAATKMSECVLGQSKRVDFCGKGYHLMSFPQSAPHGVVFLHVTYVPAQEKNFTTAPAICHDGKAHFPREGVFVSNGTHWFVTQRNFYEPQIITTDNTFVSGNCDVVIGIVNNTVYDPLQPELDS

SEQ ID NO: 2793 - protein, 1147 aa, Artificial Sequence
  SARS-CoV-2/USA/WA-UW292/2020__EPI_ISL_418077 spike protein (1-1147)(K986P_V987P_T887W_A1020W)
MFVFLVLLPLVSSQCVNLTTRTQLPPAYTNSFTRGVYYPDKVFRSSVLHSTQDLFLPFFSNVTWFHAIHVSGTNGTKRFDNPVLPFNDGVYFASTEKSNIIRGWIFGTTLDSKTQSLLIVNNATNVVIKVCEFQFCNDPFLGVYYHKNNKSWMESEFRVYSSANNCTFEYVSQPFLMDLEGKQGNFKNLREFVFKNIDGYFKIYSKHTPINLVRDLPQGFSALEPLVDLPIGINITRFQTLLALHRSYLTPGDSSSGWTAGAAAYYVGYLQPRTFLLKYNENGTITDAVDCALDPLSETKCTLKSFTVEKGIYQTSNFRVQPTESIVRFPNITNLCPFGEVFNATRFASVYAWNRKRISNCVADYSVLYNSASFSTFKCYGVSPTKLNDLCFTNVYADSFVIRGDEVRQIAPGQTGKIADYNYKLPDDFTGCVIAWNSNNLDSKVGGNYNYLYRLFRKSNLKPFERDISTEIYQASSTPCNGVEGFNCYFPLQSYGFQPTNGVGYQPYRVVVLSFELLHAPATVCGPKKSTNLVKNKCVNFNFNGLTGTGVLTESNKKFLPFQQFGRDIADTTDAVRDPQTLEILDITPCSFGGVSVITPGTNTSNQVAVLYQDVNCTEVPVAIHADQLTPTWRVYSTGSNVFQTRAGCLIGAEHVNNSYECDIPIGAGICASYQTQTNSPRRARSVASQSIIAYTMSLGAENSVAYSNNSIAIPTNFTISVTTEILPVSMTKTSVDCTMYICGDSTECSNLLLQYGSFCTQLNRALTGIAVEQDKNTQEVFAQVKQIYKTPPIKDFGGFNFSQILPDPSKPSKRSFIEDLLFNKVTLADAGFIKQYGDCLGDIAARDLICAQKFNGLTVLPPLLTDEMIAQYTSALLAGTITSGWWFGAGAALQIPFAMQMAYRFNGIGVTQNVLYENQKLIANQFNSAIGKIQDSLSSTASALGKLQDVVNQNAQALNTLVKQLSSNFGAISSVLNDILSRLDPPEAEVQIDRLITGRLQSLQTYVTQQLIRAAEIRWSANLAATKMSECVLGQSKRVDFCGKGYHLMSFPQSAPHGVVFLHVTYVPAQEKNFTTAPAICHDGKAHFPREGVFVSNGTHWFVTQRNFYEPQIITTDNTFVSGNCDVVIGIVNNTVYDPLQPELDS

SEQ ID NO: 2794 - protein, 1147 aa, Artificial Sequence
  SARS-CoV-2/Iceland/192/2020__EPI_ISL_417819 spike protein (1-1147)(K986P_V987P_T887W_A1020W)
MFVFFVLLPLVSSQCVNLTTRTQLPPAYTNSFTRGVYYPDKVFRSSVLHSTQDLFLPFFSNVTWFHAIHVSGTNGTKRFDNPVLPFNDGVYFASTEKSNIIRGWIFGTTLDSKTQSLLIVNNATNVVIKVCEFQFCNDPFLGVYYHKNNKSWMESEFRVYSSANNCTFEYVSQPFLMDLEGKQGNFKNLREFVFKNIDGYFKIYSKHTPINLVRDLPQGFSALEPLVDLPIGINITRFQTLLALHRSYLTPGDSSSGWTAGAAAYYVGYLQPRTFLLKYNENGTITDAVDCALDPLSETKCTLKSFTVEKGIYQTSNFRVQPTESIVRFPNITNLCPFGEVFNATRFASVYAWNRKRISNCVADYSVLYNSASFSTFKCYGVSPTKLNDLCFTNVYADSFVIRGDEVRQIAPGQTGKIADYNYKLPDDFTGCVIAWNSNNLDSKVGGNYNYLYRLFRKSNLKPFERDISTEIYQAGSTPCNGVEGFNCYFPLQSYGFQPTNGVGYQPYRVVVLSFELLHAPATVCGPKKSTNLVKNKCVNFNFNGLTGTGVLTESNKKFLPFQQFGRDIADTTDAVRDPQTLEILDITPCSFGGVSVITPGTNTSNQVAVLYQGVNCTEVPVAIHADQLTPTWRVYSTGSNVFQTRAGCLIGAEHVNNSYECDIPIGAGICASYQTQTNSPRRARSVASQSIIAYTMSLGAENSVAYSNNSIAIPTNFTISVTTEILPVSMTKTSVDCTMYICGDSTECSNLLLQYGSFCTQLNRALTGIAVEQDKNTQEVFAQVKQIYKTPPIKDFGGFNFSQILPDPSKPSKRSFIEDLLFNKVTLADAGFIKQYGDCLGDIAARDLICAQKFNGLTVLPPLLTDEMIAQYTSALLAGTITSGWWFGAGAALQIPFAMQMAYRFNGIGVTQNVLYENQKLIANQFNSAIGKIQDSLSSTASALGKLQDVVNQNAQALNTLVKQLSSNFGAISSVLNDILSRLDPPEAEVQIDRLITGRLQSLQTYVTQQLIRAAEIRWSANLAATKMSECVLGQSKRVDFCGKGYHLMSFPQSAPHGVVFLHVTYVPAQEKNFTTAPAICHDGKAHFPREGVFVSNGTHWFVTQRNFYEPQIITTDNTFVSGNCDVVIGIVNNTVYDPLQPELDS

SEQ ID NO: 2795 - protein, 1147 aa, Artificial Sequence
  SARS-CoV-2/Belgium/ULG-6939/2020__EPI_ISL_417020 spike protein (1-1147)(K986P_V987P_T887W_A1020W)
MFVFLVLLPLVSSQCVNLTTRTQLPPAYTNSFTRGVYYPDKVFRSSVLHSTQDLFLPFFSNVTWFHAIHVSGTNGTKRFDNPVLPFNDGVYFASTEKSNIIRGWIFGTTLDSKTQSLLIVNNATNVVIKVCEFQFCNDPFLGVYYHKNNKSWMESEFRVYSSANNCTFEYVSQPFLMDLEGKQGNFKNLREFVFKNIDGYFKIYSKHTPINLVRDLPQGFSALEPLVDLPIGINITRFQTLLALHRSYLTPGDSSSGWTAGAAAYYVGYLQPRTFLLKYNENGTITDAVDCALDPLSETKCTLKSFTVEKGIYQTSNFRVQPTESIVRFPNITNLCPFGEVFNATRFASVYAWNRKRISNCVADYSVLYNSASFSTFKCYGVSPTKLNDLCFTNVYADSFVIRGDEVRQIAPGQTGKIADYNYKLPDDFTGCVIAWNSNNLDSKVGGNYNYLYRLFRKSNLKPFERDISTEIYQAGSTPCNGVEGFNCYFPLQSYGFQPTNGVGYQPYRVVVLSFELLHAPATVCGPKKSTNLVKNKCVNFNFNGLTGTGVLTESNKKFLPFQQFGRDIADTTDAVRDPQTLEILDITPCSFGGVSVITPGTNTSNQVAVLYQGVNCTEVPVAIHADQLTPTWRVYSTGSNVFQTRAGCLIGAEHVNNSYECDIPIGAGICASYQTQTNSPRRARSVASQSIIAYTMSLGAENSVVYSNNSIAIPTNFTISVTTEILPVSMTKTSVDCTMYICGDSTECSNLLLQYGSFCTQLNRALTGIAVEQDKNTQEVFAQVKQIYKTPPIKDFGGFNFSQILPDPSKPSKRSFIEDLLFNKVTLADAGFIKQYGDCLGDIAARDLICAQKFNGLTVLPPLLTDEMIAQYTSALLAGTITSGWWFGAGAALQIPFAMQMAYRFNGIGVTQNVLYENQKLIANQFNSAIGKIQDSLSSTASALGKLQDVVNQNAQALNTLVKQLSSNFGAISSVLNDILSRLDPPEAEVQIDRLITGRLQSLQTYVTQQLIRAAEIRWSANLAATKMSECVLGQSKRVDFCGKGYHLMSFPQSAPHGVVFLHVTYVPAQEKNFTTAPAICHDGKAHFPREGVFVSNGTHWFVTQRNFYEPQIITTDNTFVSGNCDVVIGIVNNTVYDPLQPELDS

SEQ ID NO: 2796 - protein, 1147 aa, Artificial Sequence
  SARS-CoV-2/France/HF2496/2020__EPI_ISL_418231 spike protein (1-1147)(K986P_V987P_T887W_A1020W)
MFVFLVLLPLVSSQCVNLTTRTQLPPAYTNSFTRGVYYPDKVFRSSVLHSTQDLFLPFFSNVTWFHAIHVSGTNGTKRFDNPVLPFNDGVYFASTEKSNIIRGWIFGTTLDSKTQSLLIVNNATNVVIKVCEFQFCNDPFLGVYYHKNNKSWMESEFRVYSSANNCTFEYVSQPFLMDLEGKQGNFKNLREFVFKNIDGYFKIYSKHTPINLVRDLPQGFSALEPLVDLPIGINITRFQTLLALHRSYLTPGDSSSGWTAGAAAYYVGYLQPRTFLLKYNENGTITDAVDCALDPLSETKCTLKSFTVEKGIYQTSNFRVQPTESIVRFPNITNLCPFGEVFNATRFASVYAWNRKRISNCVADYSVLYNSASFSTFKCYGVSPTKLNDLCFTNVYADSFVIRGDEVRQIAPGQTGKIADYNYKLPDDFTGCVIAWNSNNLDSKVGGNYNYLYRLFRKSNLKPFERDISTEIYQAGSTPCNGVEGFNCYFPLQSYGFQPTNGVGYQPYRVVVLSFELLHAPATVCGPKKSTNLVKNKCVNFNFNGLTGTGVLTESNKKFLPFQQFGRDIADTTDAVRDPQTLEILDITPCSFGGVSVITPGTNTSNQVAVLYQGVNCTEVPVAIHADQLTPTWRVYSTGSNVFQTRAGCLIGAEHVNNSYECDIPIGAGICASYQTQTNSPRRARSVASQSIIAYTMSLGAENSVAYSNNSIAIPTNFTISVTTEILPVSMTKTSVDCTMYICGDSTECSNLLLQYGSFCTQLNRALTGIAVEQDKNTQEVFAQVKQIYKTPPIKDFGGFNFSQILPDPSKPSKRSFIEDLLFNKVTLADAGFIKQYGDCLGDIVARDLICAQKFNGLTVLPPLLTDEMIAQYTSALLAGTITSGWWFGAGAALQIPFAMQMAYRFNGIGVTQNVLYENQKLIANQFNSAIGKIQDSLSSTASALGKLQDVVNQNAQALNTLVKQLSSNFGAISSVLNDILSRLDPPEAEVQIDRLITGRLQSLQTYVTQQLIRAAEIRWSANLAATKMSECVLGQSKRVDFCGKGYHLMSFPQSAPHGVVFLHVTYVPAQEKNFTTAPAICHDGKAHFPREGVFVSNGTHWFVTQRNFYEPQIITTDNTFVSGNCDVVIGIVNNTVYDPLQPELDS

SEQ ID NO: 2797 - protein, 1147 aa, Artificial Sequence
  SARS-CoV-2/USA/WA-UW291/2020__EPI_ISL_418076 spike protein (1-1147)(K986P_V987P_T887W_A1020W)
MFVFLVLLPLVSSQCVNLTTRTQLPPAYTNSFTRGVYYPDKVFRSSVLHSTQDLFLPFFSNVTWFHAIHVSGTNGTKRFDNPVLPFNDGVYFASTEKSNIIRGWIFGTTLDSKTQSLLIVNNATNVVIKVCEFQFCNDPFLGVYYHKNNKSWMESEFRVYSSANNCTFEYVSQPFLMDLEGKQGNFKNLREFVFKNIDGYFKIYSKHTPINLVRDLPQGFSALEPLVDLPIGINITRFQTLLALHRSYLTPGDSSSGWTAGAAAYYVGYLQPRTFLLKYNENGTITDAVDCALDPLSETKCTLKSFTVEKGIYQTSNFRVQPTESIVRFPNITNLCPFGEVFNATRFASVYAWNRKRISNCVADYSVLYNSASFSTFKCYGVSPTKLNDLCFTNVYADSFVIRGDEVRQIAPGQTGKIADYNYKLPDDFTGCVIAWNSNNLDSKVGGNYNYLYRLFRKSNLKPFERDISTEIYQAGSTPCNGVEGFNCYFPLQSYGFQPTNGVGYQPYRVVVLSFELLHAPATVCGPKKSTNLVKNKCVNFNFNGLTGTGVLTESNKKFLPFQQFGRDIADTTDAVRDPQTLEILDITPCSFGGVSVITPGTNTSNQVAVLYQGVNCTEVPVAIHADQLTPTWRVYSTGSNVFQTRAGCLIGAEHVNNSYECDIPIGAGICASYQTQTNSPRRARSVASQSIIAYTMSLGAENSVAYSNNSIAIPTNFTISVTTEILPVSMTKTSVDCTMYICGDSTECSNLLLQYGSFCTQLNRALTGIAVEQDKNTQEVFAQVKQIYKTPPIKDFGGFNFSQILPDPSKPSKRSFIEDLLFNKVTLADAGFIKQYGDCLGDIAARDLICAQKFNGLTVLPPLLTDEMIAQYTSALLAGTITSGWWFGAGAALQIPFAMQMAYRFNGIGVTQNVLYENQKLIANQFNSAIGKIQYSLSSTASALGKLQDVVNQNAQALNTLVKQLSSNFGAISSVLNDILSRLDPPEAEVQIDRLITGRLQSLQTYVTQQLIRAAEIRWSANLAATKMSECVLGQSKRVDFCGKGYHLMSFPQSAPHGVVFLHVTYVPAQEKNFTTAPAICHDGKAHFPREGVFVSNGTHWFVTQRNFYEPQIITTDNTFVSGNCDVVIGIVNNTVYDPLQPELDS

SEQ ID NO: 2798 - protein, 1147 aa, Artificial Sequence; identical to SEQ ID NO: 2761
  SARS-CoV-2/Portugal/PT0034/2020__EPI_ISL_418019 spike protein (1-1147)(K986P_V987P_T887W_A1020W)

SEQ ID NO: 2799 - protein, 1147 aa, Artificial Sequence; identical to SEQ ID NO: 2753
  SARS-CoV-2/Iceland/202/2020__EPI_ISL_417750 spike protein (1-1147)(K986P_V987P_T887W_A1020W)

SEQ ID NO: 2800 - protein, 1147 aa, Artificial Sequence
  SARS-CoV-2/USA/WA-UW261/2020__EPI_ISL_418046 spike protein (1-1147)(K986P_V987P_T887W_A1020W)
MFVFLVLLPLVSSQCVNLTTRTQLPPAYTNSFTRGVYYPDKVFRSSVLHSTQDLFLPFFSNVTWFHAIHVSGTNGTKRFDNPVLPFNDGVYFASTEKSNIIRGWIFGTTLDSKTQSLLIVNNATNVVIKVCEFQFCNDPFLGVYYHKNNKSWMESEFRVYSSANNCTFEYVSQPFLMDLEGKQGNFKNLREFVFKNIDGYFKIYSKHTPINLVRDLPQGFSALEPLVDLPIGINITRFQTLLALHRSYLTPGDSSSGWTAGAAAYYVGYLQPRTFLLKYNENGTITDAVDCALDPLSETKCTLKSFTVEKGIYQTSNFRVQPTESIVRFPNITNLCPFGEVFNATRFTSVYAWNRKRISNCVADYSVLYNSASFSTFKCYGVSPTKLNDLCFTNVYADSFVIRGDEVRQIAPGQTGKIADYNYKLPDDFTGCVIAWNSNNLDSKVGGNYNYLYRLFRKSNLKPFERDISTEIYQAGSTPCNGVEGFNCYFPLQSYGFQPTNGVGYQPYRVVVLSFELLHAPATVCGPKKSTNLVKNKCVNFNFNGLTGTGVLTESNKKFLPFQQFGRDIADTTDAVRDPQTLEILDITPCSFGGVSVITPGTNTSNQVAVLYQDVNCTEVPVAIHADQLTPTWRVYSTGSNVFQTRAGCLIGAEHVNNSYECDIPIGAGICASYQTQTNSPRRARSVASQSIIAYTMSLGAENSVAYSNNSIAIPTNFTISVTTEILPVSMTKTSVDCTMYICGDSTECSNLLLQYGSFCTQLNRALTGIAVEQDKNTQEVFAQVKQIYKTPPIKDFGGFNFSQILPDPSKPSKRSFIEDLLFNKVTLADAGFIKQYGDCLGDIAARDLICAQKFNGLTVLPPLLTDEMIAQYTSALLAGTITSGWWFGAGAALQIPFAMQMAYRFNGIGVTQNVLYENQKLIANQFNSAIGKIQDSLSSTASALGKLQDVVNQNAQALNTLVKQLSSNFGAISSVLNDILSRLDPPEAEVQIDRLITGRLQSLQTYVTQQLIRAAEIRWSANLAATKMSECVLGQSKRVDFCGKGYHLMSFPQSAPHGVVFLHVTYVPAQEKNFTTAPAICHDGKAHFPREGVFVSNGTHWFVTQRNFYEPQIITTDNTFVSGNCDVVIGIVNNTVYDPLQPELDS

SEQ ID NO: 2801 - protein, 1147 aa, Artificial Sequence
  SARS-CoV-2/Portugal/PT0035/2020__EPI_ISL_418020 spike protein (1-1147)(K986P_V987P_T887W_A1020W)
MFVFLVLLPLVSSQCVNLTTRTQLPPAYTNSFTRGVYYPDKVFRSSVLHSTQDLFLPFFSNVTWFHAIHVSGTNGTKRFDNPVLPFNDGVYFASTEKSNIIRGWIFGTTLDSKTQSLLIVNNATNVVIKVCEFQFCNDPFLGVYYHKNNKSWMESEFRVYSSANNCTFEYVSQPFLMDLEGKQGNFKNLREFVFKNIDGYFKIYSKHTPINLVRDLPQGFSALEPLVDLPIGINITRFQTLLALHRSYLTPGDSSSGWTAGAAAYYVGYLQPRTFLLKYNENGTITDAVDCALDPLSETKCTLKSFTVEKGIYQTSNFRVQPTESIVRFPNITNLCPFGEVFNATRFASVYAWNRKRISNCVADYSVLYNSASFSTFKCYGVSPTKLNDLCFTNVYADSFVIRGDEVRQIAPGQTGKIADYNYKLPDDFTGCVIAWNSNNLDSKVGGNYNYLYRLFRKSNLKPFERDISTEIYQAGSTPCNGVEGFNCYFPLQSYGFQPTNGVGYQPYRVVVLSFELLHAPATVCGPKKSTNLVKNKCVNFNFNGLTGTGVLTESNKKFLPFQQFGRDIADTTDAVRDPQTLEILDITPCSFGGVSVITPGTNTSNQVAVLYQDVNCTEVPVAIHADQLTPTWRVYSTGSNVFQTRAGCLIGAEHVNNSYECDIPIGAGICASYQTQTNSPRRARSVASQSIIAYTMSLGAENSVAYSNNSIAIPTNFTISVTTEILPVSMTKTSVDCTMYICGDSTECSNLLLQYGSFCTQLNRALTGIAVEQDKNTQEVFAQVKQIYKTPPIKDFGGFNFSQILPDPSKPSKRSFIEDLLFNKVTLADAGFIKQYGDCLGDISARDLICAQKFNGLTVLPPLLTDEMIAQYTSALLAGTITSGWWFGAGAALQIPFAMQMAYRFNGIGVTQNVLYENQKLIANQFNSAIGKIQDSLSSTASALGKLQDVVNQNAQALNTLVKQLSSNFGAISSVLNDILSRLDPPEAEVQIDRLITGRLQSLQTYVTQQLIRAAEIRWSANLAATKMSECVLGQSKRVDFCGKGYHLMSFPQSAPHGVVFLHVTYVPAQEKNFTTAPAICHDGKAHFPREGVFVSNGTHWFVTQRNFYEPQIITTDNTFVSGNCDVVIGIVNNTVYDPLQPELDS

SEQ ID NO: 2802 - protein, 1147 aa, Artificial Sequence
  SARS-CoV-2/USA/NY-NYUMC7/2020__EPI_ISL_418192 spike protein (1-1147)(K986P_V987P_T887W_A1020W)
MFVFLVLLPLVSSQCVNLTTRTQLPPAYTNSFTRGVYYPDKVFRSSVLHSTQDLFLPFFSNVTWFHAIHVSGTNGTKRFDNPVLPFNDGVYFASTEKSNIIRGWIFGTTLDSKTQSLLIVNNATNVVIKVCEFQFCNDPFLGVYHHKNNKSWMESEFRVYSSANNCTFEYVSQPFLMDLEGKQGNFKNLREFVFKNIDGYFKIYSKHTPINLVRDLPQGFSALEPLVDLPIGINITRFQTLLALHRSYLTPGDSSSGWTAGAAAYYVGYLQPRTFLLKYNENGTITDAVDCALDPLSETKCTLKSFTVEKGIYQTSNFRVQPTESIVRFPNITNLCPFGEVFNATRFASVYAWNRKRISNCVADYSVLYNSASFSTFKCYGVSPTKLNDLCFTNVYADSFVIRGDEVRQIAPGQTGKIADYNYKLPDDFTGCVIAWNSNNLDSKVGGNYNYLYRLFRKSNLKPFERDISTEIYQAGSTPCNGVEGFNCYFPLQSYGFQPTNGVGYQPYRVVVLSFELLHAPATVCGPKKSTNLVKNKCVNFNFNGLTGTGVLTESNKKFLPFQQFGRDIADTTDAVRDPQTLEILDITPCSFGGVSVITPGTNTSNQVAVLYQGVNCTEVPVAIHADQLTPTWRVYSTGSNVFQTRAGCLIGAEHVNNSYECDIPIGAGICASYQTQTNSPRRARSVASQSIIAYTMSLGAENSVAYSNNSIAIPTNFTISVTTEILPVSMTKTSVDCTMYICGDSTECSNLLLQYGSFCTQLNRALTGIAVEQDKNTQEVFAQVKQIYKTPPIKDFGGFNFSQILPDPSKPSKRSFIEDLLFNKVTLADAGFIKQYGDCLGDIAARDLICAQKFNGLTVLPPLLTDEMIAQYTSALLAGTITSGWWFGAGAALQIPFAMQMAYRFNGIGVTQNVLYENQKLIANQFNSAIGKIQDSLSSTASALGKLQDVVNQNAQALNTLVKQLSSNFGAISSVLNDILSRLDPPEAEVQIDRLITGRLQSLQTYVTQQLIRAAEIRWSANLAATKMSECVLGQSKRVDFCGKGYHLMSFPQSAPHGVVFLHVTYVPAQEKNFTTAPAICHDGKAHFPREGVFVSNGTHWFVTQRNFYEPQIITTDNTFVSGNCDVVIGIVNNTVYDPLQPELDS

SEQ ID NO: 2803 - protein, 1147 aa, Artificial Sequence
  SARS-CoV-2/Iceland/189/2020__EPI_ISL_417709 spike protein (1-1147)(K986P_V987P_T887W_A1020W)
MFVFLVLLPLVSSQCVNLTTRTQLPPAYTNSFTRGVYYPDKVFRSSVLHSTQDLFLPFFSNVTWFHAIHVSGTNGTKRFDNPVLPFNDGVYFASTEKSNIIRGWIFGTTLDSKTQSLLIVNNATNVVIKVCEFQFCNDPFLGVYYHKNNKSWMESEFRVYSSANNCTFEYVSQPFLMDLEGKQGNFKNLREFVFKNIDGYFKIYSKHTPINLVRDLPQGFSALEPLVDLPIGINITRFQTLLALHRSYLTPGDSSSGWTAGAAAYYVGYLQPRTFLLKYNENGTITDAVDCALDPLSETKCTLKSFTVEKGIYQTSNFRVQPTESIVRFPNITNLCPFGEVFNATRFASVYAWNRKRISNCVADYSVLYNSASFSTFKCYGVSPTKLNDLCFTNVYADSFVIRGDEVRQIAPGQTGKIADYNYKLPDDFTGCVIAWNSNNLDSKVGGNYNYLYRLFRKSNLKPFERDISTEIYQAGSTPCNGVEGFNCYFPLQSYGFQPTNGVGYQPYRVVVLSFELLHAPATVCGPKKSTNLVKNKCVNFNFNGLTGTGVLTESNKKFLPFQQFGRDIADTTDAVRDPQTLEILDITPCSFGGVSVITPGTNTSNQVAVLYQGVNCTEVPVAIHADQLTPTWRVYSTGSNVFQTRAGCLIGAEHVNNSYECDIPIGAGICASYQTQTNSPRRARSVASQSIIAYTMSLGAENSVAYSNNSIAIPTNFTISVTTEILPVSMTKTSVDCTMYICGDSTECSNLLLQYGSFCTQLNRALTGIAVEQDKNTQEVFAQVKQIYKTPPIKDFGGFNFSQILPDPSKPSKRSFIEDLLFNKVTLADAGFTKQYGDCLGDIAARDLICAQKFNGLTVLPPLLTDEMIAQYTSALLAGTITSGWWFGAGAALQIPFAMQMAYRFNGIGVTQNVLYENQKLIANQFNSAIGKIQDSLSSTASALGKLQDVVNQNAQALNTLVKQLSSNFGAISSVLNDILSRLDPPEAEVQIDRLITGRLQSLQTYVTQQLIRAAEIRWSANLAATKMSECVLGQSKRVDFCGKGYHLMSFPQSAPHGVVFLHVTYVPAQEKNFTTAPAICHDGKAHFPREGVFVSNGTHWFVTQRNFYEPQIITTDNTFVSGNCDVVIGIVNNTVYDPLQPELDS

SEQ ID NO: 2804 - protein, 1147 aa, Artificial Sequence
  SARS-CoV-2/Australia/NSW56/2020__EPI_ISL_417408 spike protein (1-1147)(K986P_V987P_T887W_A1020W)
MFVFLVLLPLVSSQCVNLTTRTQLPPAYTNSFTRGVYYPDKVFRSSVLHSTQDLFLPFFSNVTWFHAIHVSGTNGTKRFDNPVLPFNDGVYFASTEKSNIIRGWIFGTTLDSKTQSLLIVNNATNVVIKVCEFQFCNDPFLGVYYHKNNKSWMESEFRVYSSANNCTFEYVSQPFLMDLEGKQGNFKNLREFVFKNIDGYFKIYSKHTPINLVRDLPQGFSALEPLVDLPIGINITRFQTLLALHRSYLTPGDSSSGWTAGAAAYYVGYLQPRTFLLKYNENGTITDAVDCALDPLSETKCTLKSFTVEKGIYQTSNFRVQPTESIVRFPNITNLCPFGEVFNATRFASVYAWNRKRISNCVADYSVLYNSASFSTFKCYGVSPTKLNDLCFTNVYADSFVIRGDEVRQIAPGQTGKIADYNYKLPDDFTGCVIAWNSNNLDSKVGGNYNYLYRLFRKSNLKPFERDISTEIYQAGSTPCNGVEGFNCYFPLQSYGFQPTNGVGYQPYRVVVLSFELLHAPATVCGPKKSTNLVKNKCVNFNFNGLTGTGVLTESNKKFLPFQQFGRDIADTTDAVRDPQTLEILDITPCSFGGVSVITPGTNTSNQVAVLYQDVNCTEVPVAIHADQLTPTWRVYSTGSNVFQTRAGCLIGAEHVNNSYECDIPIGAGICASYQTQTNSPRRARSVASQSIIAYTMSLGAENSVAYSNNSIAIPTNFTISVTTEILPVSMTKTSVDCTMYICGDSTECSNLLLQYGSFCTQLNRALTGIAVEQDKNTQEVFAQVKQIYKTPPIKDFGGFNFSQILPDSSKPSKRSFIEDLLFNKVTLADAGFIKQYGDCLGDIAARDLICAQKFNGLTVLPPLLTDEMIAQYTSALLAGTITSGWWFGAGAALQIPFAMQMAYRFNGIGVTQNVLYENQKLIANQFNSAIGKIQDSLSSTASALGKLQDVVNQNAQALNTLVKQLSSNFGAISSVLNDILSRLDPPEAEVQIDRLITGRLQSLQTYVTQQLIRAAEIRWSANLAATKMSECVLGQSKRVDFCGKGYHLMSFPQSAPHGVVFLHVTYVPAQEKNFTTAPAICHDGKAHFPREGVFVSNGTHWFVTQRNFYEPQIITTDNTFVSGNCDVVIGIVNNTVYDPLQPELDS

SEQ ID NO: 2805 - protein, 1147 aa, Artificial Sequence
  SARS-CoV-2/Iceland/280/2020__EPI_ISL_417608 spike protein (1-1147)(K986P_V987P_T887W_A1020W)
MFVFLVLLPLVSSQCVNLTTRTQLPPAYTNSFTRGVYYPDKVFRSSVLHSTQDLFLPFFSNVTWFHAIHVSGTNGTKRFDNPVLPFNDGVYFASTEKSNIIRGWIFGTTLDSKTQSLLIVNNATNVVIKVCEFQFCNDPFLGVYYHKNNKSWMESEFRVYSSANNCTFEYVSQPFLMDLEGKQGNFKNLREFVFKNIDGYFKIYSKHTPINLVRDLPQGFSALEPLVDLPIGINITRFQTLLALHRSYLTPGDSSSGWTAGAAAYYVGYLQPRTFLLKYNENGTITDAVDCALDPLSETKCTLKSFTVEKGIYQTSNFRVQPTESIVRFPNITNLCPFGEVFNATRFASVYAWNRKRISNCVADYSVLYNSASFSTFKCYGVSPTKLNDLCFTNVYADSFVIRGDEVRQIAPGQTGKIADYNYKLPDDFTGCVIAWNSNNLDSKVGGNYNYLYRLFRKSNLKPFERDISTEIYQAGSTPCNGVEGFNCYFPLQSYGFQPTNGVGYQPYRVVVLSFELLHAPATVCGPKKSTNLVKNKCVNFNFNGLTGTGVLTESNKKFLPFQQFGRDIADTTDAVRDPQTLEILDITPCSFGGVSVITPGTNTSNQVAVLYQGVNCTEVPVAIHADQLTPTWRVYSTGSNVFQTRAGCLIGAEHVNNSYECDIPIGAGICASYHTQTNSPRRARSVASQSIIAYTMSLGAENSVAYSNNSIAIPTNFTISVTTEILPVSMTKTSVDCTMYICGDSTECSNLLLQYGSFCTQLNRALTGIAVEQDKNTQEVFAQVKQIYKTPPIKDFGGFNFSQILPDPSKPSKRSFIEDLLFNKVTLADAGFIKQYGDCLGDIAARDLICAQKFNGLTVLPPLLTDEMIAQYTSALLAGTITSGWWFGAGAALQIPFAMQMAYRFNGIGVTQNVLYENQKLIANQFNSAIGKIQDSLSSTASALGKLQDVVNQNAQALNTLVKQLSSNFGAISSVLNDILSRLDPPEAEVQIDRLITGRLQSLQTYVTQQLIRAAEIRWSANLAATKMSECVLGQSKRVDFCGKGYHLMSFPQSAPHGVVFLHVTYVPAQEKNFTTAPAICHDGKAHFPREGVFVSNGTHWFVTQRNFYEPQIITTDNTFVSGNCDVVIGIVNNTVYDPLQPELDS

SEQ ID NO: 2806 - protein, 1147 aa, Artificial Sequence; identical to SEQ ID NO: 2761
  SARS-CoV-2/Iceland/247/2020__EPI_ISL_417575 spike protein (1-1147)(K986P_V987P_T887W_A1020W)

SEQ ID NO: 2807 - protein, 1147 aa, Artificial Sequence
  SARS-CoV-2/Iceland/238/2020__EPI_ISL_417566 spike protein (1-1147)(K986P_V987P_T887W_A1020W)
MFVFLVLLPLVSSQCVNLTTRTQLPPAYTNSFTRGVYYPDKVFRSSVLHSTQDLFLPFFSNVTWFHAIHVSGTNGTKRFDNPVLPFNDGVYFASTEKSNIIRGWIFGTTLDSKTQSLLIVNNATNVVIKVCEFQFCNDPFLGVYYHKNNKSWMESEFRVYSSANNCTFEYVSQPFLMDLEGKQGNFKNLREFVFKNIDGYFKIYSKHTPINLVRDLPQGFSALEPLVDLPIGINITRFQTLLALHRSYLTPGDSSSGWTAGAAAYYVGYLQPRTFLLKYNENGTITDAVDCALDPLSETKCTLKSFTVEKGIYQTSNFRVQPTESIVRFPNITNLCPFGEVFNATRFASVYAWNRKRISNCVADYSVLYNSASFSTFKCYGVSPTKLNDLCFTNVYADSFVIRGDEVRQIAPGQTGKIADYNYKLPDDFTGCVIAWNSNNLDSKVGGNYNYLYRLFRKSNLKPFERDISTEIYQAGSTPCNGVEGFNCYFPLQSYGFQPTNGVGYQPYRVVVLSFELLHAPATVCGPKKSTNLVKNKCVNFNFNGLTGTGVLTESNKKFLPFQQFGRDIADTTDAVRDPQTLEILDITPCSFGGVSVITPGTNTSNQVAVLYQGVNCTEVPVAIHADQLTPTWRVYSTGSNVFQTRAGCLIGAEHVNNSYECDIPIGAGICASYQTQTNSPRRARSVASQSIIAYTMSLGAENSVAYSNNSIAIPTNFTISVTTEILPVSMTKTSVDCTMYICGDSTECSNLLLQYGSFCTQLNRALTGIAVEQDKNTQEVFAQVKQIYKTPPIKDFGGFNFSQILPDPSKPSKRSFIEDLLFNKVTLADVGFIKQYGDCLGDIAARDLICAQKFNGLTVLPPLLTDEMIAQYTSALLAGTITSGWWFGAGAALQIPFAMQMAYRFNGIGVTQNVLYENQKLIANQFNSAIGKIQDSLSSTASALGKLQDVVNQNAQALNTLVKQLSSNFGAISSVLNDILSRLDPPEAEVQIDRLITGRLQSLQTYVTQQLIRAAEIRWSANLAATKMSECVLGQSKRVDFCGKGYHLMSFPQSAPHGVVFLHVTYVPAQEKNFTTAPAICHDGKAHFPREGVFVSNGTHWFVTQRNFYEPQIITTDNTFVSGNCDVVIGIVNNTVYDPLQPELDS

SEQ ID NO: 2808 - protein, 1147 aa, Artificial Sequence
  SARS-CoV-2/Greece/16/2020__EPI_ISL_418265 spike protein (1-1147)(K986P_V987P_T887W_A1020W)
MFVFLVLLPLVSSQCVNLTTRTQLPPAYTNSFTRGVYYPDKVFRSSVLHSTQDLFLPFFSNVTWFHAIHVSGTNGTKRFDNPVLPFNDGVYFASTEKSNIIRGWIFGTTLDSKTQSLLIVNNATNVVIKVCEFQFCNDPFLGVYYHKNNKSWMESEFRVYSSANNCTFEYVSQPFLMDLEGKQGNFKNLREFVFKNVDGYFKIYSKHTPINLVRDLPQGFSALEPLVDLPIGINITRFQTLLALHRSYLTPGDSSSGWTAGAAAYYVGYLQPRTFLLKYNENGTITDAVDCALDPLSETKCTLKSFTVEKGIYQTSNFRVQPTESIVRFPNITNLCPFGEVFNATRFASVYAWNRKRISNCVADYSVLYNSASFSTFKCYGVSPTKLNDLCFTNVYADSFVIRGDEVRQIAPGQTGKIADYNYKLPDDFTGCVIAWNSNNLDSKVGGNYNYLYRLFRKSNLKPFERDISTEIYQAGSTPCNGVEGFNCYFPLQSYGFQPTNGVGYQPYRVVVLSFELLHAPATVCGPKKSTNLVKNKCVNFNFNGLTGTGVLTESNKKFLPFQQFGRDIADTTDAVRDPQTLEILDITPCSFGGVSVITPGTNTSNQVAVLYQDVNCTEVPVAIHADQLTPTWRVYSTGSNVFQTRAGCLIGAEHVNNSYECDIPIGAGICASYQTQTNSPRRARSVASQSIIAYTMSLGAENSVAYSNNSIAIPTNFTISVTTEILPVSMTKTSVDCTMYICGDSTECSNLLLQYGSFCTQLNRALTGIAVEQDKNTQEVFAQVKQIYKTPPIKDFGGFNFSQILPDPSKPSKRSFIEDLLFNKVTLADAGFIKQYGDCLGDIAARDLICAQKFNGLTVLPPLLTDEMIAQYTSALLAGTITSGWWFGAGAALQIPFAMQMAYRFNGIGVTQNVLYENQKLIANQFNSAIGKIQDSLSSTASALGKLQDVVNQNAQALNTLVKQLSSNFGAISSVLNDILSRLDPPEAEVQIDRLITGRLQSLQTYVTQQLIRAAEIRWSANLAATKMSECVLGQSKRVDFCGKGYHLMSFPQSAPHGVVFLHVTYVPAQEKNFTTAPAICHDGKAHFPREGVFVSNGTHWFVTQRNFYEPQIITTDNTFVSGNCDVVIGIVNNTVYDPLQPELDS

SEQ ID NO: 2809 - protein, 1147 aa, Artificial Sequence
  SARS-CoV-2/Iceland/319/2020__EPI_ISL_417648 spike protein (1-1147)(K986P_V987P_T887W_A1020W)
MFVFLVLLPLVSSQCVNLTTRTQLPPAYTNSFTRGVYYPDKVFRSSVLHSTQDLFLPFFSNVTWFHAIHVSGTNGTKRFDNPVLPFNDGVYFASTEKSNIIRGWIFGTTLDSKTQSLLIVNNATNVVIKVCEFQFCNDPFLGVYYHKNNKSWMESEFRVYSSANNCTFEYVSQPFLIDLEGKQGNFKNLREFVFKNIDGYFKIYSKHTPINLVRDLPQGFSALEPLVDLPIGINITRFQTLLALHRSYLTPGDSSSGWTAGAAAYYVGYLQPRTFLLKYNENGTITDAVDCALDPLSETKCTLKSFTVEKGIYQTSNFRVQPTESIVRFPNITNLCPFGEVFNATRFASVYAWNRKRISNCVADYSVLYNSASFSTFKCYGVSPTKLNDLCFTNVYADSFVIRGDEVRQIAPGQTGKIADYNYKLPDDFTGCVIAWNSNNLDSKVGGNYNYLYRLFRKSNLKPFERDISTEIYQAGSTPCNGVEGFNCYFPLQSYGFQPTNGVGYQPYRVVVLSFELLHAPATVCGPKKSTNLVKNKCVNFNFNGLTGTGVLTESNKKFLPFQQFGRDIADTTDAVRDPQTLEILDITPCSFGGVSVITPGTNTSNQVAVLYQGVNCTEVPVAIHADQLTPTWRVYSTGSNVFQTRAGCLIGAEHVNNSYECDIPIGAGICASYQTQTNSPRRARSVASQSIIAYTMSLGAENSVAYSNNSIAIPTNFTISVTTEILPVSMTKTSVDCTMYICGDSTECSNLLLQYGSFCTQLNRALTGIAVEQDKNTQEVFAQVKQIYKTPPIKDFGGFNFSQILPDPSKPSKRSFIEDLLFNKVTLADAGFIKQYGDCLGDIAARDLICAQKFNGLTVLPPLLTDEMIAQYTSALLAGTITSGWWFGAGAALQIPFAMQMAYRFNGIGVTQNVLYENQKLIANQFNSAIGKIQDSLSSTASALGKLQDVVNQNAQALNTLVKQLSSNFGAISSVLNDILSRLDPPEAEVQIDRLITGRLQSLQTYVTQQLIRAAEIRWSANLAATKMSECVLGQSKRVDFCGKGYHLMSFPQSAPHGVVFLHVTYVPAQEKNFTTAPAICHDGKAHFPREGVFVSNGTHWFVTQRNFYEPQIITTDNTFVSGNCDVVIGIVNNTVYDPLQPELDS

SEQ ID NO: 2810 - protein, 1147 aa, Artificial Sequence
  SARS-CoV-2/Congo/94/2020__EPI_ISL_417947 spike protein (1-1147)(K986P_V987P_T887W_A1020W)
MFVFLVLLPLVSSQCVNLTTRTQLPPAYTNSFTRGVYYPDKVFRSSVLHSTQDLFLPFFSNVTWFHAIHVSGTNGTKRFDNPVLPFNDGVYFASTEKSNIIRGWIFGTTLDSKTQSLLIVNNATNVVIKVCEFQFCNDPFLGVYYHKNNKSWMESEFRVYSSANNCTFEYVSQPFLMDLEGKQGNFKNLREFVFKNIDGYFKIYSKHTPINLVRDLPQGFSALEPLVDLPIGINITRFQTLLALHRSYLTPGDSSSGWTAGAAAYYVGYLQPRTFLLKYNENGTITDAVDCALDPLSETKCTLKSFTVEKGIYQTSNFRVQPTESIVRFPNITNLCPFGEVFNATRFASVYAWNRKRISNCVADYSVLYNSASFSTFKCYGVSPTKLNDLCFTNVYADSFVIRGDEVRQIAPGQTGKIADYNYKLPDDFTGCVIAWNSNNLDSKVGGNYNYLYRLFRKSNLKPFERDISTEIYQAGSTPCNGVEGFNCYFPLQSYGFQPTNGVGYQPYRVVVLSFELLHAPATVCGPKKSTNLVKNKCVNFNFNGLTGTGVLTESNKKFLPFQQFGRDIADTTDAVRDPQTLEILDITPCSFGGVSVITPGTNTSNQVAVLYQGVNCTEVPVAIHADQLTPTWRVYSTGSNVFQTRAGCLIGAEHVNNSYECDIPIGAGICASYQTQTNSPRRARSVASQSIIAYTMSLGAENSVAYSNNSIAIPTNFTISVTTEILPVSMTKTSVDCTMYICGDSTECSNLLLQYGSFCTQLNRALTGIAVEQDKNTQEVFAQVKQIYKTPPIKDFGGFNFSQILPDPSKPSKRSFIEDILFNKVTLADAGFIKQYGDCLGDIAARDLICAQKFNGLTVLPPLLTDEMIAQYTSALLAGTITSGWWFGAGAALQIPFAMQMAYRFNGIGVTQNVLYENQKLIANQFNSAIGKIQDSLSSTASALGKLQDVVNQNAQALNTLVKQLSSNFGAISSVLNDILSRLDPPEAEVQIDRLITGRLQSLQTYVTQQLIRAAEIRWSANLAATKMSECVLGQSKRVDFCGKGYHLMSFPQSAPHGVVFLHVTYVPAQEKNFTTAPAICHDGKAHFPREGVFVSNGTHWFVTQRNFYEPQIITTDNTFVSGNCDVVIGIVNNTVYDPLQPELDS

SEQ ID NO: 2811 - protein, 1147 aa, Artificial Sequence
  SARS-CoV-2/Congo/158/2020__EPI_ISL_417950 spike protein (1-1147)(K986P_V987P_T887W_A1020W)
MFVFLVLLPLVSSQCVNLTTRTQLPPAYTNSFTRGVYYPDKVFRSSVLHSTQDLFLPFFSNVTWFHAIHVSGTNGTKRFDNPVLPFNDGVYFASTEKSNIIRGWIFGTTLDSKTQSLLIVNNATNVVIKVCEFQFCNDPFLGVYYHKNNKSWMESEFRVYSSANNCTFEYVSQPFLMDLEGKQGNFKNLREFVFKNIDGYFKIYSKHTPINLVRDLPQGFSALEPLVDLPIGINITRFQTLLALHRSYLTPGDSSSGWTAGAAAYYVGYLQPRTFLLKYNENGTITDAVDCALDPLSETKCTLKSFTVEKGIYQTSNFRVQPTESIVRFPNITNLCPFGEVFNATRFASVYAWNRKRISNCVADYSVLYNSASFSTFKCYGVSPTKLNDLCFTNVYADSFVIRGDEVRQIAPGQTGKIADYNYKLPDDFTGCVIAWNSNNLDSKVGGNYNYLYRLFRKSNLKPFERDISTEIYQAGSTPCNGVEGFNCYFPLQSYGFQPTNGVGYQPYRVVVLSFELLHAPATVCGPKKSTNLVKNKCVNFNFNGLTGTGVLTESNKKFLPFQQFGRDIADTTDAVRDPQTLEILDITPCSFGGVSVITPGTNTSNQVAVLYQDVNCTEVPVAIHADQLTPTWRVYSTGSNVFQTRAGCLIGAEHVNNSYECDIPIGAGICASYQTQTNSPRRARSVASQSIIAYTMSLGAENSVAYSNNSIAIPTNFTISVTTEILPVSMTKTSVDCTMYICGDSTECSNLLLQYGSFCTQLNRALTGIAVEQDKNTQEVFAQVKQIYKTPPIKDFGGFNFSQILPDPSKPSKRSFIEDLLFNKVTLADAGFIKQYGDCLGDIAARDLICAQKFNGLTVLPPLLTDEMIAQYTSALLAGTITSGWWFGAGAALQIPFAMQMAYRFNGIGVTQNVLYENQKLIANQFNSAIGKIQDSLSSTASALGKLQDVVNQNAQALNTLVKQLSSNFGAISSVLNDILSRLDPPEAEVQIDRLITGRLQSLQTYVTQQLIRAAEIRWSANLAATKMSECVLGQSKRVDFCGKGYHLMSFPQSAPHGVVFLHVTYVPAQEKNFTTAPAICHDGKAHFPREGVFVSNGTHWFVTQRNFYEPQIITTDNTFLSGNCDVVIGIVNNTVYDPLQPELDS

SEQ ID NO: 2812 - protein, 1147 aa, Artificial Sequence
  SARS-CoV-2/USA/UT-00034/2020__EPI_ISL_417977 spike protein (1-1147)(K986P_V987P_T887W_A1020W)
MFVFLVLLPLVSSQCVNLTTRTQLPPAYTNSFTRGVYYPDKVFRSSVLHSTQDLFLPFFSNVTWFHAIHVSGTNGTKRFDNPVLPFNDGVYFASTEKSNIIRGWIFGTTLDSKTQSLLIVNNATNVVIKVCEFQFCNDPFLGVYYYKNNKSWMESEFRVYSSANNCTFEYVSQPFLMDLEGKQGNFKNLREFVFKNIDGYFKIYSKHTPINLVRDLPQGFSALEPLVDLPIGINITRFQTLLALHRSYLTPGDSSSGWTAGAAAYYVGYLQPRTFLLKYNENGTITDAVDCALDPLSETKCTLKSFTVEKGIYQTSNFRVQPTESIVRFPNITNLCPFGEVFNATRFASVYAWNRKRISNCVADYSVLYNSASFSTFKCYGVSPTKLNDLCFTNVYADSFVIRGDEVRQIAPGQTGKIADYNYKLPDDFTGCVIAWNSNNLDSKVGGNYNYLYRLFRKSNLKPFERDISTEIYQAGSTPCNGVEGFNCYFPLQSYGFQPTNGVGYQPYRVVVLSFELLHAPATVCGPKKSTNLVKNKCVNFNFNGLTGTGVLTESNKKFLPFQQFGRDIADTTDAVRDPQTLEILDITPCSFGGVSVITPGTNTSNQVAVLYQGVNCTEVPVAIHADQLTPTWRVYSTGSNVFQTRAGCLIGAEHVNNSYECDIPIGAGICASYQTQTNSPRRARSVASQSIIAYTMSLGAENSVAYSNNSIAIPTNFTISVTTEILPVSMTKTSVDCTMYICGDSTECSNLLLQYGSFCTQLNRALTGIAVEQDKNTQEVFAQVKQIYKTPPIKDFGGFNFSQILPDPSKPSKRSFIEDLLFNKVTLADAGFIKQYGDCLGDIAARDLICAQKFNGLTVLPPLLTDEMIAQYTSALLAGTITSGWWFGAGAALQIPFAMQMAYRFNGIGVTQNVLYENQKLIANQFNSAIGKIQDSLSSTASALGKLQDVVNQNAQALNTLVKQLSSNFGAISSVLNDILSRLDPPEAEVQIDRLITGRLQSLQTYVTQQLIRAAEIRWSANLAATKMSECVLGQSKRVDFCGKGYHLMSFPQSAPHGVVFLHVTYVPAQEKNFTTAPAICHDGKAHFPREGVFVSNGTHWFVTQRNFYEPQIITTDNTFVSGNCDVVIGIVNNTVYDPLQPELDS

SEQ ID NO: 2813 - protein, 1147 aa, Artificial Sequence
  SARS-CoV-2/USA/UT-00033/2020__EPI_ISL_417976 spike protein (1-1147)(K986P_V987P_T887W_A1020W)
MFVFLVLLPLVSSQCVNLTTRTQLPPAYTNSFTRGVYYPDKVFRSSVLHSTQDLFLPFFSNVTWFHAIHVSGTNGTKRFDNPVLPFNDGVYFASTEKSNIIRGWIFGTTLDSKTQSLLIVNNATNVVIKVCEFQFCNDPFLGVYYHKNNKSWMESEFRVYSSANNCTFEYVSQPFLMDLEGKQGNFKNLREFVFKNIDGYFKIYSKHTPINLVRDLPQGFSALEPLVDLPIGINITRFQTLLALHRSYLTPGDSSSGLTAGAAAYYVGYLQPRTFLLKYNENGTITDAVDCALDPLSETKCTLKSFTVEKGIYQTSNFRVQPTESIVRFPNITNLCPFGEVFNATRFASVYAWNRKRISNCVADYSVLYNSASFSTFKCYGVSPTKLNDLCFTNVYADSFVIRGDEVRQIAPGQTGKIADYNYKLPDDFTGCVIAWNSNNLDSKVGGNYNYLYRLFRKSNLKPFERDISTEIYQAGSTPCNGVEGFNCYFPLQSYGFQPTNGVGYQPYRVVVLSFELLHAPATVCGPKKSTNLVKNKCVNFNFNGLTGTGVLTESNKKFLPFQQFGRDIADTTDAVRDPQTLEILDITPCSFGGVSVITPGTNTSNQVAVLYQGVNCTEVPVAIHADQLTPTWRVYSTGSNVFQTRAGCLIGAEHVNNSYECDIPIGAGICASYQTQTNSPRRARSVASQSIIAYTMSLGAENSVAYSNNSIAIPTNFTISVTTEILPVSMTKTSVDCTMYICGDSTECSNLLLQYGSFCTQLNRALTGIAVEQDKNTQEVFAQVKQIYKTPPIKDFGGFNFSQILPDPSKPSKRSFIEDLLFNKVTLADAGFIKQYGDCLGDIAARDLICAQKFNGLTVLPPLLTDEMIAQYTSALLAGTITSGWWFGAGAALQIPFAMQMAYRFNGIGVTQNVLYENQKLIANQFNSAIGKIQDSLSSTASALGKLQDVVNQNAQALNTLVKQLSSNFGAISSVLNDILSRLDPPEAEVQIDRLITGRLQSLQTYVTQQLIRAAEIRWSANLAATKMSECVLGQSKRVDFCGKGYHLMSFPQSAPHGVVFLHVTYVPAQEKNFTTAPAICHDGKAHFPREGVFVSNGTHWFVTQRNFYEPQIITTDNTFVSGNCDVVIGIVNNTVYDPLQPELDS

SEQ ID NO: 2814 - protein, 1147 aa, Artificial Sequence
  SARS-CoV-2/USA/WI-13/2020__EPI_ISL_417516 spike protein (1-1147)(K986P_V987P_T887W_A1020W)
MFVFLVLLPLVSSQCVNLTTRTQLPPAYTNSFTRGVYYPDKVFRSSVLHSTQDLFLPFFSNVTWFHAIHVSGTNGTKRFDNPVLPFNDGVYFASTEKSNIIRGWIFGTTLDSKTQSLLIVNNATNVVIKVCEFQFCNDPFLGVYYHKNNKSWMESEFRVYSSANNCTFEYVSQPFLMDLEGKQGNFKNLREFVFKNIDGYFKIYSKHTPINLVRDLPQGFSALEPLVDLPIGINITRFQTLLALHRSYLTPGDSSSGWTAGAAAYYVGYLQPRTFLLKYNENGTITDAVDCALDPLSETKCTLKSFTVEKGIYQTSNFRVLPTESIVRFPNITNLCPFGEVFNATRFASVYAWNRKRISNCVADYSVLYNSASFSTFKCYGVSPTKLNDLCFTNVYADSFVIRGDEVRQIAPGQTGKIADYNYKLPDDFTGCVIAWNSNNLDSKVGGNYNYLYRLFRKSNLKPFERDISTEIYQAGSTPCNGVEGFNCYFPLQSYGFQPTNGVGYQPYRVVVLSFELLHAPATVCGPKKSTNLVKNKCVNFNFNGLTGTGVLTESNKKFLPFQQFGRDIADTTDAVRDPQTLEILDITPCSFGGVSVITPGTNTSNQVAVLYQGVNCTEVPVAIHADQLTPTWRVYSTGSNVFQTRAGCLIGAEHVNNSYECDIPIGAGICASYQTQTNSPRRARSVASQSIIAYTMSLGAENSVAYSNNSIAIPTNFTISVTTEILPVSMTKTSVDCTMYICGDSTECSNLLLQYGSFCTQLNRALTGIAVEQDKNTQEVFAQVKQIYKTPPIKDFGGFNFSQILPDPSKPSKRSFIEDLLFNKVTLADAGFIKQYGDCLGDIAARDLICAQKFNGLTVLPPLLTDEMIAQYTSALLAGTITSGWWFGAGAALQIPFAMQMAYRFNGIGVTQNVLYENQKLIANQFNSAIGKIQDSLSSTASALGKLQDVVNQNAQALNTLVKQLSSNFGAISSVLNDILSRLDPPEAEVQIDRLITGRLQSLQTYVTQQLIRAAEIRWSANLAATKMSECVLGQSKRVDFCGKGYHLMSFPQSAPHGVVFLHVTYVPAQEKNFTTAPAICHDGKAHFPREGVFVSNGTHWFVTQRNFYEPQIITTDNTFVSGNCDVVIGIVNNTVYDPLQPELDS

SEQ ID NO: 2815 - protein, 1146 aa, Artificial Sequence
  SARS-CoV-2/India/1-27/2020__EPI_ISL_413522 spike protein (1-1146)(K985P_V986P_T886W_A1019W)
MFVFLVLLPLVSSQCVNLTTRTQLPPAYTNSFTRGVYYPDKVFRSSVLHSTQDLFLPFFSNVTWFHAIHVSGTNGTKRFDNPVLPFNDGVYFASTEKSNIIRGWIFGTTLDSKTQSLLIVNNATNVVIKVCEFQFCNDPFLGVYHKNNKSWMESEFRVYSSANNCTFEYVSQPFLMDLEGKQGNFKNLREFVFKNIDGYFKIYSKHTPINLVRDLPQGFSALEPLVDLPIGINITRFQTLLALHRSYLTPGDSSSGWTAGAAAYYVGYLQPRTFLLKYNENGTITDAVDCALDPLSETKCTLKSFTVEKGIYQTSNFRVQPTESIVRFPNITNLCPFGEVFNATRFASVYAWNRKRISNCVADYSVLYNSASFSTFKCYGVSPTKLNDLCFTNVYADSFVIRGDEVIQIAPGQTGKIADYNYKLPDDFTGCVIAWNSNNLDSKVGGNYNYLYRLFRKSNLKPFERDISTEIYQAGSTPCNGVEGFNCYFPLQSYGFQPTNGVGYQPYRVVVLSFELLHAPATVCGPKKSTNLVKNKCVNFNFNGLTGTGVLTESNKKFLPFQQFGRDIADTTDAVRDPQTLEILDITPCSFGGVSVITPGTNTSNQVAVLYQDVNCTEVPVAIHADQLTPTWRVYSTGSNVFQTRAGCLIGAEHVNNSYECDIPIGAGICASYQTQTNSPRRARSVASQSIIAYTMSLGAENSVAYSNNSIAIPTNFTISVTTEILPVSMTKTSVDCTMYICGDSTECSNLLLQYGSFCTQLNRALTGIAVEQDKNTQEVFAQVKQIYKTPPIKDFGGFNFSQILPDPSKPSKRSFIEDLLFNKVTLADAGFIKQYGDCLGDIAARDLICAQKFNGLTVLPPLLTDEMIAQYTSALLAGTITSGWWFGAGAALQIPFAMQMAYRFNGIGVTQNVLYENQKLIANQFNSAIGKIQDSLSSTASALGKLQDVVNQNAQALNTLVKQLSSNFGAISSVLNDILSRLDPPEAEVQIDRLITGRLQSLQTYVTQQLIRAAEIRWSANLAATKMSECVLGQSKRVDFCGKGYHLMSFPQSAPHGVVFLHVTYVPAQEKNFTTAPAICHDGKAHFPREGVFVSNGTHWFVTQRNFYEPQIITTDNTFVSGNCDVVIGIVNNTVYDPLQPELDS

SEQ ID NO: 2816 - protein, 1141 aa, Artificial Sequence
  SARS-CoV-2/pangolin/Guangxi/P4L/2017__EPI_ISL_410538 spike protein (1-1141)(K980P_V981P_T881W_A1014W)
MFVFLFVLPLVSSQCVNLTTRTGIPPGYTNSSTRGVYYPDKVFRSSILHLTQDLFLPFFSNVTWFNTINYQGGFKKFDNPVLPFNDGVYFASTEKSNIIRGWIFGTTLDARTQSLLIVNNATNVVIKVCEFQFCTDPFLGVYYHNNNKTWVENEFRVYSSANNCTFEYISQPFLMDLEGKQGNFKNLREFVFKNVDGYFKIYSKHTPIDLVRDLPRGFAALEPLVDLPIGINITRFQTLLALHRSYLTPGNLESGWTTGAAAYYVGYLQQRTFLLSYNQNGTITDAVDCSLDPLSETKCTLKSLTVEKGIYQTSNFRVQPTISIVRFPNITNLCPFGEVFNASKFASVYAWNRKRISNCVADYSVLYNSTSFSTFKCYGVSPTKLNDLCFTNVYADSFVVKGDEVRQIAPGQTGVIADYNYKLPDDFTGCVIAWNSVKQDALTGGNYGYLYRLFRKSKLKPFERDISTEIYQAGSTPCNGQVGLNCYYPLERYGFHPTTGVNYQPFRVVVLSFELLNGPATVCGPKLSTTLVKDKCVNFNFNGLTGTGVLTTSKKQFLPFQQFGRDISDTTDAVRDPQTLEILDITPCSFGGVSVITPGTNTSNQVAVLYQDVNCTEVPMAIHAEQLTPAWRVYSAGANVFQTRAGCLVGAEHVNNSYECDIPVGAGICASYHSMSSLRSVNQRSIIAYTMSLGAENSVAYSNNSIAIPTNFTISVTTEILPVSMTKTSVDCTMYICGDSIECSNLLLQYGSFCTQLNRALTGIAVEQDKNTQEVFAQVKQIYKTPPIKDFGGFNFSQILPDPSKPSKRSFIEDLLFNKVTLADAGFIKQYGDCLGDIAARDLICAQKFNGLTVLPPLLTDEMIAQYTSALLAGTITSGWWFGAGAALQIPFAMQMAYRFNGIGVTQNVLYENQKLIANQFNSAIGKIQDSLSSTASALGKLQDVVNQNAQALNTLVKQLSSNFGAISSVLNDILSRLDPPEAEVQIDRLITGRLQSLQTYVTQQLIRAAEIRWSANLAATKMSECVLGQSKRVDFCGKGYHLMSFPQSAPHGVVFLHVTYVPAQEKNFTTAPAICHEGKAHFPREGVFVSNGTHWFITQRNFYEPQIITTDNTFVSGSCDVVIGIVNNTVYDPLQPELDS

SEQ ID NO: 2817 - protein, 1141 aa, Artificial Sequence
  SARS-CoV-2/pangolin/Guangxi/P5L/2017__EPI_ISL_410540 spike protein (1-1141)(K980P_V981P_T881W_A1014W)
MFVFLFVLPLVSSQCVNLTTRTGIPPGYTNSSTRGVYYPDKVFRSSILHLTQDLFLPFFSNVTWFNTINYQGGFKKFDNPVLPFNDGVYFASTEKSNIIRGWIFGTTLDARTQSLLIVNNATNVVIKVCEFQFCTDPFLGVYYHNNNKTWVENEFRVYSSANNCTFEYISQPFLMDLEGKQGNFKNLREFVFKNVDGYFKIYSKHTPIDLVRDLPRGFAALEPLVDLPIGINITRFQTLLALHRSYLTPGKLESGWTTGAAAYYVGYLQQRTFLLSYNQNGTITDAVDCSLDPLSETKCTLKSLTVEKGIYQTSNFRVQPTISIVRFPNITNLCPFGEVFNASKFASVYAWNRKRISNCVADYSVLYNSTSFSTFKCYGVSPTKLNDLCFTNVYADSFVVKGDEVRQIAPGQTGVIADYNYKLPDDFTGCVIAWNSVKQDALTGGNYGYLYRLFRKSKLKPFERDISTEIYQAGSTPCNGQVGLNCYYPLERYGFHPTTGVNYQPFRVVVLSFELLNGPATVCGPKLSTTLVKDKCVNFNFNGLTGTGVLTTSKKQFLPFQQFGRDISDTTDAVRDPQTLEILDITPCSFGGVSVITPGTNTSNQVAVLYQDVNCTEVPMAIHAEQLTPAWRVYSAGANVFQTRAGCLVGAEHVNNSYECDIPVGAGICASYHSMSSFRSVNQRSIIAYTMSLGAENSVAYSNNSIAIPTNFTISVTTEILPVSMTKTSVDCTMYICGDSIECSNLLLQYGSFCTQLNRALTGIAVEQDKNTQEVFAQVKQIYKTPPIKDFGGFNFSQILPDPSKPSKRSFIEDLLFNKVTLADAGFIKQYGDCLGDIAARDLICAQKFNGLTVLPPLLTDEMIAQYTSALLAGTITSGWWFGAGAALQIPFAMQMAYRFNGIGVTQNVLYENQKLIANQFNSAIGKIQDSLSSTASALGKLQDVVNQNAQALNTLVKQLSSNFGAISSVLNDILSRLDPPEAEVQIDRLITGRLQSLQTYVTQQLIRAAEIRWSANLAATKMSECVLGQSKRVDFCGKGYHLMSFPQSAPHGVVFLHVTYVPAQEKNFTTAPAICHEGKAHFPREGVFVSNGTHWFITQRNFYEPQIITTDNTFVSGSCDVVIGIVNNTVYDPLQPELDS

SEQ ID NO: 2818 - protein, 1141 aa, Artificial Sequence
  SARS-CoV-2/pangolin/Guangxi/P5E/2017__EPI_ISL_410541 spike protein (1-1141)(K980P_V981P_T881W_A1014W)
MFVFLFVLPLVSSQCVNLTTRTGIPPGYTNSSTRGVYYPDKVFRSSILHLTQDLFLPFFSNVTWFNTITYQGGSKKFDNPVLPFNDGVYFASTEKSNIIRGWIFGTTLDARTQSLLIVNNATNVVIKVCEFQFCTDPFLGVYYHNNNKTWVENEFRVYSSANNCTFEYISQPFLMDLEGKQGNFKNLREFVFKNVDGYFKIYSKHTPIDLVRDLPRGFAALEPLVDLPIGINITRFQTLLALHRSYLTPGKLESGWTTGAAAYYVGYLQQRTFLLSYNQNGTITDAVDCSLDPLSETKCTLKSLTVEKGIYQTSNFRVQPTISIVRFPNITNLCPFGEVFNASKFASVYAWNRKRISNCVADYSVLYNSTSFSTFKCYGVSPTKLNDLCFTNVYADSFVVKGDEVRQIAPGQTGVIADYNYKLPDDFTGCVIAWNSVKQDALTGDNYGYLYRLFRKSKLKPFERDISTEIYQAGSTPCNGQVGLNCYYPLERYGFHPTTGVNYQPFRVVVLSFELLNGPATVCGPKLSTTLVKDKCVNFNFNGLTGTGVLTTSKKQFLPFQQFGRDISDTTDAVRDPQTLEILDITPCSFGGVSVITPGTNTSNQVAVLYQDVNCTEVPMAIHAEQLTPAWRVYSAGANVFQTRAGCLVGAEHVNNSYECDIPVGAGICASYHSMSSFRSVNQRSIIAYTMSLGAENSVAYSNNSIAIPTNFTISVTTEILPVSMTKTSVDCTMYICGDSIECSNLLLQYGSFCTQLNRALTGIAVEQDKNTQEVFAQVKQIYKTPPIKDFGGFNFSQILPDPSKPSKRSFIEDLLFNKVTLADAGFIKQYGDCLGDIAARDLICAQKFNGLTVLPPLLTDEMIAQYTSALLAGTITSGWWFGAGAALQIPFAMQMAYRFNGIGVTQNVLYENQKLIANQFNSAIGKIQDSLSSTASALGKLQDVVNQNAQALNTLVKQLSSNFGAISSVLNDILSRLDPPEAEVQIDRLITGRLQSLQTYVTQQLIRAAEIRWSANLAATKMSECVLGQSKRVDFCGKGYHLMSFPQSAPHGVVFLHVTYVPAQEKNFTTAPAICHEGKAHFPREGVFVSNGTHWFITQRNFYEPQIITTDNTFVSGSCDVVIGIVNNTVYDPLQPELDS

SEQ ID NO: 2819 - protein, 1139 aa, Artificial Sequence
  SARS-CoV-2/pangolin/Guangxi/P1E/2017__EPI_ISL_410539 spike protein (1-1139)(K978P_V979P_T879W_A1012W)
MFVFLFVLPLVSSQCVNLTTRTGIQPGYTNSSTRGVYYPDKVFRSSILHLTQDLFLPFFSNVTWFNTINYQGGFKKFDNPVLPFNDGVYFASTEKSNIIRGWIFGTTLDARTQSLLIVNNATNVVIKVCEFQFCTDPFLGVYYHNNNKTWVENEFRVYSSANNCTFEYISQPFLMDLEGKQGNFKNLREFVFKNVDGYFKIYSKHTPIDLVRDLPRGFAALEPLVDLPIGINITRFQTLLALHRSYLTPGKLESGWTTGAAAYYVGYLQQRTFLLSYNQNGTITDAVDCSLDPLSETKCTLKSLTVEKGIYQTSNFRVQPTISIVRFPNITNLCPFGEVFNASKFASVYAWNRKRISNCVADYSVLYNSTSFSTFKCYGVSPTKLNDLCFTNVYADSFVVKGDEVRQIAPGQTGVIADYNYKLPDDFTGCVIAWNSVKQDALTGGNYLYRLFRKSKLKPFERDISTEIYQAGSTPCNGQVGLNCYYPLERYGFHPTTGVNYQPFRVVVLSFELLNGPATVCGPKLSTTLVKDKCVNFNFNGLTGTGVLTTSKKQFLPFQQFGRDISDTTDAVRDPQTLEILDITPCSFGGVSVITPGTNTSNQVAVLYQDVNCTEVPMAIHAEQLTPAWRVYSAGANVFQTRAGCLVGAEHVNNSYECDIPVGAGICASYHSMSSLRSVNQRSIIAYTMSLGAENSVAYSNNSIAIPTNFTISVTTEILPVSMTKTSVDCTMYICGDSIECSNLLLQYGSFCTQLNRALTGIAVEQDKNTQEVFAQVKQIYKTPPIKDFGGFNFSQILPDPSKPSKRSFIEDLLFNKVTLADAGFIKQYGDCLGDIAARDLICAQKFNGLTVLPPLLTDEMIAQYTSALLAGTITSGWWFGAGAALQIPFAMQMAYRFNGIGVTQNVLYENQKLIANQFNSAIGKIQDSLSSTASALGKLQDVVNQNAQALNTLVKQLSSNFGAISSVLNDILSRLDPPEAEVQIDRLITGRLQSLQTYVTQQLIRAAEIRWSANLAATKMSECVLGQSKRVDFCGKGYHLMSFPQSAPHGVVFLHVTYVPAQEKNFTTAPAICHEGKAHFPREGVFVSNGTHWFITQRNFYEPQIITTDNTFVSGSCDVVIGIVNNTVYDPLQPELDS

SEQ ID NO: 2820 - protein, 1147 aa, Artificial Sequence
  SARS-CoV-2/Wuhan/WIV05/2019__EPI_ISL_402128 spike protein (1-1147)(K986P_V987P_P1069F)
MFVFLVLLPLVSSQCVNLTTRTQLPPAYTNSFTRGVYYPDKVFRSSVLHSTQDLFLPFFSNVTWFHAIHVSGTNGTKRFDNPVLPFNDGVYFASTEKSNIIRGWIFGTTLDSKTQSLLIVNNATNVVIKVCEFQFCNDPFLGVYYHKNNKSWMESEFRVYSSANNCTFEYVSQPFLMDLEGKQGNFKNLREFVFKNIDGYFKIYSKHTPINLVRDLPQGFSALEPLVDLPIGINITRFQTLLALHRSYLTPGDSSSGWTAGAAAYYVGYLQPRTFLLKYNENGTITDAVDCALDPLSETKCTLKSFTVEKGIYQTSNFRVQPTESIVRFPNITNLCPFGEVFNATRFASVYAWNRKRISNCVADYSVLYNSASFSTFKCYGVSPTKLNDLCFTNVYADSFVIRGDEVRQIAPGQTGKIADYNYKLPDDFTGCVIAWNSNNLDSKVGGNYNYLYRLFRKSNLKPFERDISTEIYQAGSTPCNGVEGFNCYFPLQSYGFQPTNGVGYQPYRVVVLSFELLHAPATVCGPKKSTNLVKNKCVNFNFNGLTGTGVLTESNKKFLPFQQFGRDIADTTDAVRDPQTLEILDITPCSFGGVSVITPGTNTSNQVAVLYQDVNCTEVPVAIHADQLTPTWRVYSTGSNVFQTRAGCLIGAEHVNNSYECDIPIGAGICASYQTQTNSPRRARSVASQSIIAYTMSLGAENSVAYSNNSIAIPTNFTISVTTEILPVSMTKTSVDCTMYICGDSTECSNLLLQYGSFCTQLNRALTGIAVEQDKNTQEVFAQVKQIYKTPPIKDFGGFNFSQILPDPSKPSKRSFIEDLLFNKVTLADAGFIKQYGDCLGDIAARDLICAQKFNGLTVLPPLLTDEMIAQYTSALLAGTITSGWTFGAGAALQIPFAMQMAYRFNGIGVTQNVLYENQKLIANQFNSAIGKIQDSLSSTASALGKLQDVVNQNAQALNTLVKQLSSNFGAISSVLNDILSRLDPPEAEVQIDRLITGRLQSLQTYVTQQLIRAAEIRASANLAATKMSECVLGQSKRVDFCGKGYHLMSFPQSAPHGVVFLHVTYVFAQEKNFTTAPAICHDGKAHFPREGVFVSNGTHWFVTQRNFYEPQIITTDNTFVSGNCDVVIGIVNNTVYDPLQPELDS

SEQ ID NO: 2821 - protein, 1143 aa, Artificial Sequence
  SARS-CoV-2/bat/Yunnan/RaTG13/2013__EPI_ISL_402131 spike protein (1-1143)(K982P_V983P_P1065F)
MFVFLVLLPLVSSQCVNLTTRTQLPPAYTNSSTRGVYYPDKVFRSSVLHLTQDLFLPFFSNVTWFHAIHVSGTNGIKRFDNPVLPFNDGVYFASTEKSNIIRGWIFGTTLDSKTQSLLIVNNATNVVIKVCEFQFCNDPFLGVYYHKNNKSWMESEFRVYSSANNCTFEYVSQPFLMDLEGKQGNFKNLREFVFKNIDGYFKIYSKHTPINLVRDLPPGFSALEPLVDLPIGINITRFQTLLALHRSYLTPGDSSSGWTAGAAAYYVGYLQPRTFLLKYNENGTITDAVDCALDPLSETKCTLKSFTVEKGIYQTSNFRVQPTDSIVRFPNITNLCPFGEVFNATTFASVYAWNRKRISNCVADYSVLYNSTSFSTFKCYGVSPTKLNDLCFTNVYADSFVITGDEVRQIAPGQTGKIADYNYKLPDDFTGCVIAWNSKHIDAKEGGNFNYLYRLFRKANLKPFERDISTEIYQAGSKPCNGQTGLNCYYPLYRYGFYPTDGVGHQPYRVVVLSFELLNAPATVCGPKKSTNLVKNKCVNFNFNGLTGTGVLTESNKKFLPFQQFGRDIADTTDAVRDPQTLEILDITPCSFGGVSVITPGTNASNQVAVLYQDVNCTEVPVAIHADQLTPTWRVYSTGSNVFQTRAGCLIGAEHVNNSYECDIPIGAGICASYQTQTNSRSVASQSIIAYTMSLGAENSVAYSNNSIAIPTNFTISVTTEILPVSMTKTSVDCTMYICGDSTECSNLLLQYGSFCTQLNRALTGIAVEQDKNTQEVFAQVKQIYKTPPIKDFGGFNFSQILPDPSKPSKRSFIEDLLFNKVTLADAGFIKQYGDCLGDIAARDLICAQKFNGLTVLPPLLTDEMIAQYTSALLAGTITSGWTFGAGAALQIPFAMQMAYRFNGIGVTQNVLYENQKLIANQFNSAIGKIQDSLSSTASALGKLQDVVNQNAQALNTLVKQLSSNFGAISSVLNDILSRLDPPEAEVQIDRLITGRLQSLQTYVTQQLIRAAEIRASANLAATKMSECVLGQSKRVDFCGKGYHLMSFPQSAPHGVVFLHVTYVFAQEKNFTTAPAICHDGKAHFPREGVFVSNGTHWFVTQRNFYEPQIITTDNTFVSGSCDVVIGIVNNTVYDPLQPELDS

SEQ ID NO: 2822 - protein, 1147 aa, Artificial Sequence
  SARS-CoV-2/Wuhan/HBCDC-HB-01/2019__EPI_ISL_402132 spike protein (1-1147)(K986P_V987P_P1069F)
MFVFLVLLPLVSSQCVNLTTRTQLPPAYTNSITRGVYYPDKVFRSSVLHSTQDLFLPFFSNVTWFHAIHVSGTNGTKRFDNPVLPFNDGVYFASTEKSNIIRGWIFGTTLDSKTQSLLIVNNATNVVIKVCEFQFCNDPFLGVYYHKNNKSWMESEFRVYSSANNCTFEYVSQPFLMDLEGKQGNFKNLREFVFKNIDGYFKIYSKHTPINLVRDLPQGFSALEPLVDLPIGINITRFQTLLALHRSYLTPGDSSSGWTAGAAAYYVGYLQPRTFLLKYNENGTITDAVDCALDPLSETKCTLKSFTVEKGIYQTSNFRVQPTESIVRFPNITNLCPFGEVFNATRFASVYAWNRKRISNCVADYSVLYNSASFSTFKCYGVSPTKLNDLCFTNVYADSFVIRGDEVRQIAPGQTGKIADYNYKLPDDFTGCVIAWNSNNLDSKVGGNYNYLYRLFRKSNLKPFERDISTEIYQAGSTPCNGVEGFNCYFPLQSYGFQPTNGVGYQPYRVVVLSFELLHAPATVCGPKKSTNLVKNKCVNFNFNGLTGTGVLTESNKKFLPFQQFGRDIADTTDAVRDPQTLEILDITPCSFGGVSVITPGTNTSNQVAVLYQDVNCTEVPVAIHADQLTPTWRVYSTGSNVFQTRAGCLIGAEHVNNSYECDIPIGAGICASYQTQTNSPRRARSVASQSIIAYTMSLGAENSVAYSNNSIAIPTNFTISVTTEILPVSMTKTSVDCTMYICGDSTECSNLLLQYGSFCTQLNRALTGIAVEQDKNTQEVFAQVKQIYKTPPIKDFGGFNFSQILPDPSKPSKRSFIEDLLFNKVTLADAGFIKQYGDCLGDIAARDLICAQKFNGLTVLPPLLTDEMIAQYTSALLAGTITSGWTFGAGAALQIPFAMQMAYRFNGIGVTQNVLYENQKLIANQFNSAIGKIQDSLSSTASALGKLQDVVNQNAQALNTLVKQLSSNFGAISSVLNDILSRLDPPEAEVQIDRLITGRLQSLQTYVTQQLIRAAEIRASANLAATKMSECVLGQSKRVDFCGKGYHLMSFPQSAPHGVVFLHVTYVFAQEKNFTTAPAICHDGKAHFPREGVFVSNGTHWFVTQRNFYEPQIITTDNTFVSGNCDVVIGIVNNTVYDPLQPELDS

SEQ ID NO: 2823 - protein, 1147 aa, Artificial Sequence
  SARS-CoV-2/Guangdong/20SF028/2020__EPI_ISL_403936 spike protein (1-1147)(K986P_V987P_P1069F)
MFVFLVLLPLVSSQCVNLTTRTQLPPAYTNSFTRGVYYPDKVFRSSVLYSTQDLFLPFFSNVTWFHAIHVSGTNGTKRFDNPVLPFNDGVYFASTEKSNIIRGWIFGTTLDSKTQSLLIVNNATNVVIKVCEFQFCNDPFLGVYYHKNNKSWMESEFRVYSSANNCTFEYVSQPFLMDLEGKQGNFKNLREFVFKNIDGYFKIYSKHTPINLVRDLPQGFSALEPLVDLPIGINITRFQTLLALHRSYLTPGDSSSGWTAGAAAYYVGYLQPRTFLLKYNENGTITDAVDCALDPLSETKCTLKSFTVEKGIYQTSNFRVQPTESIVRFPNITNLCPFGEVFNATRFASVYAWNRKRISNCVADYSVLYNSASFSTFKCYGVSPTKLNDLCFTNVYADSFVIRGDEVRQIAPGQTGKIADYNYKLPDDFTGCVIAWNSNNLDSKVGGNYNYLYRLFRKSNLKPFERDISTEIYQAGSTPCNGVEGFNCYFPLQSYGFQPTNGVGYQPYRVVVLSFELLHAPATVCGPKKSTNLVKNKCVNFNFNGLTGTGVLTESNKKFLPFQQFGRDIADTTDAVRDPQTLEILDITPCSFGGVSVITPGTNTSNQVAVLYQDVNCTEVPVAIHADQLTPTWRVYSTGSNVFQTRAGCLIGAEHVNNSYECDIPIGAGICASYQTQTNSPRRARSVASQSIIAYTMSLGAENSVAYSNNSIAIPTNFTISVTTEILPVSMTKTSVDCTMYICGDSTECSNLLLQYGSFCTQLNRALTGIAVEQDKNTQEVFAQVKQIYKTPPIKDFGGFNFSQILPDPSKPSKRSFIEDLLFNKVTLADAGFIKQYGDCLGDIAARDLICAQKFNGLTVLPPLLTDEMIAQYTSALLAGTITSGWTFGAGAALQIPFAMQMAYRFNGIGVTQNVLYENQKLIANQFNSAIGKIQDSLSSTASALGKLQDVVNQNAQALNTLVKQLSSNFGAISSVLNDILSRLDPPEAEVQIDRLITGRLQSLQTYVTQQLIRAAEIRASANLAATKMSECVLGQSKRVDFCGKGYHLMSFPQSAPHGVVFLHVTYVFAQEKNFTTAPAICHDGKAHFPREGVFVSNGTHWFVTQRNFYEPQIITTDNTFVSGNCDVVIGIVNNTVYDPLQPELDS

SEQ ID NO: 2824 - protein, 1147 aa, Artificial Sequence
  SARS-CoV-2/Shenzhen/SZTH-001/2020__EPI_ISL_406592 spike protein (1-1147)(K986P_V987P_P1069F)
MFVFLVLLPLVSSQCVNLTTRTQLPPAYTNSFTRGVYYPDKVFRSSVLHSTQDLFLPFFSNVTWFHAIHVSGTNGTKRFDNPVLPFNDGVYFASTEKSNIIRGWIFGTTLDSKTQSLLIVNNATNVVIKVCEFQFCNDPFLGVYYHKNNKSWMESEFRVYSSANNCTFEYVSQPFLMDLEGKQGNFKNLREFVFKNIDGYFKIYSKHTPINLVRDLPQGFSALEPLVDLPIGINITRFQTLLALHRSYLTPGDSSSGWTAGAAAYYVGYLQPRTFLLKYNENGTITDAVDCALDPLSETKCTLKSFTVEKGIYQTSNFRVQPTESIVRFPNITNLCPFGEVFNATRFASVYAWNRKRISNCVADYSVLYNSASFSTFKCYGVSPTKLNDLCFTNVYADSFVIRGDEVRQIAPGQTGKIADYNYKLPDDFTGCVIAWNSNNLDSKVGGNYNYLYRLFRKSNLKPFERDISTEIYQAGSTPCNGVEGFNCYFPLQSYGFQPTNGVGYQPYRVVVLSFELLHAPATVCGPKKSTNLVKNKCVNFNFNGLTGTGVLTESNKKFLPFQQFGRDIADTTDAVRDPQTLEILDITPCSFGGVSVITPGTNTSNQVAVLYQDVNCTEVPVAIHADQLTPTWRVYSTGSNVFQTRAGCLIGAEHVNNSYECDIPIGAGICASYQTQTNSPRRARSVASQSIIAYTMSLGAENSVAYSNNSIAIPTNFTISVTTEILPVSMTKTSVDCTMYICGDSTECSNLLLQYGSFCTQLNRALTGIAVEQDKNTQEVFAQVKQIYKTPPIKDFGGFNFSQILPDPSKPSKRSFIEDLLFNKVTLADAGFIKQYGDCLGDIAARDLICAQKFNGLTVLPPLLTDEMIAQYTSALLAGTITSGWTFGAGAALQIPFAMQMAYRFNGIGVTQNVLYENQKLIANQFNSAIGKIQDSLSSTASALGKLQDVVNQNAQALNTLVKQLSSNFGAISSVLNDILSRLDPPEAEVQIDRLITGRLQSLQTYVTQQLIRAAEIRASANLAATKMSECVLGQSKRVDFCGKGYHLMSFPQSAPHGVVFLHVTYVFAQEKNFTTAPAICHDGKAHFPREGVFVSNGTHWFVTQRNFYEPQIITTDNTFVSGNCDVLIGIVNNTVYDPLQPELDS

SEQ ID NO: 2825 - protein, 1147 aa, Artificial Sequence
  SARS-CoV-2/Shenzhen/SZTH-004/2020__EPI_ISL_406595 spike protein (1-1147)(K986P_V987P_P1069F)
MFVFLVLLPLVSSQCVNLTTRTQLPPAYTNSFTRGVYYPDKVFRSSVLHSTQDLFLPFFSNVTWFHAIHVSGTNGTKRFDNPVLPFNDGVYFASTEKSNIIRGWIFGTTLDSKTQSLLIVNNATNVVIKVCEFQFCNDPFLGVYYHKNNKSWMESEFRVYSSANNCTFEYVSQPFLMDLEGKQGNFKNLREFVFKNIDGYFKIYSKHTPINLVRDLPQGFSALEPLVDLPIGINITRFQTLLALHRSYLTPGDSSSGWTAGAAAYYVGYLQPRTFLLKYNENGTITDAVDCALDPLSETKCTLKSFTVEKGIYQTSNFRVQPTESIVRFPNITNLCPFGEVFNATRFASVYAWDRKRISNCVAYYSVLYNSASFSTFKCYGVSPTKLNDLCFTNVYADSFVIRGDEVRQIAPGQTGKIADYNYKLPDDFTGCVIAWNSNNLDSKVGGNYNYLYRLFRKSNLKPFERDISTEIYQAGSTPCNGVEGFNCYFPLQSYGFQPTNGVGYQPYRVVVLSFELLHAPATVCGPKKSTNLVKNKCVNFNFNGLTGTGVLTESNKKFLPFQQFGRDIADTTDAVRDPQTLEILDITPCSFGGVSVITPGTNTSNQVAVLYQDVNCTEVPVAIHADQLTPTWRVYSTGSNVFQTRAGCLIGAEHVNNSYECDIPIGAGICASYQTQTNSPRRARSVASQSIIAYTMSLGAENSVAYSNNSIAIPTNFTISVTTEILPVSMTKTSVDCTMYICGDSTECSNLLLQYGSFCTQLNRALTGIAVEQDKNTQEVFAQVKQIYKTPPIKDFGGFNFSQILPDPSKPSKRSFIEDLLFNKVTLADAGFIKQYGDCLGDIAARDLICAQKFNGLTVLPPLLTDEMIAQYTSALLAGTITSGWTFGAGAALQIPFAMQMAYRFNGIGVTQNVLYENQKLIANQFNSAIGKIQDSLSSTASALGKLQDVVNQNAQALNTLVKQLSSNFGAISSVLNDILSRLDPPEAEVQIDRLITGRLQSLQTYVTQQLIRAAEIRASANLAATKMSECVLGQSKRVDFCGKGYHLMSFPQSAPHGVVFLHVTYVFAQEKNFTTAPAICHDGKAHFPREGVFVSNGTHWFVTQRNFYEPQIITTDNTFVSGNCDVVIGIVNNTVYDPLQPELDS

SEQ ID NO: 2826 - protein, 1147 aa, Artificial Sequence
  SARS-CoV-2/France/IDF0372/2020__EPI_ISL_406596 spike protein (1-1147)(K986P_V987P_P1069F)
MFVFLVLLPLVSSQCVNLTTRTQLPPAYTNSFTRGVYYPDKVFRSSVLHSTQDLFLPFFSNVTWFHAIHVSGTNGTKRFDNPVLPFNDGVYFASTEKSNIIRGWIFGTTLDSKTQSLLIVNNATNVVIKVCEFQFCNDPFLGVYYHKNNKSWMESEFRVYSSANNCTFEYVSQPFLMDLEGKQGNFKNLREFVFKNIDGYFKIYSKHTPINLVRDLPQGFSALEPLVDLPIGINITRFQTLLALHRSYLTPGDSSSGWTAGAAAYYVGYLQPRTFLLKYNENGTITDAVDCALDPLSETKCTLKSFTVEKGIYQTSNFRVQPTESIVRFPNITNLCPFGEVFNATRFASVYAWNRKRISNCVADYSFLYNSASFSTFKCYGVSPTKLNDLCFTNVYADSFVIRGDEVRQIAPGQTGKIADYNYKLPDDFTGCVIAWNSNNLDSKVGGNYNYLYRLFRKSNLKPFERDISTEIYQAGSTPCNGVEGFNCYFPLQSYGFQPTNGVGYQPYRVVVLSFELLHAPATVCGPKKSTNLVKNKCVNFNFNGLTGTGVLTESNKKFLPFQQFGRDIADTTDAVRDPQTLEILDITPCSFGGVSVITPGTNTSNQVAVLYQDVNCTEVPVAIHADQLTPTWRVYSTGSNVFQTRAGCLIGAEHVNNSYECDIPIGAGICASYQTQTNSPRRARSVASQSIIAYTMSLGAENSVAYSNNSIAIPTNFTISVTTEILPVSMTKTSVDCTMYICGDSTECSNLLLQYGSFCTQLNRALTGIAVEQDKNTQEVFAQVKQIYKTPPIKDFGGFNFSQILPDPSKPSKRSFIEDLLFNKVTLADAGFIKQYGDCLGDIAARDLICAQKFNGLTVLPPLLTDEMIAQYTSALLAGTITSGWTFGAGAALQIPFAMQMAYRFNGIGVTQNVLYENQKLIANQFNSAIGKIQDSLSSTASALGKLQDVVNQNAQALNTLVKQLSSNFGAISSVLNDILSRLDPPEAEVQIDRLITGRLQSLQTYVTQQLIRAAEIRASANLAATKMSECVLGQSKRVDFCGKGYHLMSFPQSAPHGVVFLHVTYVFAQEKNFTTAPAICHDGKAHFPREGVFVSNGTHWFVTQRNFYEPQIITTDNTFVSGNCDVVIGIVNNTVYDPLQPELDS

SEQ ID NO: 2827 - protein, 1147 aa, Artificial Sequence
  SARS-CoV-2/Australia/VIC01/2020__EPI_ISL_406844 spike protein (1-1147)(K986P_V987P_P1069F)
MFVFLVLLPLVSSQCVNLTTRTQLPPAYTNSFTRGVYYPDKVFRSSVLHSTQDLFLPFFSNVTWFHAIHVSGTNGTKRFDNPVLPFNDGVYFASTEKSNIIRGWIFGTTLDSKTQSLLIVNNATNVVIKVCEFQFCNDPFLGVYYHKNNKSWMESEFRVYSSANNCTFEYVSQPFLMDLEGKQGNFKNLREFVFKNIDGYFKIYSKHTPINLVRDLPQGFSALEPLVDLPIGINITRFQTLLALHRRYLTPGDSSSGWTAGAAAYYVGYLQPRTFLLKYNENGTITDAVDCALDPLSETKCTLKSFTVEKGIYQTSNFRVQPTESIVRFPNITNLCPFGEVFNATRFASVYAWNRKRISNCVADYSVLYNSASFSTFKCYGVSPTKLNDLCFTNVYADSFVIRGDEVRQIAPGQTGKIADYNYKLPDDFTGCVIAWNSNNLDSKVGGNYNYLYRLFRKSNLKPFERDISTEIYQAGSTPCNGVEGFNCYFPLQSYGFQPTNGVGYQPYRVVVLSFELLHAPATVCGPKKSTNLVKNKCVNFNFNGLTGTGVLTESNKKFLPFQQFGRDIADTTDAVRDPQTLEILDITPCSFGGVSVITPGTNTSNQVAVLYQDVNCTEVPVAIHADQLTPTWRVYSTGSNVFQTRAGCLIGAEHVNNSYECDIPIGAGICASYQTQTNSPRRARSVASQSIIAYTMSLGAENSVAYSNNSIAIPTNFTISVTTEILPVSMTKTSVDCTMYICGDSTECSNLLLQYGSFCTQLNRALTGIAVEQDKNTQEVFAQVKQIYKTPPIKDFGGFNFSQILPDPSKPSKRSFIEDLLFNKVTLADAGFIKQYGDCLGDIAARDLICAQKFNGLTVLPPLLTDEMIAQYTSALLAGTITSGWTFGAGAALQIPFAMQMAYRFNGIGVTQNVLYENQKLIANQFNSAIGKIQDSLSSTASALGKLQDVVNQNAQALNTLVKQLSSNFGAISSVLNDILSRLDPPEAEVQIDRLITGRLQSLQTYVTQQLIRAAEIRASANLAATKMSECVLGQSKRVDFCGKGYHLMSFPQSAPHGVVFLHVTYVFAQEKNFTTAPAICHDGKAHFPREGVFVSNGTHWFVTQRNFYEPQIITTDNTFVSGNCDVVIGIVNNTVYDPLQPELDS

SEQ ID NO: 2828 - protein, 1147 aa, Artificial Sequence
  SARS-CoV-2/Germany/BavPat1/2020__EPI_ISL_406862 spike protein (1-1147)(K986P_V987P_P1069F)
MFVFLVLLPLVSSQCVNLTTRTQLPPAYTNSFTRGVYYPDKVFRSSVLHSTQDLFLPFFSNVTWFHAIHVSGTNGTKRFDNPVLPFNDGVYFASTEKSNIIRGWIFGTTLDSKTQSLLIVNNATNVVIKVCEFQFCNDPFLGVYYHKNNKSWMESEFRVYSSANNCTFEYVSQPFLMDLEGKQGNFKNLREFVFKNIDGYFKIYSKHTPINLVRDLPQGFSALEPLVDLPIGINITRFQTLLALHRSYLTPGDSSSGWTAGAAAYYVGYLQPRTFLLKYNENGTITDAVDCALDPLSETKCTLKSFTVEKGIYQTSNFRVQPTESIVRFPNITNLCPFGEVFNATRFASVYAWNRKRISNCVADYSVLYNSASFSTFKCYGVSPTKLNDLCFTNVYADSFVIRGDEVRQIAPGQTGKIADYNYKLPDDFTGCVIAWNSNNLDSKVGGNYNYLYRLFRKSNLKPFERDISTEIYQAGSTPCNGVEGFNCYFPLQSYGFQPTNGVGYQPYRVVVLSFELLHAPATVCGPKKSTNLVKNKCVNFNFNGLTGTGVLTESNKKFLPFQQFGRDIADTTDAVRDPQTLEILDITPCSFGGVSVITPGTNTSNQVAVLYQGVNCTEVPVAIHADQLTPTWRVYSTGSNVFQTRAGCLIGAEHVNNSYECDIPIGAGICASYQTQTNSPRRARSVASQSIIAYTMSLGAENSVAYSNNSIAIPTNFTISVTTEILPVSMTKTSVDCTMYICGDSTECSNLLLQYGSFCTQLNRALTGIAVEQDKNTQEVFAQVKQIYKTPPIKDFGGFNFSQILPDPSKPSKRSFIEDLLFNKVTLADAGFIKQYGDCLGDIAARDLICAQKFNGLTVLPPLLTDEMIAQYTSALLAGTITSGWTFGAGAALQIPFAMQMAYRFNGIGVTQNVLYENQKLIANQFNSAIGKIQDSLSSTASALGKLQDVVNQNAQALNTLVKQLSSNFGAISSVLNDILSRLDPPEAEVQIDRLITGRLQSLQTYVTQQLIRAAEIRASANLAATKMSECVLGQSKRVDFCGKGYHLMSFPQSAPHGVVFLHVTYVFAQEKNFTTAPAICHDGKAHFPREGVFVSNGTHWFVTQRNFYEPQIITTDNTFVSGNCDVVIGIVNNTVYDPLQPELDS

SEQ ID NO: 2829 - protein, 1147 aa, Artificial Sequence
  SARS-CoV-2/Wuhan/HBCDC-HB-02/2020__EPI_ISL_412978 spike protein (1-1147)(K986P_V987P_P1069F)
MFVFLVLLPLVSSQCVNLTTRTQLPPAYTNSFTRGVYYPDKVFRSSVLHSTQDLFLPFFSNVTWFHAIHVSGTNGTKRFDNPVLPFNDGVYFASTEKSNIIRGWIFGTTLDSKTQSLLIVNNATNVVIKVCEFQFCNDPFLGVYYHKNNKSWMESEFRVYSSANNCTFEYVSQPFLMDLEGKQGNFKNLREFVFKNIDGYFKIYSKHTPINLVRDLPQGFSALEPLVDLPIGINITRFQTLLALHRSYLTPGDSSSGWTAGAAAYYVGYLQPRTFLLKYNENGTITDAVDCALDPLSETKCTLKSFTVEKGIYQTSNFRVQPTESIVRFPNITNLCPFGEVFNATRFASVYAWNRKRISNCVADYSVLYNSASFSTFKCYGVSPTKLNDLCFTNVYADSFVIRGDEVRQIAPGQTGKIADYNYKLPDDFTGCVIAWNSNNLDSKVGGNYNYLYRLFRKSNLKPFERDISTEIYQAGSTPCNGVEGFNCYFPLQSYGFQPTNGVGYQPYRVVVLSFELLHAPATVCGPKKSTNLVKNKCVNFNFNGLTGTGVLTESNKKFLPFQQFGRDIADTTDAVRDPQTLEILDITPCSFGGVSVITPGTNTSNQVAVLYQDVNCTEVPVAIHADQLTPTWRVYSTGSNVFQTRAGCLIGAEHVNNSYECDIPIGAGICASYQTQTNSPRRARSVASQSIIAYTMSLGAENSVAYSNNSIAIPTNFTISVTTEILPVSMTKTSVDCTMYICGDSTECSNFLLQYGSFCTQLNRALTGIAVEQDKNTQEVFAQVKQIYKTPPIKDFGGFNFSQILPDPSKPSKRSFIEDLLFNKVTLADAGFIKQYGDCLGDIAARDLICAQKFNGLTVLPPLLTDEMIAQYTSALLAGTITSGWTFGAGAALQIPFAMQMAYRFNGIGVTQNVLYENQKLIANQFNSAIGKIQDSLSSTASALGKLQDVVNQNAQALNTLVKQLSSNFGAISSVLNDILSRLDPPEAEVQIDRLITGRLQSLQTYVTQQLIRAAEIRASANLAATKMSECVLGQSKRVDFCGKGYHLMSFPQSAPHGVVFLHVTYVFAQEKNFTTAPAICHDGKAHFPREGVFVSNGTHWFVTQRNFYEPQIITTDNTFVSGNCDVVIGIVNNTVYDPLQPELDS

SEQ ID NO: 2830 - protein, 1147 aa, Artificial Sequence
  SARS-CoV-2/Australia/QLD02/2020__EPI_ISL_407896 spike protein (1-1147)(K986P_V987P_P1069F)
MFVFLVLLPLVSSQCVNLTTRTQLPPAYTNSFTRGVYYPDKVFRSSVLHSTQDLFLPFFSNVTWFHAIHVSGTNGTKRFDNPVLPFNDGVYFASTEKSNIIRGWIFGTTLDSKTQSLLIVNNATNVVIKVCEFQFCNDPFLGVYYHKNNKSWMESEFRVYSSANNCTFEYVSQPFLMDLEGKQGNFKNLREFVFKNIDGYFKIYSKHTPINLVRDLPQGFSALEPLVDLPIGINITRFQTLLALHRSYLTPGDSSSGWTAGAAAYYVGYLQPRTFLLKYNENGTITDAVDCALDPLSETKCTLKSFTVEKGIYQTSNFRVQPTESIVRFPNITNLCPFGEVFNATRFASVYAWNRKRISNCVADYSVLYNSASFSTFKCYGVSPTKLNDLCFTNVYADSFVIRGDEVRQIAPGQTGKIADYNYKLPDDFTGCVIAWNSNNLDSKVGGNYNYLYRLFRKSNLKPFERDISTEIYQAGSTPCNGVEGFNCYFPLQSYGFQPTNGVGYQPYRVVVLSFELLHAPATVCGPKKSTNLVKNKCVNFNFNGLTGTGVLTESNKKFLPFQQFGRDIADTTDAVRDPQTLEILDITPCSFGGVSVITPGTNTSNQVAVLYQDVNCTEVPVAIHADQLTPTWRVYSTGSNVFQTRAGCLIGAEHVNNSYECDIPIGAGICASYQTQTNSPRRARSVASQSIIAYTMSLGAENSVAYSNNSIAIPTNFTISVTTEILPVSMTKTSVDCTMYICGDSTECSNLLLQYGSFCTQLNRALTGIAVEQDKNTQEVFAQVKQIYKTPPIKDFGGFNFSQILPDPSKPSKRSFIEDLLFNKVTLADAGFIKQYGDCLGDIAARDLICAQKFNGLTVLPPLLTDEMIAQYTSALLAGTITSGWTFGAGAALQIPFAMQMAYRFNGIGVTQNVLYENQKLIANQFNSAIGKIQDSLSSTASALGKLQDVVNQNAQALNTLVKQLSSNFGAISSVLNDILSRLDPPEAEVQIDRLITGRLQSLQTYVTQQLIRAAEIRASANLAATKMSECVLGQSKRVDFCGKGYHLMSFPQSAPHGVVFLHVTYVFAQEKNFTTAPAICHDGKAHFPREGVFVSNGTHWFVTQRNFYEPQIITTDNTFVSGNCDVVIGIVNNTVYDPLQLELDS

SEQ ID NO: 2831 - protein, 1147 aa, Artificial Sequence
  SARS-CoV-2/India/1-31/2020__EPI_ISL_413523 spike protein (1-1147)(K986P_V987P_P1069F)
MFVFLVLLPLVSSQCVNLTTRTQLPPAYTNSFTRGVYYPDKVFRSSVLHSTQDLFLPFFSNVTWFHAIHVSGTNGTKRFDNPVLPFNDGVYFASTEKSNIIRGWIFGTTLDSKTQSLLIVNNATNVVIKVCEFQFCNDPFLGVYYHKNNKSWMESEFRVYSSANNCTFEYVSQPFLMDLEGKQGNFKNLREFVFKNIDGYFKIYSKHTPINLVRDLPQGFSALEPLVDLPIGINITRFQTLLALHRSYLTPGDSSSGWTAGAAAYYVGYLQPRTFLLKYNENGTITDAVDCALDPLSETKCTLKSFTVEKGIYQTSNFRVQPTESIVRFPNITNLCPFGEVFNATRFASVYAWNRKRISNCVADYSVLYNSASFSTFKCYGVSPTKLNDLCFTNVYADSFVIRGDEVRQIAPGQTGKIADYNYKLPDDFTGCVIAWNSNNLDSKVGGNYNYLYRLFRKSNLKPFERDISTEIYQAGSTPCNGVEGFNCYFPLQSYGFQPTNGVGYQPYRVVVLSFELLHAPATVCGPKKSTNLVKNKCVNFNFNGLTGTGVLTESNKKFLPFQQFGRDIADTTDAVRDPQTLEILDITPCSFGGVSVITPGTNTSNQVAVLYQDVNCTEVPVAIHADQLTPTWRVYSTGSNVFQTRAGCLIGAEHVNNSYECDIPIGAGICASYQTQTNSPRRARSVASQSIIAYTMSLGAENSVAYSNNSIAIPTNFTISVTTEILPVSMTKTSVDCTMYICGDSTECSNLLLQYGSFCTQLNRALTGIAVEQDKNTQEVFAQVKQIYKTPPIKDFGGFNFSQILPDPSKPSKRSFIEDLLFNKVTLADAGFIKQYGDCLGDIAARDLICAQKFNGLTVLPPLLTDEMIAQYTSALLAGTITSGWTFGAGAALQIPFAMQMAYRFNGIGVTQNVLYENQKLIANQFNSVIGKIQDSLSSTASALGKLQDVVNQNAQALNTLVKQLSSNFGAISSVLNDILSRLDPPEAEVQIDRLITGRLQSLQTYVTQQLIRAAEIRASANLAATKMSECVLGQSKRVDFCGKGYHLMSFPQSAPHGVVFLHVTYVFAQEKNFTTAPAICHDGKAHFPREGVFVSNGTHWFVTQRNFYEPQIITTDNTFVSGNCDVVIGIVNNTVYDPLQPELDS

SEQ ID NO: 2832 - protein, 1147 aa, Artificial Sequence
  SARS-CoV-2/Guangdong/GD2020087-P0008/2020__EPI_ISL_413863 spike protein (1-1147)(K986P_V987P_P1069F)
MFVFLVLLPLVSSQCVNLTTRTQLPPAYTNSFTRGVYYPDKVFRSSVLHSTQDLFLPFFSNVTWFHAIHVSGTNGTKRFDNPVLPFNDGVYFASTEKSNIIRGWIFGTTLDSKTQSLLIVNNATNVVIKVCEFQFCNDPFLGVYYHKNNKSWMESEFRVYSSANNCTFEYVSQPFLMDLEGKQGNFKNLREFVFKNIDGYFKIYSKHTPINLVRDLPQGFSALEPLVDLPIGINITRFQTLLALHRSYLTPGDSSSGWTAGAAAYYVGYLQPRTFLLKYNENGTITDAVDCALDPLSETKCTLKSFTVEKGIYQTSNFRVQPTESIVRFPNITNLCPFGEVFNATRFASVYAWNRKRISNCVADYSVLYNSASFSTFKCYGVSPTKLNDLCFTNVYADSFVIRGDEVREIAPGQTGKIADYNYKLPDDFTGCVIAWNSNNLDSKVGGNYNYLYRLFRKSNLKPFERDISTEIYQAGSTPCNGVEGFNCYFPLQSYGFQPTNGVGYQPYRVVVLSFELLHAPATVCGPKKSTNLVKNKCVNFNFNGLTGTGVLTESNKKFLPFQQFGRDIADTTDAVRDPQTLEILDITPCSFGGVSVITPGTNTSNQVAVLYQDVNCTEVPVAIHADQLTPTWRVYSTGSNVFQTRAGCLIGAEHVNNSYECDIPIGAGICASYQTQTNSPRRARSVASQSIIAYTMSLGAENSVAYSNNSIAIPTNFTISVTTEILPVSMTKTSVDCTMYICGDSTECSNLLLQYGSFCTQLNRALTGIAVEQDKNTQEVFAQVKQIYKTPPIKDFGGFNFSQILPDPSKPSKRSFIEDLLFNKVTLADAGFIKQYGDCLGDIAARDLICAQKFNGLTVLPPLLTDEMIAQYTSALLAGTITSGWTFGAGAALQIPFAMQMAYRFNGIGVTQNVLYENQKLIANQFNSAIGKIQDSLSSTASALGKLQDVVNQNAQALNTLVKQLSSNFGAISSVLNDILSRLDPPEAEVQIDRLITGRLQSLQTYVTQQLIRAAEIRASANLAATKMSECVLGQSKRVDFCGKGYHLMSFPQSAPHGVVFLHVTYVFAQEKNFTTAPAICHDGKAHFPREGVFVSNGTHWFVTQRNFYEPQIITTDNTFVSGNCDVVIGIVNNTVYDPLQPELDS

SEQ ID NO: 2833 - protein, 1147 aa, Artificial Sequence
  SARS-CoV-2/Sweden/01/2020__EPI_ISL_411951 spike protein (1-1147)(K986P_V987P_P1069F)
MFVFLVLLPLVSSQCVNLTTRTQLPPAYTNSFTRGVYYPDKVFRSSVLHSTQDLFLPFFSNVTWFHAIHVSGTNGTKRFDNPVLPFNDGVYFASTEKSNIIRGWIFGTTLDSKTQSLLIVNNATNVVIKVCEFQFCNDPFLGVYYHKNNKSWMESEFRVYSSANNCTFEYVSQPFLMDLEGKQGNFKNLREFVFKNIDGYFKIYSKHTPINLVRDLPQGFSALEPLVDLPIGINITRFQTLLALHRSYLTPGDSSSGWTAGAAAYYVGYLQPRTFLLKYNENGTITDAVDCALDPLSETKCTLKSFTVEKGIYQTSNFRVQPTESIVRFPNITNLCPFGEVFNATRFASVYAWNRKRISNCVADYSVLYNSASFSTFKCYGVSPTKLNDLCFTNVYADSFVIRGDEVRQIAPGQTGKIADYNYKLPDDFTGCVIAWNSNNLDSKVGGNYNYLYRLFRKSNLKPFERDISTEIYQAGSTPCNGVEGFNCYFPLQSYGFQPTNGVGYQPYRVVVLSFELLHAPATVCGPKKSTNLVKNKCVNFNFNGLTGTGVLTESNKKFLPFQQFGRDIADTTDAVRDPQTLEILDITPCSFGGVSVITPGTNTSNQVAVLYQDVNCTEVPVAIHADQLTPTWRVYSTGSNVFQTRAGCLIGAEHVNNSYECDIPIGAGICASYQTQTNSPRRARSVASQSIIAYTMSLGAENSVAYSNNSIAIPTNFTISVTTEILPVSMTKTSVDCTMYICGDSTECSNLLLQYGSFCTQLNRALTGIAVEQDKNTQEVFAQVKQIYKTPPIKDCGGFNFSQILPDPSKPSKRSFIEDLLFNKVTLADAGFIKQYGDCLGDIAARDLICAQKFNGLTVLPPLLTDEMIAQYTSALLAGTITSGWTFGAGAALQIPFAMQMAYRFNGIGVTQNVLYENQKLIANQFNSAIGKIQDSLSSTASALGKLQDVVNQNAQALNTLVKQLSSNFGAISSVLNDILSRLDPPEAEVQIDRLITGRLQSLQTYVTQQLIRAAEIRASANLAATKMSECVLGQSKRVDFCGKGYHLMSFPQSAPHGVVFLHVTYVFAQEKNFTTAPAICHDGKAHFPREGVFVSNGTHWFVTQRNFYEPQIITTDNTFVSGNCDVVIGIVNNTVYDPLQPELDS

SEQ ID NO: 2834 - protein, 1147 aa, Artificial Sequence
  SARS-CoV-2/Tianmen/HBCDC-HB-07/2020__EPI_ISL_412983 spike protein (1-1147)(K986P_V987P_P1069F)
MFVFLVLLPLVSSQCVNLTTRTQLPPAYTNSFTRGVYYPDKVFRSSVLHSTQDLFLPFFSNVTWFHAIHVSGTNGTKRFDNPVLPFNDGVYFASTEKSNIIRGWIFGTTLDSKTQSLLIVNNATNVVIKVCEFQFCNDPFLGVYYHKNNKSWMESEFRVYSSANNCTFEYVSQPFLMDLEGKQGNFKNLREFVFKNIDGYFKIYSKHTPINLVRDLPQGFSALEPLVDLPIGINITRFQTLLALHRSYLTPGDSSSGWTAGAAAYYVGYLQPRTFLLKYNENGTITDAVDCALDPLSETKCTLKSFTVEKGIYQTSNFRVQPTESIVRFPNITNLCPFGEVFNATRFASVYAWNRKRISNCVADYSVLYNSASFSTFKCYGVSPTKLNDLCFTNVYADSFVIRGDEVRQIAPGQTGKIADYNYKLPDDFTGCVIAWNSNNLDSKVGGNYNYLYRLFRKSNLKPFERDISTEIYQAGSTPCNGVEGFNCYFPLQSYGFQPTNGVGYQPYRVVVLSFELLHAPATVCGPKKSTNLVKNKCVNFNFNGLTGTGVLTESNKKFLPFQQFGRDIADTTDAVRDPQTLEILDITPCSFGGVSVITPGTNTSNQVAVLYQDLNCTEVPVAIHADQLTPTWRVYSTGSNVFQTRAGCLIGAEHVNNSYECDIPIGAGICASYQTQTNSPRRARSVASQSIIAYTMSLGAENSVAYSNNSIAIPTNFTISVTTEILPVSMTKTSVDCTMYICGDSTECSNLLLQYGSFCTQLNRALTGIAVEQDKNTQEVFAQVKQIYKTPPIKDFGGFNFSQILPDPSKPSKRSFIEDLLFNKVTLADAGFIKQYGDCLGDIAARDLICAQKFNGLTVLPPLLTDEMIAQYTSALLAGTITSGWTFGAGAALQIPFAMQMAYRFNGIGVTQNVLYENQKLIANQFNSAIGKIQDSLSSTASALGKLQDVVNQNAQALNTLVKQLSSNFGAISSVLNDILSRLDPPEAEVQIDRLITGRLQSLQTYVTQQLIRAAEIRASANLAATKMSECVLGQSKRVDFCGKGYHLMSFPQSAPHGVVFLHVTYVFAQEKNFTTAPAICHDGKAHFPREGVFVSNGTHWFVTQRNFYEPQIITTDNTFVSGNCDVVIGIVNNTVYDPLQPELDS

SEQ ID NO: 2835 - protein, 1147 aa, Artificial Sequence
  SARS-CoV-2/Hong Kong/case42_VM20002493/2020__EPI_ISL_414527 spike protein (1-1147)(K986P_V987P_P1069F)
MFVFLVLLPLVSSQCVNLTTRTQLPPAYTNSFTRGVYYPDKVFRSSVLHSTQDLFLPFFSNVTWFHAIHVSGTNGTKRFDNPVLPFNDGVYFASTEKSNIIRGWIFGTTLDSKTQSLLIVNNATNVVIKVCEFQFCNDPFLGVYYHKNNKSWMESEFRVYSSANNCTFEYVSQPFLMDLEGKQGNFKNLREFVFKNIDGYFKIYSKHTPINLVRDLPQGFSALEPLVDLPIGINITRFQTLLALHRSYLTPGDSSSGWTAGAAAYYVGYLQPRTFLLKYNENGTITDAVDCALDPLSETKCTLKSFTVEKGIYQTSNFRVQPTESIVRFPNITNLCPFGEVFNATRFASVYAWNRKRISNCVADYSVLYNSASFSTFKCYGVSPTKLNDLCFTNVYADSFVIRGDEVRQIAPGQTGKIADYNYKLPDDFTGCVIAWNSNNLDSKVGGNYNYLYRLFRKSNLKPFERDISTEIYQAGSTPCNGVEGFNCYFPLQSYGFQPTNGVGYQPYRVVVLSFELLHAPATVCGPKKSTNLVKNKCVNFNFNGLTGTGVLTESNKKFLPFQQFGRDIADTTDAVRDPQTLEILDITPCSFGGVSVITPGTNTSNQVAVLYQDVNCTEVPVAIHADQLTPTWRVYSTGSNVFQTRAGCLIGAEHVNNSYECDIPIGAGICASYQTQTNSPRRARSVASQSIIAYTMSLGAENSVAYSNNSIAIPTNFAISVTTEILPVSMTKTSVDCTMYICGDSTECSNLLLQYGSFCTQLNRALTGIAVEQDKNTQEVFAQVKQIYKTPPIKDFGGFNFSQILPDPSKPSKRSFIEDLLFNKVTLADAGFIKQYGDCLGDIAARDLICAQKFNGLTVLPPLLTDEMIAQYTSALLAGTITSGWTFGAGAALQIPFAMQMAYRFNGIGVTQNVLYENQKLIANQFNSAIGKIQDSLSSTASALGKLQDVVNQNAQALNTLVKQLSSNFGAISSVLNDILSRLDPPEAEVQIDRLITGRLQSLQTYVTQQLIRAAEIRASANLAATKMSECVLGQSKRVDFCGKGYHLMSFPQSAPHGVVFLHVTYVFAQEKNFTTAPAICHDGKAHFPREGVFVSNGTHWFVTQRNFYEPQIITTDNTFVSGNCDVVIGIVNNTVYDPLQPELDS

SEQ ID NO: 2836 - protein, 1147 aa, Artificial Sequence
  SARS-CoV-2/USA/CruiseA-23/2020__EPI_ISL_414482 spike protein (1-1147)(K986P_V987P_P1069F)
MFVFLVLLPLVSSQCVNLTTRTQLPPAYTNSFTRGVYYPDKVFRSSVLHSTQDLFLPFFSNVTWFHAIHVSGTNGTKRFDNPVLPFNDGVYFASTEKSNIIRGWIFGTTLDSKTQSLLIVNNATNVVIKVCEFQFCNDPFLGVYYHKNNKSWMESEFRVYSSANNCTFEYVSQPFLMDLEVKQGNFKNLREFVFKNIDGYFKIYSKHTPINLVRDLPQGFSALEPLVDLPIGINITRFQTLLALHRSYLTPGDSSSGWTAGAAAYYVGYLQPRTFLLKYNENGTITDAVDCALDPLSETKCTLKSFTVEKGIYQTSNFRVQPTESIVRFPNITNLCPFGEVFNATRFASVYAWNRKRISNCVADYSVLYNSASFSTFKCYGVSPTKLNDLCFTNVYADSFVIRGDEVRQIAPGQTGKIADYNYKLPDDFTGCVIAWNSNNLDSKVGGNYNYLYRLFRKSNLKPFERDISTEIYQAGSTPCNGVEGFNCYFPLQSYGFQPTNGVGYQPYRVVVLSFELLHAPATVCGPKKSTNLVKNKCVNFNFNGLTGTGVLTESNKKFLPFQQFGRDIADTTDAVRDPQTLEILDITPCSFGGVSVITPGTNTSNQVAVLYQDVNCTEVPVAIHADQLTPTWRVYSTGSNVFQTRAGCLIGAEHVNNSYECDIPIGAGICASYQTQTNSPRRARSVASQSIIAYTMSLGAENSVAYSNNSIAIPTNFTISVTTEILPVSMTKTSVDCTMYICGDSTECSNLLLQYGSFCTQLNRALTGIAVEQDKNTQEVFAQVKQIYKTPPIKDFGGFNFSQILPDPSKPSKRSFIEDLLFNKVTLADAGFIKQYGDCLGDIAARDLICAQKFNGLTVLPPLLTDEMIAQYTSALLAGTITSGWTFGAGAALQIPFAMQMAYRFNGIGVTQNVLYENQKLIANQFNSAIGKIQDSLSSTASALGKLQDVVNQNAQALNTLVKQLSSNFGAISSVLNDILSRLDPPEAEVQIDRLITGRLQSLQTYVTQQLIRAAEIRASANLAATKMSECVLGQSKRVDFCGKGYHLMSFPQSAPHGVVFLHVTYVFAQEKNFTTAPAICHDGKAHFPREGVFVSNGTHWFVTQRNFYEPQIITTDNTFVSGNCDVVIGIVNNTVYDPLQPELDS

SEQ ID NO: 2837 - protein, 1147 aa, Artificial Sequence
  SARS-CoV-2/Hong Kong/case85_VM20002868/2020__EPI_ISL_414519 spike protein (1-1147)(K986P_V987P_P1069F)
MFVFLVLVPLVSSQCVNLTTRTQLPPAYTNSFTRGVYYPDKVFRSSVLHSTQDLFLPFFSNVTWFHAIHVSGTNGTKRFDNPVLPFNDGVYFASTEKSNIIRGWIFGTTLDSKTQSLLIVNNATNVVIKVCEFQFCNDPFLGVYYHKNNKSWMESEFRVYSSANNCTFEYVSQPFLMDLEGKQGNFKNLREFVFKNIDGYFKIYSKHTPINLVRDLPQGFSALEPLVDLPIGINITRFQTLLALHRSYLTPGDSSSGWTAGAAAYYVGYLQPRTFLLKYNENGTITDAVDCALDPLSETKCTLKSFTVEKGIYQTSNFRVQPTESIVRFPNITNLCPFGEVFNATRFASVYAWNRKRISNCVADYSVLYNSASFSTFKCYGVSPTKLNDLCFTNVYADSFVIRGDEVRQIAPGQTGKIADYNYKLPDDFTGCVIAWNSNNLDSKVGGNYNYLYRLFRKSNLKPFERDISTEIYQAGSTPCNGVEGFNCYFPLQSYGFQPTNGVGYQPYRVVVLSFELLHAPATVCGPKKSTNLVKNKCVNFNFNGLTGTGVLTESNKKFLPFQQFGRDIADTTDAVRDPQTLEILDITPCSFGGVSVITPGTNTSNQVAVLYQDVNCTEVPVAIHADQLTPTWRVYSTGSNVFQTRAGCLIGAEHVNNSYECDIPIGAGICASYQTQTNSPRRARSVASQSIIAYTMSLGAENSVAYSNNSIAIPTNFTISVTTEILPVSMTKTSVDCTMYICGDSTECSNLLLQYGSFCTQLNRALTGIAVEQDKNTQEVFAQVKQIYKTPPIKDFGGFNFSQILPDPSKPSKRSFIEDLLFNKVTLADAGFIKQYGDCLGDIAARDLICAQKFNGLTVLPPLLTDEMIAQYTSALLAGTITSGWTFGAGAALQIPFAMQMAYRFNGIGVTQNVLYENQKLIANQFNSAIGKIQDSLSSTASALGKLQDVVNQNAQALNTLVKQLSSNFGAISSVLNDILSRLDPPEAEVQIDRLITGRLQSLQTYVTQQLIRAAEIRASANLAATKMSECVLGQSKRVDFCGKGYHLMSFPQSAPHGVVFLHVTYVFAQEKNFTTAPAICHDGKAHFPREGVFVSNGTHWFVTQRNFYEPQIITTDNTFVSGNCDVVIGIVNNTVYDPLQPELDS

SEQ ID NO: 2838 - protein, 1147 aa, Artificial Sequence; identical to SEQ ID NO: 2828
  SARS-CoV-2/England/200990660/2020__EPI_ISL_414523 spike protein (1-1147)(K986P_V987P_P1069F)

SEQ ID NO: 2839 - protein, 1147 aa, Artificial Sequence
  SARS-CoV-2/Australia/NSW09/2020__EPI_ISL_413595 spike protein (1-1147)(K986P_V987P_P1069F)
MFVFLVLLPLVSSQCVNLTTRTQLPPAYTNSFTRGVYYPDKVFRSSVLHSTQDLFLPFFSNVTWFHAIHVSGTNGTKRFDNPVLPFNDGVYFASTEKSNIIRGWIFGTTLDSKTQSLLIVNNATNVVIKVCEFQFCNDPFLGVYYHKNNKSWMESEFRVYSSANNCTFEYVSQPFLMDLEGKQGNFKNLREFVFKNIDGYFKIYSKHTPINLVRDLPQGFSALEPLVDLPIGINITRFQTLLALHRSYLTPGDSSSGWTAGAAAYYVGYLQPRTFLLKYNENGTITDAVDCALDPLSETKCTLKSFTVEKGIYQTSNFRVQPTESIVRFPNITNLCPFGEVFNATRFASVYAWNRKRISNCVADYSVLYNSASFSTFKCYGVSPTKLNDLCFTNVYADSFVIRGDEVRQIAPGQTGKIADYNYKLPDDFTGCVIAWNSNNLDSKVGGNYNYLYRLFRKSNLKPFERDISTEIYQAGSTPCNGVEGFNCYFPLQSYGFQPTNGVGYQPYRVVVLSFELLHAPATVCGPKKSTNLVKNKCVNFNFNGLTGTGVLTESNKKFLPFQQFGRDIADTTDAVRDPQTLEILDITPCSFGGVSVITPGTNTSNQVAVLYQDVNCTEVPVAIHADQLTPTWRVYSTGSNVFQTRAGCLIGAEHVNNSYECDIPIGAGICASYQTQTNSPRRARSVASQSIIAYTMSLGAENSVAYSNNSIAIPTNFTISVTTEILPVSMTKTSVDCTMYICGDSTECSNLLLQYGSFCTQLNRALTGIAVEQDKNTQEVFAQVKQIYKTPPIKDFGGFNFSQILPDPSKPSKRSFIEDLLFNKVTLADAGFIKQYGDCLGDIAARDLICAQKFNGLTVLPPLLTDEMIAQYTSALLAGTITSGWTFGAGAALQIPFAMQMAYRFNGIGVTQNVLYENQKLIANQFNSAIGKIQDSLSFTASALGKLQDVVNQNAQALNTLVKQLSSNFGAISSVLNDILSRLDPPEAEVQIDRLITGRLQSLQTYVTQQLIRAAEIRASANLAATKMSECVLGQSKRVDFCGKGYHLMSFPQSAPHGVVFLHVTYVFAQEKNFTTAPAICHDGKAHFPREGVFVSNGTHWFVTQRNFYEPQIITTDNTFVSGNCDVVIGIVNNTVYDPLQPELDS

SEQ ID NO: 2840 - protein, 1147 aa, Artificial Sequence; identical to SEQ ID NO: 2820
  SARS-CoV-2/Australia/NSW10/2020__EPI_ISL_413596 spike protein (1-1147)(K986P_V987P_P1069F)

SEQ ID NO: 2841 - protein, 1147 aa, Artificial Sequence
  SARS-CoV-2/Switzerland/1000477797/2020__EPI_ISL_413023 spike protein (1-1147)(K986P_V987P_P1069F)
MFVFLVLLPLVSSQCVNLTTRTQLPPAYTNSFTRGVYYPDKVFRSSVLHSTQDLFLPFFSNVTWFHAIHVSGTNGTKRFDNPVLPFNDGVYFASTEKSNIIRGWIFGTTLDSKTQSLLIVNNATNVVIKVCEFQFCNDPFLGVYYHKNNKSWMESEFRVYSSANNCTFEYVSQPFLMDLEGKQGNFKNLREFVFKNIDGYFNIYSKHTPINLVRDLPQGFSALEPLVDLPIGINITRFQTLLALHRSYLTPGDSSSGWTAGAAAYYVGYLQPRTFLLKYNENGTITDAVDCALDPLSETKCTLKSFTVEKGIYQTSNFRVQPTESIVRFPNITNLCPFGEVFNATRFASVYAWNRKRISNCVADYSVLYNSASFSTFKCYGVSPTKLNDLCFTNVYADSFVIRGDEVRQIAPGQTGKIADYNYKLPDDFTGCVIAWNSNNLDSKVGGNYNYLYRLFRKSNLKPFERDISTEIYQAGSTPCNGVEGFNCYFPLQSYGFQPTNGVGYQPYRVVVLSFELLHAPATVCGPKKSTNLVKNKCVNFNFNGLTGTGVLTESNKKFLPFQQFGRDIADTTDAVRDPQTLEILDITPCSFGGVSVITPGTNTSNQVAVLYQGVNCTEVPVAIHADQLTPTWRVYSTGSNVFQTRAGCLIGAEHVNNSYECDIPIGAGICASYQTQTNSPRRARSVASQSIIAYTMSLGAENSVAYSNNSIAIPTNFTISVTTEILPVSMTKTSVDCTMYICGDSTECSNLLLQYGSFCTQLNRALTGIAVEQDKNTQEVFAQVKQIYKTPPIKDFGGFNFSQILPDPSKPSKRSFIEDLLFNKVTLADAGFIKQYGDCLGDIAARDLICAQKFNGLTVLPPLLTDEMIAQYTSALLAGTITSGWTFGAGAALQIPFAMQMAYRFNGIGVTQNVLYENQKLIANQFNSAIGKIQDSLSSTASALGKLQDVVNQNAQALNTLVKQLSSNFGAISSVLNDILSRLDPPEAEVQIDRLITGRLQSLQTYVTQQLIRAAEIRASANLAATKMSECVLGQSKRVDFCGKGYHLMSFPQSAPHGVVFLHVTYVFAQEKNFTTAPAICHDGKAHFPREGVFVSNGTHWFVTQRNFYEPQIITTDNTFVSGNCDVVIGIVNNTVYDPLQPELDS

SEQ ID NO: 2842 - protein, 1147 aa, Artificial Sequence
  SARS-CoV-2/Belgium/BA-02291/2020__EPI_ISL_415159 spike protein (1-1147)(K986P_V987P_P1069F)
MFVFLVLLPLVSSQCVNLTTRTQLPPAYTNSFTRGVYYPDKVFRSSVLHSTQDLFLPFFSNVTWFHAIHVSGTNGTKRFDNPVLPFNDGVYFASTEKSNIIRGWIFGTTLDSKTQSLLIVNNATNVVIKVCEFQFCNDPFLGVYYHKNNKSWMESEFRVYSSANNCTFEYVSQPFLMDLEGKQGNFKNLREFVFKNIDGYFKIYSKHTPINLVRDLPQGFSALEPLVDLPIGINITRFQTLLALHRSYLTPGDSSSGWTAGAAAYYVGYLQPRTFLLKYNENGTITDAVDCALDPLSETKCTLKSFTVEKGIYQTSNFRVQPTESIVRFPNITNLCPFGEVFNATRFASVYAWNRKRISNCVADYSVLYNSASFSTFKCYGVSPTKLNDLCFTNVYADSFVIRGDEVRQIAPGQTGKIADYNYKLPDDFTGCVIAWNSNNLDSKVGGNYNYLYRLFRRSNLKPFERDISTEIYQAGSTPCNGVEGFNCYFPLQSYGFQPTNGVGYQPYRVVVLSFELLPAPATVCGPKKSTNLVKNKCVNFNFNGLTGTGVLTESNKKFLPFQQFGRDIADTTDAVRDPQTLEILDITPCSFGGVSVITPGTNTSNQVAVLYQGVNCTEVPVAIHADQLTPTWRVYSTGSNVFQTRAGCLIGAEHVNNSYECDIPIGAGICASYQTQTNSPRRARSVASQSIIAYTMSLGAENSVAYSNNSIAIPTNFTISVTTEILPVSMTKTSVDCTMYICGDSTECSNLLLQYGSFCTQLNRALTGIAVEQDKNTQEVFAQVKQIYKTPPIKDFGGFNFSQILPDPSKPSKRSFIEDLLFNKVTLADAGFIKQYGDCLGDIAARDLICAQKFNGLTVLPPLLTDEMIAQYTSALLAGTITSGWTFGAGAALQIPFAMQMAYRFNGIGVTQNVLYENQKLIANQFNSAIGKIQDSLSSAAPALGKLQDVVNQNAQALNTLVKQLSSNFGAISSVLNDILSRLDPPEAEVQIDRLITGRLQSLQTYVTQQLIRAAEIRASANLAATKMSECVLGQSKRVDFCGKGYHLMSFPQSAPHGVVFLHVTYVFAQEKNFTTAPAICHDGKAHFPREGVFVSNGTHWFVTQRNFYEPQIITTDNTFVSGNCDVVIGIVNNTVYDPLQPELDS

SEQ ID NO: 2843 - protein, 1147 aa, Artificial Sequence
  SARS-CoV-2/USA/WA8-UW5/2020__EPI_ISL_413486 spike protein (1-1147)(K986P_V987P_P1069F)
MFVFLVLLPLVSSQCVNLTTRTQLPPAYTNSFTRGVYYPDKVFRSSVLHSTQDLFLPFFSNVTWFHAIHVSGTNGTKRFDNPVLPFNDGVYFASTEKSNIIRGWIFGTTLDSKTQSLLIVNNATNVVIKVCEFQFCNDPFLGVYYHKNNKSWMESEFRVYSSANNCTFEYVSQPFLMDLEGKQGNFKNLREFVFKNIDGYFKIYSKHTPINLVRDLPQGFSALEPLVDLPIGINITRFQTLLALHRSYLTPGDSSSGWTAGAAAYYVGYLQPRTFLLKYNENGTITDAVDCALDPLSETKCTLKSFTVEKGIYQTSNFRVQPTESIVRFPNITNLCPFGEVFNATRFASVYAWNRKRISNCVADYSVLYNSASFSTFKCYGVSPTKLNDLCFTNVYADSFVIRGDEVRQIAPGQTGKIADYNYKLPDDFTGCVIAWNSNNLDSKVGGNYNYLYRLFRKSNLKPFERDISTEIYQAGSTPCNGVEGFNCYFPLQSYGFQPTNGVGYQPYRVVVLSFELLHAPATVCGPKKSTNLVKNKCVNFNFNGLTGTGVLTESNKKFLPFQQFGRDIADTTDAVRDPQTLEILDITPCSFGGVSVITPGTNTSNQVAVLYQDVNCTEVPVAIHADQLTPTWRVYSTGSNVFQTRAGCLIGAEYVNNSYECDIPIGAGICASYQTQTNSPRRARSVASQSIIAYTMSLGAENSVAYSNNSIAIPTNFTISVTTEILPVSMTKTSVDCTMYICGDSTECSNLLLQYGSFCTQLNRALTGIAVEQDKNTQEVFAQVKQIYKTPPIKDFGGFNFSQILPDPSKPSKRSFIEDLLFNKVTLADAGFIKQYGDCLGDIAARDLICAQKFNGLTVLPPLLTDEMIAQYTSALLAGTITSGWTFGAGAALQIPFAMQMAYRFNGIGVTQNVLYENQKLIANQFNSAIGKIQDSLSSTASALGKLQDVVNQNAQALNTLVKQLSSNFGAISSVLNDILSRLDPPEAEVQIDRLITGRLQSLQTYVTQQLIRAAEIRASANLAATKMSECVLGQSKRVDFCGKGYHLMSFPQSAPHGVVFLHVTYVFAQEKNFTTAPAICHDGKAHFPREGVFVSNGTHWFVTQRNFYEPQIITTDNTFVSGNCDVVIGIVNNTVYDPLQPELDS

SEQ ID NO: 2844 - protein, 1147 aa, Artificial Sequence
  SARS-CoV-2/England/20102000506/2020__EPI_ISL_415147 spike protein (1-1147)(K986P_V987P_P1069F)
MFVFLVLLPLVSSQCVNLTTRTQLPPAYTNSFTRGVYYPDKVFRSSVLHSTQDLFLPFFSNVTWFHAIHVSGTNGTKRFDNPVLPFNDGVYFASTEKSNIIRGWIFGTTLDSKTQSLLIVNNATNVVIKVCEFQFCNDPFLGVYYHKNNKSWMESEFRVYSSANNCTFEYVSQPFLMDLEGKQGNFKNLREFVFKNIDGYFKIYSKHTPINLVRDLPQGFSALEPLVDLPIGINITRFQTLLALHRSYLTPGDSSSGWTAGAAAYYVGYLQPRTFLLKYNENGTITDAVDCALDPLSETKCTLKSFTVEKGIYQTSNFRVQPTESIVRFPNITNLCPFGEVFNATRFASVYAWNRKRISNCVADYSVLYNSASFSTFKCYGVSPTKLNDLCFTNVYADSFVIRGDEVRQIAPGQTGKIADYNYKLPDDFTGCVIAWNSNNLDSKVGGNYNYLYRLFRKSNLKPFERDISTEIYQAGSTPCNGVEGFNCYFPLQSYGFQPTNGVGYQPYRVVVLSFELLHAPATVCGPKKSTNLVKNKCVNFNFNGLTGTGVLTESNKKFLPFQQFGRDIADTTDAVRDPQTLEILDITPCSFGGVSVITPGTNTSNQVAVLYQGVNCTEVPVAIHADQLTPTWRVYSTGSNVFQTRAGCLIGAEHVNNSYECDIPIGAGICASYQTQTNSPRRARSVASQSIIAYTMSLGAENSVAYSNNSIAIPTNFTISVTTEILPVSMTKTSVDCTMYICGDSTECSNLLLQYGSFCTQLNRALTGIAVEQDKNTQEVFAQVKQIYKTPPIKDFGGFNFSQILPDPSKPSKRSFIEDLLFNKVTLADAGFIKQYGYCLGDIAARDLICAQKFNGLTVLPPLLTDEMIAQYTSALLAGTITSGWTFGAGAALQIPFAMQMAYRFNGIGVTQNVLYENQKLIANQFNSAIGKIQDSLSSTASALGKLQDVVNQNAQALNTLVKQLSSNFGAISSVLNDILSRLDPPEAEVQIDRLITGRLQSLQTYVTQQLIRAAEIRASANLAATKMSECVLGQSKRVDFCGKGYHLMSFPQSAPHGVVFLHVTYVFAQEKNFTTAPAICHDGKAHFPREGVFVSNGTHWFVTQRNFYEPQIITTDNTFVSGNCDVVIGIVNNTVYDPLQPELDS

SEQ ID NO: 2845 - protein, 1147 aa, Artificial Sequence
  SARS-CoV-2/Belgium/VAG-03013/2020__EPI_ISL_415155 spike protein (1-1147)(K986P_V987P_P1069F)
MFVFLVLLPLVSSQCVNLTTRTQLPPAYTNSFTRGVYYPDKVFRSSVLHSTQDLFLPFFSNVTWFHAIHVSGTNGTKRFDNPVLPFNDGVYFASTEKSNIIRGWIFGTTLDSKTQSLLIVNNATNVVIKVCEFQFCNDPFLGVYYHKNNKSWMESEFRVYSSANNCTFEYVSQPFLMDLEGKQGNFKNLREFVFKNIDGYFKIYSKHTPINLVRDLPQGFSALEPLVDLPIGINITRFQTLLALHRSYLTPGDSSSGWTAGAAAYYVGYLQPRTFLLKYNENGTITDAVDCALDPLSETKCTLKSFTVEKGIYQTSNFRVQPTESIVRFPNITNLCPFGEVFNATRFASVYAWNRKRISNCVADYSVLYNSASFSTFKCYGVSPTKLNDLCFTNVYADSFVIRGDEVRQIAPGQTGKIADYNYKLPDDFTGCVIAWNSNNLDSKVGGNYNYLYRLFRKSNLKPFERDISTEIYQAGSTPCNGVEGFNCYFPLQSYGFQPTNGVGYQPYRVVVLSFELLHAPATVCGPKKSTNLVKNKCVNFNFNGLTGTGVLTESNKKFLPFQQFGRDIADTTDAVRDPQTLEILDITPCSFGGVSVITPGTNTSNQVAVLYQGVNCTEVPVAIHADQLTPTWRVYSTGSNVFQTRAGCLIGAEHVNNSYECDIPIGAGICASYQTQTNSPRRARSVASQSIIAYTMSLGAENSVAYSNNSIAIPTNFTISVTTEILPVSMTKTSVDCTMYICGDSTECSNLLLQYGSFCTQLNRALTGIAVEQDKNTQEVFAQVKQIYKTPPIKDFGGFNFSQILPDPSKPSKRSFIEDLLFNKVTLADAGFIKQYGDCLGDIAARDLICAQKFNGLTVLPPLLTDEMIAQYTSALLAGTITSGWTFGAGAALQIPFAMQMAYRFNGIGVTQNVLYENQKLIANQFNSAIGKIQDSLSSTATALGKLQDVVNQNAQALNTLVKQLSSNFGAISSVLNDILSRLDPPEAEVQIDRLITGRLQSLQTYVTQQLIRAAEIRASANLAATKMSECVLGQSKRVDFCGKGYHLMSFPQSAPHGVVFLHVTYVFAQEKNFTTAPAICHDGKAHFPREGVFVSNGTHWFVTQRNFYEPQIITTDNTFVSGNCDVVIGIVNNTVYDPLQPELDS

SEQ ID NO: 2846 - protein, 1147 aa, Artificial Sequence
  SARS-CoV-2/Belgium/BC-03016/2020__EPI_ISL_415157 spike protein (1-1147)(K986P_V987P_P1069F)
MFVFLVLLPLVSSQCVNLTTRTQLPPAYTNSFTRGVYYPDKVFRSSVLHSTQDLFLPFFSNVTWFHAIHVSGTNGTKRFDNPVLPFNDGVYFASTEKSNIIRGWIFGTTLDSKTQSLLIVNNATNVVIKVCEFQFCNDPFLGVYYHKNNKSWMESEFRVYSSANNCTFEYVSQPFLMDLEGKQGNFKNLREFVFKNIDGYFKIYSKHTPINLVRDLPQGFSALEPLVDLPIGINITRFQTLLALHRSYLTPGDSSSGWTAGAAAYYVGYLQPRTFLLKYNENGTITDAVDCALDPLSETKCTLKSFTVEKGIYQTSNFRVQPTESIVRFPNITNLCPFGEVFNATRFASVYAWNRKRISNCVADYSVLYNSASFSTFKCYGVSPTKLNDLCFTNVYADSFVIRGDEVRQIAPGQTGKIADYNYKLPDDFTGCVIAWNSNNLDSKVGGNYNYLYRLFRKSNLKPFERDISTEIYQAGSTPCNGVEGFNCYFPLQSYGFQPTNGVGYQPYRVVVLSFELLHAPATVCGPKKSTNLVKNKCVNFNFNGLTGTGVLTESNKKFLPFQQFGRDIADTTDAVRDPQTLEILDITPCSFGGVSVITPGTNTSNQVAVLYQGVNCTEVPVAIHADQLTPTWRVYSTGSNVFQTRAGCLIGAEHVNNSYECDIPIGAGICASYQTQTNSPRRARSVASQSIIAYTMSLGAENSVAYSNNSIAIPTNFTISVTTEILPVSMTKTSVDCTMYICGDSTECSNLLLQYGSFCTQLNRALTGIAVEQDKNTQEVFAQVKQIYKTPPIKDFGGFNFSQILPDPSKPSKRSFIEDLLFNKVTLADAGFIKQYGDCLGDIAARDLICAQKFNGLTVLPPLLTDEMIAQYTSALLAGTITSGWTFGAGAALQIPFAMQMAYRFNGIGVTQNVLYENQKLIANQFNSAIGKIQDSLSSTAPALGKLQDVVNQNAQALNTLVKQLSSNFGAISSVLNDILSRLDPPEAEVQIDRLITGRLQSLQTYVTQQLIRAAEIRASANLAATKMSECVLGQSKRVDFCGKGYHLMSFPQSAPHGVVFLHVTYVFAQEKNFTTAPAICHDGKAHFPREGVFVSNGTHWFVTQRNFYEPQIITTDNTFVSGNCDVVIGIVNNTVYDPLQPELDS

SEQ ID NO: 2847 - protein, 1147 aa, Artificial Sequence
  SARS-CoV-2/Germany/BavPat3/2020__EPI_ISL_414521 spike protein (1-1147)(K986P_V987P_P1069F)
MFVFLVLLPLVSSQCVNLTTRTQLPPAYTNSFTRGVYYPDKVFRSSVLHSTQDLFLPFFSNVTWFHAIHVSGTNGTKRFDNPVLPFNDGVYFASTEKSNIIRGWIFGTTLDSKTQSLLIVNNATNVVIKVCEFQFCNDPFLGVYYHKNNKSWMESEFRVYSSANNCTFEYVSQPFLMDLEGKQGNFKNLREFVFKNIDGYFKIYSKHTPINLVRDLPQGFSALEPLVDLPIGINITRFQTLLALHRSYLTPGDSSSGWTAGAAAYYVGYLQPRTFLLKYNENGTITDAVDCALDPLSETKCTLKSFTVEKGIYQTSNFRVQPTESIVRFPNITNLCPFGEVFNATRFASVYAWNRKRISNCVADYSVLYNSASFSTFKCYGVSPTKLNDLCFTNVYADSFVIRGDEVRQIAPGQTGKIADYNYKLPDDFTGCVIAWNSNNLDSKVGGNYNYLYRLFRKSNLKPFERDISTEIYQAGSTPCNGVEGFNCYFPLQSYGFQPTNGVGYQPYRVVVLSFELLHAPATVCGPKKSTNLVKNKCVNFNFNGLTGTGVLTESNKKFLPFQQFGRDIADTTDAVRDPQTLEILDITPCSFGGVSVITPGTNTSNQVAVLYQDVNCTEVPVAIHADQLTPTWRVYSTGSNVFQTRAGCLIGAEHVNNSYECDIPIGAGICASYQTQTNSPRRARSVASQSIIAYTMSLGAENSVAYSNNSIAIPTNFTISVTTEILPVSMTKTSVDCTMYICGDSTECSNLLLQYGSFCTQLNRALTGIAVEQDKNTQQVFAQVKQIYKTPPIKDFGGFNFSQILPDPSKPSKRSFIEDLLFNKVTLADAGFIKQYGDCLGDIAARDLICAQKFNGLTVLPPLLTDEMIAQYTSALLAGTITSGWTFGAGAALQIPFAMQMAYRFNGIGVTQNVLYENQKLIANQFNSAIGKIQDSLSSTASALGKLQDVVNQNAQALNTLVKQLSSNFGAISSVLNDILSRLDPPEAEVQIDRLITGRLQSLQTYVTQQLIRAAEIRASANLAATKMSECVLGQSKRVDFCGKGYHLMSFPQSAPHGVVFLHVTYVFAQEKNFTTAPAICHDGKAHFPREGVFVSNGTHWFVTQRNFYEPQIITTDNTFVSGNCDVVIGIVNNTVYDPLQPELDS

SEQ ID NO: 2848 - protein, 1147 aa, Artificial Sequence
  SARS-CoV-2/France/HF1805/2020__EPI_ISL_414628 spike protein (1-1147)(K986P_V987P_P1069F)
MFVFLVLLPLVSSQCVNLTTRTQLPPAYTNSFTRGVYYPDKVFRSSVLHSTQDLFLPFFSNVTWFHAIHVSGTNGTKRFDNPVLPFNDGVYFASTEKSNIIRGWIFGTTLDSKTQSLLIVNNATNVVIKVCEFQFCNDPFLGVYYHKNNKSWMESEFRVYSSANNCTFEYVSQPFLMDLEGKQGNFKNLREFVFKNIDGYFKIYSKHTPINLVRDLPQGFSALEPLVDLPIGINITRFQTLLALHRSYLTPGDSSSGWTAGAAAYYVGYLQPRTFLLKYNENGTITDAVDCALDPLSETKCTLKSFTVEKGIYQTSNFRVQPTESIVRFPNITNLCPFGEVFNATRFASVYAWNRKRISNCVADYSVLYNSASFSTFKCYGVSPTKLNDLCFTNVYADSFVIRGDEVRQIAPGQTGKIADYNYKLPDDFTGCVIAWNSNNLDSKVGGNYNYLYRLFRKSNLKPFERDISTEIYQAGSTPCNGVEGFNCYFPLQSYGFQPTNGVGYQPYRVVVLSFELLHAPATVCGPKKSTNLVKNKCVNFNFNGLTGTGVLTESNKKFLPFQQFGRDIADTTDAVRDPQTLEILDITPCSFGGVSVITPGTNTSNQVAVLYQGVNCTEVPVAIHADQLTPTWRVYSTGSNVFQTRAGCLIGAEHVNNSYECDIPIGAGICASYQTQTNSPRRARSVASQSIIAYTMSLGAENSVAYSNNSIAIPTNFTISVTTEILPVSMTKTSVDCTMYICGDSTECSNLLLQYGSFCTQLNRALTGIAVEQDKNTQEVFAQVKQIYKTPPIKDFGGFNFSQILPDPSKPSKRSFIEDLLFNKVTLADAGFIKQYGDCLGDIAARDLICAQKFNGLTVLPPLLTDEMIAQYTSALLAGTITSGWTFGAGAALQIPFAMQMAYRFNGIGVTQNVLYENQKLIANQFNSAIGKIQDSLSSTASALGKLQDVVNQNAQALNTLVKQLSSNFGAISSVLNDILSRLDPPEAEVQIDRLITGRLQSLQTYVTQQLIRAAEIRASANLAATKMSECVLGQSKRVDFCGKGYHLMSFPQSAPHGVVFLHVTYVFAQEKNFTTAPAICHDGKAHFPREGVFVSNGTHWFVTQRNFYEPQIITTDNTFVSGNCDVVIGVVNNTVYDPLQPELDS

SEQ ID NO: 2849 - protein, 1147 aa, Artificial Sequence
  SARS-CoV-2/Netherlands/ZuidHolland_9/2020__EPI_ISL_414445 spike protein (1-1147)(K986P_V987P_P1069F)
MFVFLVLLPLVSSQCVNLTTRTQLPPAYTNSFTRGVYYPDKVFRSSVLHSTQDLFLPFFSNVTWFHAIHVSGTNGTKRFDNPVLPFNDGVYFASTEKSNIIRGWIFGTTLDSKTQSLLIVNNATNVVIKVCEFQFCNDPFLGVYYHKNNKSWMESEFRVYSSANNCTFEYVSQPFLMDLEGKQGNFKNLREFVFKNIDGYFKIYSKHTPINLVRDLPQGFSALEPLVDLPIGINITRFQTLLALHRSYLTPGDSSSGWTAGAAAYYVGYLQPRTFLLKYNENGTITDAVDCALDPLSETKCTLKSFTVEKGIYQTSNFRVQPTESIVRFPNITNLCPFGEVFNATRFASVYAWNRKRISNCVADYSVLYNSASFSTFKCYGVSPTKLNDLCFTNVYADSFVIRGDEVRQIAPGQTGKIADYNYKLPDDFTGCVIAWNSNNLDSKVGGNYNYLYRLFRKSNLKPFERDISTEIYQAGSTPCNGVEGFNCYFPLQSYGFQPTNGVGYQPYRVVVLSFELLHAPATVCGPKKSTNLVKNKCVNFNFNGLTGTGVLTESNKKFLPFQQFGRDIADTTDAVRDPQTLEILDITPCSFGGVSVITPGTNTSNQVAVLYQGVNCTEVPVAIHADQLTPTWRVYSTGSNVFQTRAGCLIGAEHVNNSYECDIPIGAGICASYQTQTNSPRRARSVASQSIIAYTMSLGAENSVAYSNNSIAIPTNFTISVTTEILPVSMTKTSVDCTMYICGDSTECSNLLLQYGSFCTQLNRALTGIAVEQDKNTQEVFAQVKQIYKTPPIKDFGGFNFSQILPDPSKPSKRSFIEDLLFNKVTLADAGFIKQYGDCLGDIAARDLICVQKFNGLTVLPPLLTDEMIAQYTSALLAGTITSGWTFGAGAALQIPFAMQMAYRFNGIGVTQNVLYENQKLIANQFNSAIGKIQDSLSSTASALGKLQDVVNQNAQALNTLVKQLSSNFGAISSVLNDILSRLDPPEAEVQIDRLITGRLQSLQTYVTQQLIRAAEIRASANLAATKMSECVLGQSKRVDFCGKGYHLMSFPQSAPHGVVFLHVTYVFAQEKNFTTAPAICHDGKAHFPREGVFVSNGTHWFVTQRNFYEPQIITTDNTFVSGNCDVVIGIVNNTVYDPLQPELDS

SEQ ID NO: 2850 - protein, 1147 aa, Artificial Sequence
  SARS-CoV-2/Finland/FIN03032020A/2020__EPI_ISL_413602 spike protein (1-1147)(K986P_V987P_P1069F)
MFVFLVLLPLVSSQCVNLTTRTQLPPAYTNSFTRGVYYPDKVFRSSVLHSTQDLFLPFFSNVTWFHAIHVSGTNGTKRFDNPVLPFNDGVYFASTEKSNIIRGWIFGTTLDSKTQSLLIVNNATNVVIKVCEFQFCNDPFLGVYYHKNNKSWMESEFRVYSSANNCTFEYVSQPFLMDLEGKQGNFKNLREFVFKNIDGYFKIYSKHTPINLVRDLPQGFSALEPLVDLPIGINITRFQTLLALHRSYLTPGDSSSGWTAGAAAYYVGYLQPRTFLLKYNENGTITDAVDCALDPLSETKCTLKSFTVEKGIYQTSNFRVQPTESIVRFPNITNLCPFGEVFNATRFASVYAWNRKRISNCVADYSVLYNSASFSTFKCYGVSPTKLNDLCFTNVYADSFVIRGDEVRQIAPGQTGKIADYNYKLPDDFTGCVISWNSNNLDSKVGGNYNYLYRLFRKSNLKPFERDISTEIYQAGSTPCNGVEGFNCYFPLQSYGFQPTNGVGYQPYRVVVLSFELLHAPATVCGPKKSTNLVKNKCVNFNFNGLTGTGVLTESNKKFLPFQQFGRDIADTTDAVRDPQTLEILDITPCSFGGVSVITPGTNTSNQVAVLYQGVNCTEVPVAIHADQLTPTWRVYSTGSNVFQTRAGCLIGAEHVNNSYECDIPIGAGICASYQTQTNSPRRARSVASQSIIAYTMSLGAENSVAYSNNSIAIPTNFTISVTTEILPVSMTKTSVDCTMYICGDSTECSNLLLQYGSFCTQLNRALTGIAVEQDKNTQEVFAQVKQIYKTPPIKDFGGFNFSQILPDPSKPSKRSFIEDLLFNKVTLADAGFIKQYGDCLGDIAARDLICAQKFNGLTVLPPLLTDEMIAQYTSALLAGTITSGWTFGAGAALQIPFAMQMAYRFNGIGVTQNVLYENQKLIANQFNSAIGKIQDSLSSTASALGKLQDVVNQNAQALNTLVKQLSSNFGAISSVLNDILSRLDPPEAEVQIDRLITGRLQSLQTYVTQQLIRAAEIRASANLAATKMSECVLGQSKRVDFCGKGYHLMSFPQSAPHGVVFLHVTYVFAQEKNFTTAPAICHDGKAHFPREGVFVSNGTHWFVTQRNFYEPQIITTDNTFVSGNCDVVIGIVNNTVYDPLQPELDS

SEQ ID NO: 2851 - protein, 1147 aa, Artificial Sequence
  SARS-CoV-2/France/GE1977/2020__EPI_ISL_414632 spike protein (1-1147)(K986P_V987P_P1069F)
MFVFLVLLPLVSSQCVNLTTRTQLPPAYTNSFTRGVYYPDKVFRSSVLHSTQDLFLPFFSNVTWFHAIHVSGTNGTKRFDNPVLPFNDGVYFASTEKSNIIRGWIFGTTLDSKTQSLLIVNNATNVVIKVCEFQFCNDPFLGVYYHKNNKSWMESEFRVYSSANNCTFEYVSQPFLMDLEGKQGNFKNLREFVFKNIDGYFKIYSKHTPINLVRDLPQGFSALEPLVDLPIGINITRFQTLLALHRSYLTPGDSSSGWTAGAAAYYVGYLQPRTFLLKYNENGTITDAVDCALDPLSETKCTLKSFTVEKGIYQTSNFRVQPTESIVRFPNITNLCPFGEVFNATRFASVYAWNRKRISNCVADYSVLYNSASFSTFKCYGVSPTKLNDLCFTNVYADSFVIRGDEVRQIAPGQTGKIADYNYKLPDDFTGCVIAWNSNNLDSKVGGNYNYLYRLFRKSNLKPFERDISTEIYQAGSTPCNGVEGFNCYFPLQSYGFQPTNGVGYQPYRVVVLSFELLHAPATVCGPKKSTNLVKNKCVNFNFNGLTGTGVLTESNKKFLPFQQFGRDIADTTDAVRDPQTLEILDITPCSFGGVSVITPGTNTSNQVAVLYQGVNCTEVPVAIHADQLTPTWRVYSTGSNVFQTRAGCLIGAEHVNNSYECDIPIGAGICASYQTQTNSPRRARSVASQSIIAYTMSLGAENSVAYSNNSIAIPTNFTISVTTEILPVSMTKTSVDCTMYICGDSTECSNLLLQYGSFCTQLNRALTGIAVEQDKNTQEVFAQVKQIYKTPPIKDFGGFNFSQILPDPSKPSKRSFIEDLLFNKVTLADAGFIKQYGDCLGDIAARDLICAQKFNGLTVLPPLLTDEMIAQYTSALLAGTITSGWTFGAGAALQIPFAMQMAYRFNGIGVTQNVLYENQKLIANQFNSAIGKIQDSLFSTASALGKLQDVVNQNAQALNTLVKQLSSNFGAISSVLNDILSRLDPPEAEVQIDRLITGRLQSLQTYVTQQLIRAAEIRASANLAATKMSECVLGQSKRVDFCGKGYHLMSFPQSAPHGVVFLHVTYVFAQEKNFTTAPAICHDGKAHFPREGVFVSNGTHWFVTQRNFYEPQIITTDNTFVSGNCDVVIGIVNNTVYDPLQPELDS

SEQ ID NO: 2852 - protein, 1147 aa, Artificial Sequence
  SARS-CoV-2/Finland/FIN-313/2020__EPI_ISL_414641 spike protein (1-1147)(K986P_V987P_P1069F)
MFVFLVLLPLVSSQCVNLTTRTQLPPAYTNSFTRGVYYPDKVFRSSVLHSTQDLFLPFFSNVTWFHAIHVSGTNGTKRFDNPVLPFNDGVYFASTEKSNIIRGWIFGTTLDSKTQSLLIVNNATNVVIKVCEFQFCNDPFLGVYYHKNNKSWMESEFRVYSSANNCTFEYVSQPFLMDLEGKQGNFKNLREFVFKNIDGYFKIYSKHTPINLVRDLPQGFSALEPLVDLPIGINITRFKTLLALHRSYLTPGDSSSGWTAGAAAYYVGYLQPRTFLLKYNENGTITDAVDCALDPLSETKCTLKSFTVEKGIYQTSNFRVQPTESIVRFPNITNLCPFGEVFNATRFASVYAWNRKRISNCVADYSVLYNSASFSTFKCYGVSPTKLNDLCFTNVYADSFVIRGDEVRQIAPGQTGKIADYNYKLPDDFTGCVIAWNSNNLDSKVGGNYNYLYRLFRKSNLKPFERDISTEIYQAGSTPCNGVEGFNCYFPLQSYGFQPTNGVGYQPYRVVVLSFELLHAPATVCGPKKSTNLVKNKCVNFNFNGLTGTGVLTESNKKFLPFQQFGRDIADTTDAVRDPQTLEILDITPCSFGGVSVITPGTNTSNQVAVLYQGVNCTEVPVAIHADQLTPTWRVYSTGSNVFQTRAGCLIGAEHVNNSYECDIPIGAGICASYQTQTNSPRRARSVASQSIIAYTMSLGAENSVAYSNNSIAIPTNFTISVTTEILPVSMTKTSVDCTMYICGDSTECSNLLLQYGSFCTQLNRALTGIAVEQDKNTQEVFAQVKQIYKTPPIKDFGGFNFSQILPDPSKPSKRSFIEDLLFNKVTLADAGFIKQYGDCLGDIAARDLICAQKFNGLTVLPPLLTDEMIAQYTSALLAGTITSGWTFGAGAALQIPFAMQMAYRFNGIGVTQNVLYENQKLIANQFNSAIGKIQDSLSSTASALGKLQDVVNQNAQALNTLVKQLSSNFGAISSVLNDILSRLDPPEAEVQIDRLITGRLQSLQTYVTQQLIRAAEIRASANLAATKMSECVLGQSKRVDFCGKGYHLMSFPQSAPHGVVFLHVTYVFAQEKNFTTAPAICHDGKAHFPREGVFVSNGTHWFVTQRNFYEPQIITTDNTFVSGNCDVVIGIVNNTVYDPLQPELDS

SEQ ID NO: 2853 - protein, 1147 aa, Artificial Sequence
  SARS-CoV-2/Netherlands/ZuidHolland_2/2020__EPI_ISL_414556 spike protein (1-1147)(K986P_V987P_P1069F)
MFVFLVLLPLVSSQCVNLTTRTQLPPAYTNSFTRGVYYPDKVFRSSVLHSTQDLFLPFFSNVTWFHAIHVSGTNGTKRFDNPVLPFNDGVYFASTEKSNIIRGWIFGTTLDSKTQSLLIVNNATNVVIKVCEFQFCNDPFLGVYYHKNNKSWMESEFRVYSSANNCTFEYVSQPFLMDLEGKQGNFKNLREFVFKNIDGYFKIYSKHTPINLVRDLPQGFSALEPLVDLPIGINITRFQTLLALHRSYLTPGDSSSGWTAGAAAYYVGYLQPRTFLLKYNENGTITDAVDCALDPLSETKCTLKSFTVEKGIYQTSNFRVQPTESIVRFPNITNLCPFGEVFNATRFASVYAWNRKRISNCVADYSVLYNSASFSTFKCYGVSPTKLNDLCFTNVYADSFVIRGDEVRQIAPGQTGKIADYNYKLPDDFTGCVIAWNSNNLDSKVGGNYNYLYRLFRKSNLKPFERDISTEIYQAGSTPCNGVEGFNCYFPLQSYGFQPTNGVGYQPYRVVVLSFELLHAPATVCGPKKSTNLVKNKCVNFNFNGLTGTGVLTESNKKFLPFQQFGRDIADTTDAVRDPQTLEILDITPCSFGGVSVITPGTNTSNQVAVLYQGVNCTEVPVAIHADQLTPTWRVYSTGSNVFQTRAGCLIGAEHVNNSYECDIPIGAGICASYQTQTNSPRRARSVASQSIIAYTMSLGAENSVAYSNNSIAIPTNFTISVTTEILPVSMTKTSVDCTMYICGDSTECSNLLLQYGSFCTQLNRALTGIALEQDKNTQEVFAQVKQIYKTPPIKDFGGFNFSQILPDPSKPSKRSFIEDLLFNKVTLADAGFIKQYGDCLGDIAARDLICAQKFNGLTVLPPLLTDEMIAQYTSALLAGTITSGWTFGAGAALQIPFAMQMAYRFNGIGVTQNVLYENQKLIANQFNSAIGKIQDSLSSTASALGKLQDVVNQNAQALNTLVKQLSSNFGAISSVLNDILSRLDPPEAEVQIDRLITGRLQSLQTYVTQQLIRAAEIRASANLAATKMSECVLGQSKRVDFCGKGYHLMSFPQSAPHGVVFLHVTYVFAQEKNFTTAPAICHDGKAHFPREGVFVSNGTHWFVTQRNFYEPQIITTDNTFVSGNCDVVIGIVNNTVYDPLQPELDS

SEQ ID NO: 2854 - protein, 1147 aa, Artificial Sequence
  SARS-CoV-2/USA/WA-UW31/2020__EPI_ISL_414618 spike protein (1-1147)(K986P_V987P_P1069F)
MFVFLVLLPLVSSQCVNLTTRTQLPPAYTNSFTRGVYYPDKVFRSSVLHSTQDLFLPFFSNVTWFHAIHVSGTNGTKRFDNPVLPFNDGVYFASTEKSNIIRGWIFGTTLDSKTQSLLIVNNATNVVIKVCEFQFCNDPFLGVYYHKNNKSWMESEFRVYSSANNCTFEYVSQPFLMDLEGKQGNFKNLREFVFKNIDGYFKIYSKHTPINLVRDLPQGFSALEPLVDLPIGINITRFQTLLALHRSYLTPGDSSSGWTAGAAAYYVGYLQPRTFLLKYNENGTITDAVDCALDPLSETKCTLKSFTVEKGIYQTSNFRVQPTESIVRFPNITNLCPFGEVFNATRFASVYAWNRKRISNCVADYSVLYNSASFSTFKCYGVSPTKLNDLCFTNVYADSFVIRGDEVRQIAPGQTGKIADYNYKLPDDFTGCVIAWNSNNLDSKVGGNYNYLYRLFRKSNLKPFERDISTEIYQAGSTPCNGAEGFNCYFPLQSYGFQPTNGVGYQPYRVVVLSFELLHAPATVCGPKKSTNLVKNKCVNFNFNGLTGTGVLTESNKKFLPFQQFGRDIADTTDAVRDPQTLEILDITPCSFGGVSVITPGTNTSNQVAVLYQDVNCTEVPVAIHADQLTPTWRVYSTGSNVFQTRAGCLIGAEHVNNSYECDIPIGAGICASYQTQTNSPRRARSVASQSIIAYTMSLGAENSVAYSNNSIAIPTNFTISVTTEILPVSMTKTSVDCTMYICGDSTECSNLLLQYGSFCTQLNRALTGIAVEQDKNTQEVFAQVKQIYKTPPIKDFGGFNFSQILPDPSKPSKRSFIEDLLFNKVTLADAGFIKQYGDCLGDIAARDLICAQKFNGLTVLPPLLTDEMIAQYTSALLAGTITSGWTFGAGAALQIPFAMQMAYRFNGIGVTQNVLYENQKLIANQFNSAIGKIQDSLSSTASALGKLQDVVNQNAQALNTLVKQLSSNFGAISSVLNDILSRLDPPEAEVQIDRLITGRLQSLQTYVTQQLIRAAEIRASANLAATKMSECVLGQSKRVDFCGKGYHLMSFPQSAPHGVVFLHVTYVFAQEKNFTTAPAICHDGKAHFPREGVFVSNGTHWFVTQRNFYEPQIITTDNTFVSGNCDVVIGIVNNTVYDPLQPELDS

SEQ ID NO: 2855 - protein, 1147 aa, Artificial Sequence
  SARS-CoV-2/South Korea/SNU01/2020__EPI_ISL_411929 spike protein (1-1147)(K986P_V987P_P1069F)
MFVFLVLLPLVSSQCVNLTTRTQLPPAYTNSFTRGVYYPDKVFRSSVLHSTQDLFLPFFSNVTWFHAIHVSGTNGTKRFDNPVLPFNDGVYFASTEKSNIIRGWIFGTTLDSKTQSLLIVNNATNVVIKVCEFQFCNDPFLGVYYHKNNKSWMESEFRVYSSANNCTFEYVSQPFLMDLEGKQGNFKNLREFVFKNIDGYFKIYSKHTPINLVRDLPQGFWALEPLVDLPIGINITRFQTLLALHRSYLTPGDSSSGWTAGAAAYYVGYLQPRTFLLKYNENGTITDAVDCALDPLSETKCTLKSFTVEKGIYQTSNFRVQPTESIVRFPNITNLCPFGEVFNATRFASVYAWNRKRISNCVADYSVLYNSASFSTFKCYGVSPTKLNDLCFTNVYADSFVIRGDEVRQIAPGQTGKIADYNYKLPDDFTGCVIAWNSNNLDSKVGGNYNYLYRLFRKSNLKPFERDISTEIYQAGSTPCNGVEGFNCYFPLQSYGFQPTNGVGYQPYRVVVLSFELLHAPATVCGPKKSTNLVKNKCVNFNFNGLTGTGVLTESNKKFLPFQQFGRDIADTTDAVRDPQTLEILDITPCSFGGVSVITPGTNTSNQVAVLYQDVNCTEVPVAIHADQLTPTWRVYSTGSNVFQTRAGCLIGAEHVNNSYECDIPIGAGICASYQTQTNSPRRARSVASQSIIAYTMSLGAENSVAYSNNSIAIPTNFTISVTTEILPVSMTKTSVDCTMYICGDSTECSNLLLQYGSFCTQLNRALTGIAVEQDKNTQEVFAQVKQIYKTPPIKDFGGFNFSQILPDPSKPSKRSFIEDLLFNKVTLADAGFIKQYGDCLGDIAARDLICAQKFNGLTVLPPLLTDEMIAQYTSALLAGTITSGWTFGAGAALQIPFAMQMAYRFNGIGVTQNVLYENQKLIANQFNSAIGKIQDSLSSTASALGKLQDVVNQNAQALNTLVKQLSSNFGAISSVLNDILSRLDPPEAEVQIDRLITGRLQSLQTYVTQQLIRAAEIRASANLAATKMSECVLGQSKRVDFCGKGYHLMSFPQSAPHGVVFLHVTYVFAQEKNFTTAPAICHDGKAHFPREGVFVSNGTHWFVTQRNFYEPQIITTDNTFVSGNCDVVIGIVNNTVYDPLQPELDS

SEQ ID NO: 2856 - protein, 1147 aa, Artificial Sequence
  SARS-CoV-2/China/WF0004/2020__EPI_ISL_413694 spike protein (1-1147)(K986P_V987P_P1069F)
MFVFLVLLPLVSSQCVNLTTRTQLPPAYTNSFTRGVYYPDKVFRSSVLHSTQDLFLPFFSNVTWFHAIHVSGTNGTKRFDNPVLPFNDGVYFASTEKSNIIRGWIFGTTLDSKTQSLLIVNNATNVVIKVCEFQFCNDPFLGVYYHKNNKSWTESEFRVYSSANNCTFEYVSQPFLMDLEGKQGNFKNLREFVFKNIDGYFKIYSKHTPINLVRDLPQGFSALEPLVDLPIGINITRFQTLLALHRSYLTPGDSSSGWTAGAAAYYVGYLQPRTFLLKYNENGTITDAVDCALDPLSETKCTLKSFTVEKGIYQTSNFRVQPTESIVRFPNITNLCPFGEVFNATRFASVYAWNRKRISNCVADYSVLYNSASFSTFKCYGVSPTKLNDLCFTNVYADSFVIRGDEVRQIAPGQTGKIADYNYKLPDDFTGCVIAWNSNNLDSKVGGNYNYLYRLFRKSNLKPFERDISTEIYQAGSTPCNGVEGFNCYFPLQSYGFQPTNGVGYQPYRVVVLSFELLHAPATVCGPKKSTNLVKNKCVNFNFNGLTGTGVLTESNKKFLPFQQFGRDIADTTDAVRDPQTLEILDITPCSFGGVSVITPGTNTSNQVAVLYQDVNCTEVPVAIHADQLTPTWRVYSTGSNVFQTRAGCLIGAEHVNNSYECDIPIGAGICASYQTQTNSPRRARSVASQSIIAYTMSLGAENSVAYSNNSIAIPTNFTISVTTEILPVSMTKTSVDCTMYICGDSTECSNLLLQYGSFCTQLNRALTGIAVEQDKNTQEVFAQVKQIYKTPPIKDFGGFNFSQILPDPSKPSKRSFIEDLLFNKVTLADAGFIKQYGDCLGDIAARDLICAQKFNGLTVLPPLLTDEMIAQYTSALLAGTITSGWTFGAGAALQIPFAMQMAYRFNGIGVTQNVLYENQKLIANQFNSAIGKIQDSLSSTASALGKLQDVVNQNAQALNTLVKQLSSNFGAISSVLNDILSRLDPPEAEVQIDRLITGRLQSLQTYVTQQLIRAAEIRASANLAATKMSECVLGQSKRFDFCGKGYHLMSFPQSAPHGVVFLHVTYVFAQEKNFTTAPAICHDGKAHFPREGVFVSNGTHWFVTQRNFYEPQIITTDNTFVSGNCDVVIGIVNNTVYDPLQPELDS

SEQ ID NO: 2857 - protein, 1147 aa, Artificial Sequence
  SARS-CoV-2/China/WF0028/2020__EPI_ISL_413791 spike protein (1-1147)(K986P_V987P_P1069F)
MFVFLVLLPLVSSQCVNLTTRTQLPPAYTNSFTRGVYYPDKVFRSSVLHSTQDLFLPFFSNVTWFHAIHVSGTNGTKRFDNPVLPFNDGVYFASTEKSNIIRGWIFGTTLDSKTQSLLIVNNATNVVIKVCEFQFCNDPFLGVYYHKNNKSWMESEFRVYSSANNCTFEYVSQPFLMDLEGKQGNFKNLREFVFKNIDGYFKIYSKHTPINLVRDLPQGFSALEPLVDLPIGINITRFQTLLALHRSYLTPGDSSSGWTAGAAAYYVGYLQPRTFLLKYNENGTITDAVDCALDPLSETKCTLKSFTVEKGIYQTSNFRVQPTESIVRFPNITNLCPFGEVFNATRFASVYAWNRKRISNCVADYSVLYNSASFSTFKCYGVSPTKLNDLCFTNVYADSFVIRGDEVRQIAPGQTGKIADYNYKLPDDFTGCVIAWNSNNLDSKVGGNYNYLYRLFRKSNLKPFERDISTEIYQAGSTPCNGVEGFNCYFPLQSYGFQPTNGVGYQPYRVVVLSFELLHAPATVCGPKKSTNLVKNKCVNFNFNGLTGTGVLTESNKKFLPFQQFGRDIADTTDAVRDPQTLEILDITPCSFGGVSVITPGTNTSNQVAVLYQDVNCTEVPVAIHADQLTPTWRVYSTGSNVFQTRAGCLIGAEHVNNSYECDIPIGAGICASYQTQTNSPRRARSVASQSIIAYTMSLGAENSVAYSNNSIAIPTNFTISVTTEILPVSMTKTSVDCTMYICGDSTECSNLLLQYGSFCTQLNRALTGIAVEQDKNTQEVFAQVKQIYKTPPIKDFGGFNFSQILPDPSKPSKRSFIEDLLFNKVTLADAGFIKQYGDCLGDIAARDLICAQKFNGLTVLPPLLTDEMIAQYTSALLAGTITSGWTFGAGAALQIPFAMQMAYRFNGIGVTQNVLYENQKLIANQFNSAIGKIQDSLSSTASALGKLQDVVNQNAQALNTLVKQLSSNFGAISSVLNDILSRLDPPEAEVQIDRLITGRLQSLQTYVTQQLIRAAEIRASANLAATKMSECVLGQSKRVDFCGKGYHLMSFPQSAPHGVVFLHVTYVFAQEKNFTTAPAICHDGKAHFPREGVFVSNGTHWFVTQRNFYEPQIITTDNTFVSGNCDVVIGIVNNTVYDPLQPELES

SEQ ID NO: 2858 - protein, 1147 aa, Artificial Sequence
  SARS-CoV-2/2019-nCoV/USA-CruiseA-18/2020__MT159716.1 spike protein (1-1147)(K986P_V987P_P1069F)
MFVFLVLLPLVSSQCVNLTTRTQLPPAYTNSFTRGVYYPDKVFRSSVLHSTQDLFLPFFSNVTWFHAIHVSGTNGTKRFDNPVLPFNDGVYFASTEKSNIIRGWIFGTTLDSKTQSLLIVNNATNVVIKVCEFQFCNDPFLGVYYHKNNKSWMESELRVYSSANNCTFEYVSQPFLMDLEGKQGNFKNLREFVFKNIDGYFKIYSKHTPINLVRDLPQGFSALEPLVDLPIGINITRFQTLLALHRSYLTPGDSSSGWTAGAAAYYVGYLQPRTFLLKYNENGTITDAVDCALDPLSETKCTLKSFTVEKGIYQTSNFRVQPTESIVRFPNITNLCPFGEVFNATRFASVYAWNRKRISNCVADYSVLYNSASFSTFKCYGVSPTKLNDLCFTNVYADSFVIRGDEVRQIAPGQTGKIADYNYKLPDDFTGCVIAWNSNNLDSKVGGNYNYLYRLFRKSNLKPFERDISTEIYQAGSTPCNGVEGFNCYFPLQSYGFQPTNGVGYQPYRVVVLSFELLHAPATVCGPKKSTNLVKNKCVNFNFNGLTGTGVLTESNKKFLPFQQFGRDIADTTDAVRDPQTLEILDITPCSFGGVSVITPGTNTSNQVAVLYQDVNCTEVPVAIHADQLTPTWRVYSTGSNVFQTRAGCLIGAEHVNNSYECDIPIGAGICASYQTQTNSPRRARSVASQSIIAYTMSLGAENSVAYSNNSIAIPTNFTISVTTEILPVSMTKTSVDCTMYICGDSTECSNLLLQYGSFCTQLNRALTGIAVEQDKNTQEVFAQVKQIYKTPPIKDFGGFNFSQILPDPSKPSKRSFIEDLLFNKVTLADAGFIKQYGDCLGDIAARDLICAQKFNGLTVLPPLLTDEMIAQYTSALLAGTITSGWTFGAGAALQIPFAMQMAYRFNGIGVTQNVLYENQKLIANQFNSAIGKIQDSLSSTASALGKLQDVVNQNAQALNTLVKQLSSNFGAISSVLNDILSRLDPPEAEVQIDRLITGRLQSLQTYVTQQLIRAAEIRASANLAATKMSECVLGQSKRVDFCGKGYHLMSFPQSAPHGVVFLHVTYVFAQEKNFTTAPAICHDGKAHFPREGVFVSNGTHWFVTQRNFYEPQIITTDNTFVSGNCDVVIGIVNNTVYDPLQPELDS

SEQ ID NO: 2859 - protein, 1147 aa, Artificial Sequence
  SARS-CoV-2/SARS-CoV-2/Yunnan-01/human/2020/CHN__MT049951.1 spike protein (1-1147)(K986P_V987P_P1069F)
MFVFLVLLPLVSSQCVNLTTRTQLPPANTNSFTRGVYYPDKVFRSSVLHSTQDLFLPFFSNVTWFHAIHVSGTNGTKRFDNPVLPFNDGVYFASTEKSNIIRGWIFGTTLDSKTQSLLIVNNATNVVIKVCEFQFCNDPFLGVYYHKNNKSWMESEFRVYSSANNCTFEYVSQPFLMDLEGKQGNFKNLREFVFKNIDGYFKIYSKHTPINLVRDLPQGFSALEPLVDLPIGINITRFQTLLALHRSYLTPGDSSSGWTAGAAAYYVGYLQPRTFLLKYNENGTITDAVDCALDPLSETKCTLKSFTVEKGIYQTSNFRVQPTESIVRFPNITNLCPFGEVFNATRFASVYAWNRKRISNCVADYSVLYNSASFSTFKCYGVSPTKLNDLCFTNVYADSFVIRGDEVRQIAPGQTGKIADYNYKLPDDFTGCVIAWNSNNLDSKVGGNYNYLYRLFRKSNLKPFERDISTEIYQAGSTPCNGVEGFNCYFPLQSYGFQPTNGVGYQPYRVVVLSFELLHAPATVCGPKKSTNLVKNKCVNFNFNGLTGTGVLTESNKKFLPFQQFGRDIADTTDAVRDPQTLEILDITPCSFGGVSVITPGTNTSNQVAVLYQDVNCTEVPVAIHADQLTPTWRVYSTGSNVFQTRAGCLIGAEHVNNSYECDIPIGAGICASYQTQTNSPRRARSVASQSIIAYTMSLGAENSVAYSNNSIAIPTNFTISVTTEILPVSMTKTSVDCTMYICGDSTECSNLLLQYGSFCTQLNRALTGIAVEQDKNTQEVFAQVKQIYKTPPIKDFGGFNFSQILPDPSKPSKRSFIEDLLFNKVTLADAGFIKQYGDCLGDIAARDLICAQKFNGLTVLPPLLTDEMIAQYTSALLAGTITSGWTFGAGAALQIPFAMQMAYRFNGIGVTQNVLYENQKLIANQFNSAIGKIQDSLSSTASALGKLQDVVNQNAQALNTLVKQLSSNFGAISSVLNDILSRLDPPEAEVQIDRLITGRLQSLQTYVTQQLIRAAEIRASANLAATKMSECVLGQSKRVDFCGKGYHLMSFPQSAPHGVVFLHVTYVFAQEKNFTTAPAICHDGKAHFPREGVFVSNGTHWFVTQRNFYEPQIITTDNTFVSGNCDVVIGIVNNTVYDPLQPELDS

SEQ ID NO: 2860 - protein, 1147 aa, Artificial Sequence
  SARS-CoV-2/USA/WA-UW292/2020__EPI_ISL_418077 spike protein (1-1147)(K986P_V987P_P1069F)
MFVFLVLLPLVSSQCVNLTTRTQLPPAYTNSFTRGVYYPDKVFRSSVLHSTQDLFLPFFSNVTWFHAIHVSGTNGTKRFDNPVLPFNDGVYFASTEKSNIIRGWIFGTTLDSKTQSLLIVNNATNVVIKVCEFQFCNDPFLGVYYHKNNKSWMESEFRVYSSANNCTFEYVSQPFLMDLEGKQGNFKNLREFVFKNIDGYFKIYSKHTPINLVRDLPQGFSALEPLVDLPIGINITRFQTLLALHRSYLTPGDSSSGWTAGAAAYYVGYLQPRTFLLKYNENGTITDAVDCALDPLSETKCTLKSFTVEKGIYQTSNFRVQPTESIVRFPNITNLCPFGEVFNATRFASVYAWNRKRISNCVADYSVLYNSASFSTFKCYGVSPTKLNDLCFTNVYADSFVIRGDEVRQIAPGQTGKIADYNYKLPDDFTGCVIAWNSNNLDSKVGGNYNYLYRLFRKSNLKPFERDISTEIYQASSTPCNGVEGFNCYFPLQSYGFQPTNGVGYQPYRVVVLSFELLHAPATVCGPKKSTNLVKNKCVNFNFNGLTGTGVLTESNKKFLPFQQFGRDIADTTDAVRDPQTLEILDITPCSFGGVSVITPGTNTSNQVAVLYQDVNCTEVPVAIHADQLTPTWRVYSTGSNVFQTRAGCLIGAEHVNNSYECDIPIGAGICASYQTQTNSPRRARSVASQSIIAYTMSLGAENSVAYSNNSIAIPTNFTISVTTEILPVSMTKTSVDCTMYICGDSTECSNLLLQYGSFCTQLNRALTGIAVEQDKNTQEVFAQVKQIYKTPPIKDFGGFNFSQILPDPSKPSKRSFIEDLLFNKVTLADAGFIKQYGDCLGDIAARDLICAQKFNGLTVLPPLLTDEMIAQYTSALLAGTITSGWTFGAGAALQIPFAMQMAYRFNGIGVTQNVLYENQKLIANQFNSAIGKIQDSLSSTASALGKLQDVVNQNAQALNTLVKQLSSNFGAISSVLNDILSRLDPPEAEVQIDRLITGRLQSLQTYVTQQLIRAAEIRASANLAATKMSECVLGQSKRVDFCGKGYHLMSFPQSAPHGVVFLHVTYVFAQEKNFTTAPAICHDGKAHFPREGVFVSNGTHWFVTQRNFYEPQIITTDNTFVSGNCDVVIGIVNNTVYDPLQPELDS

SEQ ID NO: 2861 - protein, 1147 aa, Artificial Sequence
  SARS-CoV-2/Iceland/192/2020__EPI_ISL_417819 spike protein (1-1147)(K986P_V987P_P1069F)
MFVFFVLLPLVSSQCVNLTTRTQLPPAYTNSFTRGVYYPDKVFRSSVLHSTQDLFLPFFSNVTWFHAIHVSGTNGTKRFDNPVLPFNDGVYFASTEKSNIIRGWIFGTTLDSKTQSLLIVNNATNVVIKVCEFQFCNDPFLGVYYHKNNKSWMESEFRVYSSANNCTFEYVSQPFLMDLEGKQGNFKNLREFVFKNIDGYFKIYSKHTPINLVRDLPQGFSALEPLVDLPIGINITRFQTLLALHRSYLTPGDSSSGWTAGAAAYYVGYLQPRTFLLKYNENGTITDAVDCALDPLSETKCTLKSFTVEKGIYQTSNFRVQPTESIVRFPNITNLCPFGEVFNATRFASVYAWNRKRISNCVADYSVLYNSASFSTFKCYGVSPTKLNDLCFTNVYADSFVIRGDEVRQIAPGQTGKIADYNYKLPDDFTGCVIAWNSNNLDSKVGGNYNYLYRLFRKSNLKPFERDISTEIYQAGSTPCNGVEGFNCYFPLQSYGFQPTNGVGYQPYRVVVLSFELLHAPATVCGPKKSTNLVKNKCVNFNFNGLTGTGVLTESNKKFLPFQQFGRDIADTTDAVRDPQTLEILDITPCSFGGVSVITPGTNTSNQVAVLYQGVNCTEVPVAIHADQLTPTWRVYSTGSNVFQTRAGCLIGAEHVNNSYECDIPIGAGICASYQTQTNSPRRARSVASQSIIAYTMSLGAENSVAYSNNSIAIPTNFTISVTTEILPVSMTKTSVDCTMYICGDSTECSNLLLQYGSFCTQLNRALTGIAVEQDKNTQEVFAQVKQIYKTPPIKDFGGFNFSQILPDPSKPSKRSFIEDLLFNKVTLADAGFIKQYGDCLGDIAARDLICAQKFNGLTVLPPLLTDEMIAQYTSALLAGTITSGWTFGAGAALQIPFAMQMAYRFNGIGVTQNVLYENQKLIANQFNSAIGKIQDSLSSTASALGKLQDVVNQNAQALNTLVKQLSSNFGAISSVLNDILSRLDPPEAEVQIDRLITGRLQSLQTYVTQQLIRAAEIRASANLAATKMSECVLGQSKRVDFCGKGYHLMSFPQSAPHGVVFLHVTYVFAQEKNFTTAPAICHDGKAHFPREGVFVSNGTHWFVTQRNFYEPQIITTDNTFVSGNCDVVIGIVNNTVYDPLQPELDS

SEQ ID NO: 2862 - protein, 1147 aa, Artificial Sequence
  SARS-CoV-2/Belgium/ULG-6939/2020__EPI_ISL_417020 spike protein (1-1147)(K986P_V987P_P1069F)
MFVFLVLLPLVSSQCVNLTTRTQLPPAYTNSFTRGVYYPDKVFRSSVLHSTQDLFLPFFSNVTWFHAIHVSGTNGTKRFDNPVLPFNDGVYFASTEKSNIIRGWIFGTTLDSKTQSLLIVNNATNVVIKVCEFQFCNDPFLGVYYHKNNKSWMESEFRVYSSANNCTFEYVSQPFLMDLEGKQGNFKNLREFVFKNIDGYFKIYSKHTPINLVRDLPQGFSALEPLVDLPIGINITRFQTLLALHRSYLTPGDSSSGWTAGAAAYYVGYLQPRTFLLKYNENGTITDAVDCALDPLSETKCTLKSFTVEKGIYQTSNFRVQPTESIVRFPNITNLCPFGEVFNATRFASVYAWNRKRISNCVADYSVLYNSASFSTFKCYGVSPTKLNDLCFTNVYADSFVIRGDEVRQIAPGQTGKIADYNYKLPDDFTGCVIAWNSNNLDSKVGGNYNYLYRLFRKSNLKPFERDISTEIYQAGSTPCNGVEGFNCYFPLQSYGFQPTNGVGYQPYRVVVLSFELLHAPATVCGPKKSTNLVKNKCVNFNFNGLTGTGVLTESNKKFLPFQQFGRDIADTTDAVRDPQTLEILDITPCSFGGVSVITPGTNTSNQVAVLYQGVNCTEVPVAIHADQLTPTWRVYSTGSNVFQTRAGCLIGAEHVNNSYECDIPIGAGICASYQTQTNSPRRARSVASQSIIAYTMSLGAENSVVYSNNSIAIPTNFTISVTTEILPVSMTKTSVDCTMYICGDSTECSNLLLQYGSFCTQLNRALTGIAVEQDKNTQEVFAQVKQIYKTPPIKDFGGFNFSQILPDPSKPSKRSFIEDLLFNKVTLADAGFIKQYGDCLGDIAARDLICAQKFNGLTVLPPLLTDEMIAQYTSALLAGTITSGWTFGAGAALQIPFAMQMAYRFNGIGVTQNVLYENQKLIANQFNSAIGKIQDSLSSTASALGKLQDVVNQNAQALNTLVKQLSSNFGAISSVLNDILSRLDPPEAEVQIDRLITGRLQSLQTYVTQQLIRAAEIRASANLAATKMSECVLGQSKRVDFCGKGYHLMSFPQSAPHGVVFLHVTYVFAQEKNFTTAPAICHDGKAHFPREGVFVSNGTHWFVTQRNFYEPQIITTDNTFVSGNCDVVIGIVNNTVYDPLQPELDS

SEQ ID NO: 2863 - protein, 1147 aa, Artificial Sequence
  SARS-CoV-2/France/HF2496/2020__EPI_ISL_418231 spike protein (1-1147)(K986P_V987P_P1069F)
MFVFLVLLPLVSSQCVNLTTRTQLPPAYTNSFTRGVYYPDKVFRSSVLHSTQDLFLPFFSNVTWFHAIHVSGTNGTKRFDNPVLPFNDGVYFASTEKSNIIRGWIFGTTLDSKTQSLLIVNNATNVVIKVCEFQFCNDPFLGVYYHKNNKSWMESEFRVYSSANNCTFEYVSQPFLMDLEGKQGNFKNLREFVFKNIDGYFKIYSKHTPINLVRDLPQGFSALEPLVDLPIGINITRFQTLLALHRSYLTPGDSSSGWTAGAAAYYVGYLQPRTFLLKYNENGTITDAVDCALDPLSETKCTLKSFTVEKGIYQTSNFRVQPTESIVRFPNITNLCPFGEVFNATRFASVYAWNRKRISNCVADYSVLYNSASFSTFKCYGVSPTKLNDLCFTNVYADSFVIRGDEVRQIAPGQTGKIADYNYKLPDDFTGCVIAWNSNNLDSKVGGNYNYLYRLFRKSNLKPFERDISTEIYQAGSTPCNGVEGFNCYFPLQSYGFQPTNGVGYQPYRVVVLSFELLHAPATVCGPKKSTNLVKNKCVNFNFNGLTGTGVLTESNKKFLPFQQFGRDIADTTDAVRDPQTLEILDITPCSFGGVSVITPGTNTSNQVAVLYQGVNCTEVPVAIHADQLTPTWRVYSTGSNVFQTRAGCLIGAEHVNNSYECDIPIGAGICASYQTQTNSPRRARSVASQSIIAYTMSLGAENSVAYSNNSIAIPTNFTISVTTEILPVSMTKTSVDCTMYICGDSTECSNLLLQYGSFCTQLNRALTGIAVEQDKNTQEVFAQVKQIYKTPPIKDFGGFNFSQILPDPSKPSKRSFIEDLLFNKVTLADAGFIKQYGDCLGDIVARDLICAQKFNGLTVLPPLLTDEMIAQYTSALLAGTITSGWTFGAGAALQIPFAMQMAYRFNGIGVTQNVLYENQKLIANQFNSAIGKIQDSLSSTASALGKLQDVVNQNAQALNTLVKQLSSNFGAISSVLNDILSRLDPPEAEVQIDRLITGRLQSLQTYVTQQLIRAAEIRASANLAATKMSECVLGQSKRVDFCGKGYHLMSFPQSAPHGVVFLHVTYVFAQEKNFTTAPAICHDGKAHFPREGVFVSNGTHWFVTQRNFYEPQIITTDNTFVSGNCDVVIGIVNNTVYDPLQPELDS

SEQ ID NO: 2864 - protein, 1147 aa, Artificial Sequence
  SARS-CoV-2/USA/WA-UW291/2020__EPI_ISL_418076 spike protein (1-1147)(K986P_V987P_P1069F)
MFVFLVLLPLVSSQCVNLTTRTQLPPAYTNSFTRGVYYPDKVFRSSVLHSTQDLFLPFFSNVTWFHAIHVSGTNGTKRFDNPVLPFNDGVYFASTEKSNIIRGWIFGTTLDSKTQSLLIVNNATNVVIKVCEFQFCNDPFLGVYYHKNNKSWMESEFRVYSSANNCTFEYVSQPFLMDLEGKQGNFKNLREFVFKNIDGYFKIYSKHTPINLVRDLPQGFSALEPLVDLPIGINITRFQTLLALHRSYLTPGDSSSGWTAGAAAYYVGYLQPRTFLLKYNENGTITDAVDCALDPLSETKCTLKSFTVEKGIYQTSNFRVQPTESIVRFPNITNLCPFGEVFNATRFASVYAWNRKRISNCVADYSVLYNSASFSTFKCYGVSPTKLNDLCFTNVYADSFVIRGDEVRQIAPGQTGKIADYNYKLPDDFTGCVIAWNSNNLDSKVGGNYNYLYRLFRKSNLKPFERDISTEIYQAGSTPCNGVEGFNCYFPLQSYGFQPTNGVGYQPYRVVVLSFELLHAPATVCGPKKSTNLVKNKCVNFNFNGLTGTGVLTESNKKFLPFQQFGRDIADTTDAVRDPQTLEILDITPCSFGGVSVITPGTNTSNQVAVLYQGVNCTEVPVAIHADQLTPTWRVYSTGSNVFQTRAGCLIGAEHVNNSYECDIPIGAGICASYQTQTNSPRRARSVASQSIIAYTMSLGAENSVAYSNNSIAIPTNFTISVTTEILPVSMTKTSVDCTMYICGDSTECSNLLLQYGSFCTQLNRALTGIAVEQDKNTQEVFAQVKQIYKTPPIKDFGGFNFSQILPDPSKPSKRSFIEDLLFNKVTLADAGFIKQYGDCLGDIAARDLICAQKFNGLTVLPPLLTDEMIAQYTSALLAGTITSGWTFGAGAALQIPFAMQMAYRFNGIGVTQNVLYENQKLIANQFNSAIGKIQYSLSSTASALGKLQDVVNQNAQALNTLVKQLSSNFGAISSVLNDILSRLDPPEAEVQIDRLITGRLQSLQTYVTQQLIRAAEIRASANLAATKMSECVLGQSKRVDFCGKGYHLMSFPQSAPHGVVFLHVTYVFAQEKNFTTAPAICHDGKAHFPREGVFVSNGTHWFVTQRNFYEPQIITTDNTFVSGNCDVVIGIVNNTVYDPLQPELDS

SEQ ID NO: 2865 - protein, 1147 aa, Artificial Sequence; identical to SEQ ID NO: 2828
  SARS-CoV-2/Portugal/PT0034/2020__EPI_ISL_418019 spike protein (1-1147)(K986P_V987P_P1069F)

SEQ ID NO: 2866 - protein, 1147 aa, Artificial Sequence; identical to SEQ ID NO: 2820
  SARS-CoV-2/Iceland/202/2020__EPI_ISL_417750 spike protein (1-1147)(K986P_V987P_P1069F)

SEQ ID NO: 2867 - protein, 1147 aa, Artificial Sequence
  SARS-CoV-2/USA/WA-UW261/2020__EPI_ISL_418046 spike protein (1-1147)(K986P_V987P_P1069F)
MFVFLVLLPLVSSQCVNLTTRTQLPPAYTNSFTRGVYYPDKVFRSSVLHSTQDLFLPFFSNVTWFHAIHVSGTNGTKRFDNPVLPFNDGVYFASTEKSNIIRGWIFGTTLDSKTQSLLIVNNATNVVIKVCEFQFCNDPFLGVYYHKNNKSWMESEFRVYSSANNCTFEYVSQPFLMDLEGKQGNFKNLREFVFKNIDGYFKIYSKHTPINLVRDLPQGFSALEPLVDLPIGINITRFQTLLALHRSYLTPGDSSSGWTAGAAAYYVGYLQPRTFLLKYNENGTITDAVDCALDPLSETKCTLKSFTVEKGIYQTSNFRVQPTESIVRFPNITNLCPFGEVFNATRFTSVYAWNRKRISNCVADYSVLYNSASFSTFKCYGVSPTKLNDLCFTNVYADSFVIRGDEVRQIAPGQTGKIADYNYKLPDDFTGCVIAWNSNNLDSKVGGNYNYLYRLFRKSNLKPFERDISTEIYQAGSTPCNGVEGFNCYFPLQSYGFQPTNGVGYQPYRVVVLSFELLHAPATVCGPKKSTNLVKNKCVNFNFNGLTGTGVLTESNKKFLPFQQFGRDIADTTDAVRDPQTLEILDITPCSFGGVSVITPGTNTSNQVAVLYQDVNCTEVPVAIHADQLTPTWRVYSTGSNVFQTRAGCLIGAEHVNNSYECDIPIGAGICASYQTQTNSPRRARSVASQSIIAYTMSLGAENSVAYSNNSIAIPTNFTISVTTEILPVSMTKTSVDCTMYICGDSTECSNLLLQYGSFCTQLNRALTGIAVEQDKNTQEVFAQVKQIYKTPPIKDFGGFNFSQILPDPSKPSKRSFIEDLLFNKVTLADAGFIKQYGDCLGDIAARDLICAQKFNGLTVLPPLLTDEMIAQYTSALLAGTITSGWTFGAGAALQIPFAMQMAYRFNGIGVTQNVLYENQKLIANQFNSAIGKIQDSLSSTASALGKLQDVVNQNAQALNTLVKQLSSNFGAISSVLNDILSRLDPPEAEVQIDRLITGRLQSLQTYVTQQLIRAAEIRASANLAATKMSECVLGQSKRVDFCGKGYHLMSFPQSAPHGVVFLHVTYVFAQEKNFTTAPAICHDGKAHFPREGVFVSNGTHWFVTQRNFYEPQIITTDNTFVSGNCDVVIGIVNNTVYDPLQPELDS

SEQ ID NO: 2868 - protein, 1147 aa, Artificial Sequence
  SARS-CoV-2/Portugal/PT0035/2020__EPI_ISL_418020 spike protein (1-1147)(K986P_V987P_P1069F)
MFVFLVLLPLVSSQCVNLTTRTQLPPAYTNSFTRGVYYPDKVFRSSVLHSTQDLFLPFFSNVTWFHAIHVSGTNGTKRFDNPVLPFNDGVYFASTEKSNIIRGWIFGTTLDSKTQSLLIVNNATNVVIKVCEFQFCNDPFLGVYYHKNNKSWMESEFRVYSSANNCTFEYVSQPFLMDLEGKQGNFKNLREFVFKNIDGYFKIYSKHTPINLVRDLPQGFSALEPLVDLPIGINITRFQTLLALHRSYLTPGDSSSGWTAGAAAYYVGYLQPRTFLLKYNENGTITDAVDCALDPLSETKCTLKSFTVEKGIYQTSNFRVQPTESIVRFPNITNLCPFGEVFNATRFASVYAWNRKRISNCVADYSVLYNSASFSTFKCYGVSPTKLNDLCFTNVYADSFVIRGDEVRQIAPGQTGKIADYNYKLPDDFTGCVIAWNSNNLDSKVGGNYNYLYRLFRKSNLKPFERDISTEIYQAGSTPCNGVEGFNCYFPLQSYGFQPTNGVGYQPYRVVVLSFELLHAPATVCGPKKSTNLVKNKCVNFNFNGLTGTGVLTESNKKFLPFQQFGRDIADTTDAVRDPQTLEILDITPCSFGGVSVITPGTNTSNQVAVLYQDVNCTEVPVAIHADQLTPTWRVYSTGSNVFQTRAGCLIGAEHVNNSYECDIPIGAGICASYQTQTNSPRRARSVASQSIIAYTMSLGAENSVAYSNNSIAIPTNFTISVTTEILPVSMTKTSVDCTMYICGDSTECSNLLLQYGSFCTQLNRALTGIAVEQDKNTQEVFAQVKQIYKTPPIKDFGGFNFSQILPDPSKPSKRSFIEDLLFNKVTLADAGFIKQYGDCLGDISARDLICAQKFNGLTVLPPLLTDEMIAQYTSALLAGTITSGWTFGAGAALQIPFAMQMAYRFNGIGVTQNVLYENQKLIANQFNSAIGKIQDSLSSTASALGKLQDVVNQNAQALNTLVKQLSSNFGAISSVLNDILSRLDPPEAEVQIDRLITGRLQSLQTYVTQQLIRAAEIRASANLAATKMSECVLGQSKRVDFCGKGYHLMSFPQSAPHGVVFLHVTYVFAQEKNFTTAPAICHDGKAHFPREGVFVSNGTHWFVTQRNFYEPQIITTDNTFVSGNCDVVIGIVNNTVYDPLQPELDS

SEQ ID NO: 2869 - protein, 1147 aa, Artificial Sequence
  SARS-CoV-2/USA/NY-NYUMC7/2020__EPI_ISL_418192 spike protein (1-1147)(K986P_V987P_P1069F)
MFVFLVLLPLVSSQCVNLTTRTQLPPAYTNSFTRGVYYPDKVFRSSVLHSTQDLFLPFFSNVTWFHAIHVSGTNGTKRFDNPVLPFNDGVYFASTEKSNIIRGWIFGTTLDSKTQSLLIVNNATNVVIKVCEFQFCNDPFLGVYHHKNNKSWMESEFRVYSSANNCTFEYVSQPFLMDLEGKQGNFKNLREFVFKNIDGYFKIYSKHTPINLVRDLPQGFSALEPLVDLPIGINITRFQTLLALHRSYLTPGDSSSGWTAGAAAYYVGYLQPRTFLLKYNENGTITDAVDCALDPLSETKCTLKSFTVEKGIYQTSNFRVQPTESIVRFPNITNLCPFGEVFNATRFASVYAWNRKRISNCVADYSVLYNSASFSTFKCYGVSPTKLNDLCFTNVYADSFVIRGDEVRQIAPGQTGKIADYNYKLPDDFTGCVIAWNSNNLDSKVGGNYNYLYRLFRKSNLKPFERDISTEIYQAGSTPCNGVEGFNCYFPLQSYGFQPTNGVGYQPYRVVVLSFELLHAPATVCGPKKSTNLVKNKCVNFNFNGLTGTGVLTESNKKFLPFQQFGRDIADTTDAVRDPQTLEILDITPCSFGGVSVITPGTNTSNQVAVLYQGVNCTEVPVAIHADQLTPTWRVYSTGSNVFQTRAGCLIGAEHVNNSYECDIPIGAGICASYQTQTNSPRRARSVASQSIIAYTMSLGAENSVAYSNNSIAIPTNFTISVTTEILPVSMTKTSVDCTMYICGDSTECSNLLLQYGSFCTQLNRALTGIAVEQDKNTQEVFAQVKQIYKTPPIKDFGGFNFSQILPDPSKPSKRSFIEDLLFNKVTLADAGFIKQYGDCLGDIAARDLICAQKFNGLTVLPPLLTDEMIAQYTSALLAGTITSGWTFGAGAALQIPFAMQMAYRFNGIGVTQNVLYENQKLIANQFNSAIGKIQDSLSSTASALGKLQDVVNQNAQALNTLVKQLSSNFGAISSVLNDILSRLDPPEAEVQIDRLITGRLQSLQTYVTQQLIRAAEIRASANLAATKMSECVLGQSKRVDFCGKGYHLMSFPQSAPHGVVFLHVTYVFAQEKNFTTAPAICHDGKAHFPREGVFVSNGTHWFVTQRNFYEPQIITTDNTFVSGNCDVVIGIVNNTVYDPLQPELDS

SEQ ID NO: 2870 - protein, 1147 aa, Artificial Sequence
  SARS-CoV-2/Iceland/189/2020__EPI_ISL_417709 spike protein (1-1147)(K986P_V987P_P1069F)
MFVFLVLLPLVSSQCVNLTTRTQLPPAYTNSFTRGVYYPDKVFRSSVLHSTQDLFLPFFSNVTWFHAIHVSGTNGTKRFDNPVLPFNDGVYFASTEKSNIIRGWIFGTTLDSKTQSLLIVNNATNVVIKVCEFQFCNDPFLGVYYHKNNKSWMESEFRVYSSANNCTFEYVSQPFLMDLEGKQGNFKNLREFVFKNIDGYFKIYSKHTPINLVRDLPQGFSALEPLVDLPIGINITRFQTLLALHRSYLTPGDSSSGWTAGAAAYYVGYLQPRTFLLKYNENGTITDAVDCALDPLSETKCTLKSFTVEKGIYQTSNFRVQPTESIVRFPNITNLCPFGEVFNATRFASVYAWNRKRISNCVADYSVLYNSASFSTFKCYGVSPTKLNDLCFTNVYADSFVIRGDEVRQIAPGQTGKIADYNYKLPDDFTGCVIAWNSNNLDSKVGGNYNYLYRLFRKSNLKPFERDISTEIYQAGSTPCNGVEGFNCYFPLQSYGFQPTNGVGYQPYRVVVLSFELLHAPATVCGPKKSTNLVKNKCVNFNFNGLTGTGVLTESNKKFLPFQQFGRDIADTTDAVRDPQTLEILDITPCSFGGVSVITPGTNTSNQVAVLYQGVNCTEVPVAIHADQLTPTWRVYSTGSNVFQTRAGCLIGAEHVNNSYECDIPIGAGICASYQTQTNSPRRARSVASQSIIAYTMSLGAENSVAYSNNSIAIPTNFTISVTTEILPVSMTKTSVDCTMYICGDSTECSNLLLQYGSFCTQLNRALTGIAVEQDKNTQEVFAQVKQIYKTPPIKDFGGFNFSQILPDPSKPSKRSFIEDLLFNKVTLADAGFTKQYGDCLGDIAARDLICAQKFNGLTVLPPLLTDEMIAQYTSALLAGTITSGWTFGAGAALQIPFAMQMAYRFNGIGVTQNVLYENQKLIANQFNSAIGKIQDSLSSTASALGKLQDVVNQNAQALNTLVKQLSSNFGAISSVLNDILSRLDPPEAEVQIDRLITGRLQSLQTYVTQQLIRAAEIRASANLAATKMSECVLGQSKRVDFCGKGYHLMSFPQSAPHGVVFLHVTYVFAQEKNFTTAPAICHDGKAHFPREGVFVSNGTHWFVTQRNFYEPQIITTDNTFVSGNCDVVIGIVNNTVYDPLQPELDS

SEQ ID NO: 2871 - protein, 1147 aa, Artificial Sequence
  SARS-CoV-2/Australia/NSW56/2020__EPI_ISL_417408 spike protein (1-1147)(K986P_V987P_P1069F)
MFVFLVLLPLVSSQCVNLTTRTQLPPAYTNSFTRGVYYPDKVFRSSVLHSTQDLFLPFFSNVTWFHAIHVSGTNGTKRFDNPVLPFNDGVYFASTEKSNIIRGWIFGTTLDSKTQSLLIVNNATNVVIKVCEFQFCNDPFLGVYYHKNNKSWMESEFRVYSSANNCTFEYVSQPFLMDLEGKQGNFKNLREFVFKNIDGYFKIYSKHTPINLVRDLPQGFSALEPLVDLPIGINITRFQTLLALHRSYLTPGDSSSGWTAGAAAYYVGYLQPRTFLLKYNENGTITDAVDCALDPLSETKCTLKSFTVEKGIYQTSNFRVQPTESIVRFPNITNLCPFGEVFNATRFASVYAWNRKRISNCVADYSVLYNSASFSTFKCYGVSPTKLNDLCFTNVYADSFVIRGDEVRQIAPGQTGKIADYNYKLPDDFTGCVIAWNSNNLDSKVGGNYNYLYRLFRKSNLKPFERDISTEIYQAGSTPCNGVEGFNCYFPLQSYGFQPTNGVGYQPYRVVVLSFELLHAPATVCGPKKSTNLVKNKCVNFNFNGLTGTGVLTESNKKFLPFQQFGRDIADTTDAVRDPQTLEILDITPCSFGGVSVITPGTNTSNQVAVLYQDVNCTEVPVAIHADQLTPTWRVYSTGSNVFQTRAGCLIGAEHVNNSYECDIPIGAGICASYQTQTNSPRRARSVASQSIIAYTMSLGAENSVAYSNNSIAIPTNFTISVTTEILPVSMTKTSVDCTMYICGDSTECSNLLLQYGSFCTQLNRALTGIAVEQDKNTQEVFAQVKQIYKTPPIKDFGGFNFSQILPDSSKPSKRSFIEDLLFNKVTLADAGFIKQYGDCLGDIAARDLICAQKFNGLTVLPPLLTDEMIAQYTSALLAGTITSGWTFGAGAALQIPFAMQMAYRFNGIGVTQNVLYENQKLIANQFNSAIGKIQDSLSSTASALGKLQDVVNQNAQALNTLVKQLSSNFGAISSVLNDILSRLDPPEAEVQIDRLITGRLQSLQTYVTQQLIRAAEIRASANLAATKMSECVLGQSKRVDFCGKGYHLMSFPQSAPHGVVFLHVTYVFAQEKNFTTAPAICHDGKAHFPREGVFVSNGTHWFVTQRNFYEPQIITTDNTFVSGNCDVVIGIVNNTVYDPLQPELDS

SEQ ID NO: 2872 - protein, 1147 aa, Artificial Sequence
  SARS-CoV-2/Iceland/280/2020__EPI_ISL_417608 spike protein (1-1147)(K986P_V987P_P1069F)
MFVFLVLLPLVSSQCVNLTTRTQLPPAYTNSFTRGVYYPDKVFRSSVLHSTQDLFLPFFSNVTWFHAIHVSGTNGTKRFDNPVLPFNDGVYFASTEKSNIIRGWIFGTTLDSKTQSLLIVNNATNVVIKVCEFQFCNDPFLGVYYHKNNKSWMESEFRVYSSANNCTFEYVSQPFLMDLEGKQGNFKNLREFVFKNIDGYFKIYSKHTPINLVRDLPQGFSALEPLVDLPIGINITRFQTLLALHRSYLTPGDSSSGWTAGAAAYYVGYLQPRTFLLKYNENGTITDAVDCALDPLSETKCTLKSFTVEKGIYQTSNFRVQPTESIVRFPNITNLCPFGEVFNATRFASVYAWNRKRISNCVADYSVLYNSASFSTFKCYGVSPTKLNDLCFTNVYADSFVIRGDEVRQIAPGQTGKIADYNYKLPDDFTGCVIAWNSNNLDSKVGGNYNYLYRLFRKSNLKPFERDISTEIYQAGSTPCNGVEGFNCYFPLQSYGFQPTNGVGYQPYRVVVLSFELLHAPATVCGPKKSTNLVKNKCVNFNFNGLTGTGVLTESNKKFLPFQQFGRDIADTTDAVRDPQTLEILDITPCSFGGVSVITPGTNTSNQVAVLYQGVNCTEVPVAIHADQLTPTWRVYSTGSNVFQTRAGCLIGAEHVNNSYECDIPIGAGICASYHTQTNSPRRARSVASQSIIAYTMSLGAENSVAYSNNSIAIPTNFTISVTTEILPVSMTKTSVDCTMYICGDSTECSNLLLQYGSFCTQLNRALTGIAVEQDKNTQEVFAQVKQIYKTPPIKDFGGFNFSQILPDPSKPSKRSFIEDLLFNKVTLADAGFIKQYGDCLGDIAARDLICAQKFNGLTVLPPLLTDEMIAQYTSALLAGTITSGWTFGAGAALQIPFAMQMAYRFNGIGVTQNVLYENQKLIANQFNSAIGKIQDSLSSTASALGKLQDVVNQNAQALNTLVKQLSSNFGAISSVLNDILSRLDPPEAEVQIDRLITGRLQSLQTYVTQQLIRAAEIRASANLAATKMSECVLGQSKRVDFCGKGYHLMSFPQSAPHGVVFLHVTYVFAQEKNFTTAPAICHDGKAHFPREGVFVSNGTHWFVTQRNFYEPQIITTDNTFVSGNCDVVIGIVNNTVYDPLQPELDS

SEQ ID NO: 2873 - protein, 1147 aa, Artificial Sequence; identical to SEQ ID NO: 2828
  SARS-CoV-2/Iceland/247/2020__EPI_ISL_417575 spike protein (1-1147)(K986P_V987P_P1069F)

SEQ ID NO: 2874 - protein, 1147 aa, Artificial Sequence
  SARS-CoV-2/Iceland/238/2020__EPI_ISL_417566 spike protein (1-1147)(K986P_V987P_P1069F)
MFVFLVLLPLVSSQCVNLTTRTQLPPAYTNSFTRGVYYPDKVFRSSVLHSTQDLFLPFFSNVTWFHAIHVSGTNGTKRFDNPVLPFNDGVYFASTEKSNIIRGWIFGTTLDSKTQSLLIVNNATNVVIKVCEFQFCNDPFLGVYYHKNNKSWMESEFRVYSSANNCTFEYVSQPFLMDLEGKQGNFKNLREFVFKNIDGYFKIYSKHTPINLVRDLPQGFSALEPLVDLPIGINITRFQTLLALHRSYLTPGDSSSGWTAGAAAYYVGYLQPRTFLLKYNENGTITDAVDCALDPLSETKCTLKSFTVEKGIYQTSNFRVQPTESIVRFPNITNLCPFGEVFNATRFASVYAWNRKRISNCVADYSVLYNSASFSTFKCYGVSPTKLNDLCFTNVYADSFVIRGDEVRQIAPGQTGKIADYNYKLPDDFTGCVIAWNSNNLDSKVGGNYNYLYRLFRKSNLKPFERDISTEIYQAGSTPCNGVEGFNCYFPLQSYGFQPTNGVGYQPYRVVVLSFELLHAPATVCGPKKSTNLVKNKCVNFNFNGLTGTGVLTESNKKFLPFQQFGRDIADTTDAVRDPQTLEILDITPCSFGGVSVITPGTNTSNQVAVLYQGVNCTEVPVAIHADQLTPTWRVYSTGSNVFQTRAGCLIGAEHVNNSYECDIPIGAGICASYQTQTNSPRRARSVASQSIIAYTMSLGAENSVAYSNNSIAIPTNFTISVTTEILPVSMTKTSVDCTMYICGDSTECSNLLLQYGSFCTQLNRALTGIAVEQDKNTQEVFAQVKQIYKTPPIKDFGGFNFSQILPDPSKPSKRSFIEDLLFNKVTLADVGFIKQYGDCLGDIAARDLICAQKFNGLTVLPPLLTDEMIAQYTSALLAGTITSGWTFGAGAALQIPFAMQMAYRFNGIGVTQNVLYENQKLIANQFNSAIGKIQDSLSSTASALGKLQDVVNQNAQALNTLVKQLSSNFGAISSVLNDILSRLDPPEAEVQIDRLITGRLQSLQTYVTQQLIRAAEIRASANLAATKMSECVLGQSKRVDFCGKGYHLMSFPQSAPHGVVFLHVTYVFAQEKNFTTAPAICHDGKAHFPREGVFVSNGTHWFVTQRNFYEPQIITTDNTFVSGNCDVVIGIVNNTVYDPLQPELDS

SEQ ID NO: 2875 - protein, 1147 aa, Artificial Sequence
  SARS-CoV-2/Greece/16/2020__EPI_ISL_418265 spike protein (1-1147)(K986P_V987P_P1069F)
MFVFLVLLPLVSSQCVNLTTRTQLPPAYTNSFTRGVYYPDKVFRSSVLHSTQDLFLPFFSNVTWFHAIHVSGTNGTKRFDNPVLPFNDGVYFASTEKSNIIRGWIFGTTLDSKTQSLLIVNNATNVVIKVCEFQFCNDPFLGVYYHKNNKSWMESEFRVYSSANNCTFEYVSQPFLMDLEGKQGNFKNLREFVFKNVDGYFKIYSKHTPINLVRDLPQGFSALEPLVDLPIGINITRFQTLLALHRSYLTPGDSSSGWTAGAAAYYVGYLQPRTFLLKYNENGTITDAVDCALDPLSETKCTLKSFTVEKGIYQTSNFRVQPTESIVRFPNITNLCPFGEVFNATRFASVYAWNRKRISNCVADYSVLYNSASFSTFKCYGVSPTKLNDLCFTNVYADSFVIRGDEVRQIAPGQTGKIADYNYKLPDDFTGCVIAWNSNNLDSKVGGNYNYLYRLFRKSNLKPFERDISTEIYQAGSTPCNGVEGFNCYFPLQSYGFQPTNGVGYQPYRVVVLSFELLHAPATVCGPKKSTNLVKNKCVNFNFNGLTGTGVLTESNKKFLPFQQFGRDIADTTDAVRDPQTLEILDITPCSFGGVSVITPGTNTSNQVAVLYQDVNCTEVPVAIHADQLTPTWRVYSTGSNVFQTRAGCLIGAEHVNNSYECDIPIGAGICASYQTQTNSPRRARSVASQSIIAYTMSLGAENSVAYSNNSIAIPTNFTISVTTEILPVSMTKTSVDCTMYICGDSTECSNLLLQYGSFCTQLNRALTGIAVEQDKNTQEVFAQVKQIYKTPPIKDFGGFNFSQILPDPSKPSKRSFIEDLLFNKVTLADAGFIKQYGDCLGDIAARDLICAQKFNGLTVLPPLLTDEMIAQYTSALLAGTITSGWTFGAGAALQIPFAMQMAYRFNGIGVTQNVLYENQKLIANQFNSAIGKIQDSLSSTASALGKLQDVVNQNAQALNTLVKQLSSNFGAISSVLNDILSRLDPPEAEVQIDRLITGRLQSLQTYVTQQLIRAAEIRASANLAATKMSECVLGQSKRVDFCGKGYHLMSFPQSAPHGVVFLHVTYVFAQEKNFTTAPAICHDGKAHFPREGVFVSNGTHWFVTQRNFYEPQIITTDNTFVSGNCDVVIGIVNNTVYDPLQPELDS

SEQ ID NO: 2876 - protein, 1147 aa, Artificial Sequence
  SARS-CoV-2/Iceland/319/2020__EPI_ISL_417648 spike protein (1-1147)(K986P_V987P_P1069F)
MFVFLVLLPLVSSQCVNLTTRTQLPPAYTNSFTRGVYYPDKVFRSSVLHSTQDLFLPFFSNVTWFHAIHVSGTNGTKRFDNPVLPFNDGVYFASTEKSNIIRGWIFGTTLDSKTQSLLIVNNATNVVIKVCEFQFCNDPFLGVYYHKNNKSWMESEFRVYSSANNCTFEYVSQPFLIDLEGKQGNFKNLREFVFKNIDGYFKIYSKHTPINLVRDLPQGFSALEPLVDLPIGINITRFQTLLALHRSYLTPGDSSSGWTAGAAAYYVGYLQPRTFLLKYNENGTITDAVDCALDPLSETKCTLKSFTVEKGIYQTSNFRVQPTESIVRFPNITNLCPFGEVFNATRFASVYAWNRKRISNCVADYSVLYNSASFSTFKCYGVSPTKLNDLCFTNVYADSFVIRGDEVRQIAPGQTGKIADYNYKLPDDFTGCVIAWNSNNLDSKVGGNYNYLYRLFRKSNLKPFERDISTEIYQAGSTPCNGVEGFNCYFPLQSYGFQPTNGVGYQPYRVVVLSFELLHAPATVCGPKKSTNLVKNKCVNFNFNGLTGTGVLTESNKKFLPFQQFGRDIADTTDAVRDPQTLEILDITPCSFGGVSVITPGTNTSNQVAVLYQGVNCTEVPVAIHADQLTPTWRVYSTGSNVFQTRAGCLIGAEHVNNSYECDIPIGAGICASYQTQTNSPRRARSVASQSIIAYTMSLGAENSVAYSNNSIAIPTNFTISVTTEILPVSMTKTSVDCTMYICGDSTECSNLLLQYGSFCTQLNRALTGIAVEQDKNTQEVFAQVKQIYKTPPIKDFGGFNFSQILPDPSKPSKRSFIEDLLFNKVTLADAGFIKQYGDCLGDIAARDLICAQKFNGLTVLPPLLTDEMIAQYTSALLAGTITSGWTFGAGAALQIPFAMQMAYRFNGIGVTQNVLYENQKLIANQFNSAIGKIQDSLSSTASALGKLQDVVNQNAQALNTLVKQLSSNFGAISSVLNDILSRLDPPEAEVQIDRLITGRLQSLQTYVTQQLIRAAEIRASANLAATKMSECVLGQSKRVDFCGKGYHLMSFPQSAPHGVVFLHVTYVFAQEKNFTTAPAICHDGKAHFPREGVFVSNGTHWFVTQRNFYEPQIITTDNTFVSGNCDVVIGIVNNTVYDPLQPELDS

SEQ ID NO: 2877 - protein, 1147 aa, Artificial Sequence
  SARS-CoV-2/Congo/94/2020__EPI_ISL_417947 spike protein (1-1147)(K986P_V987P_P1069F)
MFVFLVLLPLVSSQCVNLTTRTQLPPAYTNSFTRGVYYPDKVFRSSVLHSTQDLFLPFFSNVTWFHAIHVSGTNGTKRFDNPVLPFNDGVYFASTEKSNIIRGWIFGTTLDSKTQSLLIVNNATNVVIKVCEFQFCNDPFLGVYYHKNNKSWMESEFRVYSSANNCTFEYVSQPFLMDLEGKQGNFKNLREFVFKNIDGYFKIYSKHTPINLVRDLPQGFSALEPLVDLPIGINITRFQTLLALHRSYLTPGDSSSGWTAGAAAYYVGYLQPRTFLLKYNENGTITDAVDCALDPLSETKCTLKSFTVEKGIYQTSNFRVQPTESIVRFPNITNLCPFGEVFNATRFASVYAWNRKRISNCVADYSVLYNSASFSTFKCYGVSPTKLNDLCFTNVYADSFVIRGDEVRQIAPGQTGKIADYNYKLPDDFTGCVIAWNSNNLDSKVGGNYNYLYRLFRKSNLKPFERDISTEIYQAGSTPCNGVEGFNCYFPLQSYGFQPTNGVGYQPYRVVVLSFELLHAPATVCGPKKSTNLVKNKCVNFNFNGLTGTGVLTESNKKFLPFQQFGRDIADTTDAVRDPQTLEILDITPCSFGGVSVITPGTNTSNQVAVLYQGVNCTEVPVAIHADQLTPTWRVYSTGSNVFQTRAGCLIGAEHVNNSYECDIPIGAGICASYQTQTNSPRRARSVASQSIIAYTMSLGAENSVAYSNNSIAIPTNFTISVTTEILPVSMTKTSVDCTMYICGDSTECSNLLLQYGSFCTQLNRALTGIAVEQDKNTQEVFAQVKQIYKTPPIKDFGGFNFSQILPDPSKPSKRSFIEDILFNKVTLADAGFIKQYGDCLGDIAARDLICAQKFNGLTVLPPLLTDEMIAQYTSALLAGTITSGWTFGAGAALQIPFAMQMAYRFNGIGVTQNVLYENQKLIANQFNSAIGKIQDSLSSTASALGKLQDVVNQNAQALNTLVKQLSSNFGAISSVLNDILSRLDPPEAEVQIDRLITGRLQSLQTYVTQQLIRAAEIRASANLAATKMSECVLGQSKRVDFCGKGYHLMSFPQSAPHGVVFLHVTYVFAQEKNFTTAPAICHDGKAHFPREGVFVSNGTHWFVTQRNFYEPQIITTDNTFVSGNCDVVIGIVNNTVYDPLQPELDS

SEQ ID NO: 2878 - protein, 1147 aa, Artificial Sequence
  SARS-CoV-2/Congo/158/2020__EPI_ISL_417950 spike protein (1-1147)(K986P_V987P_P1069F)
MFVFLVLLPLVSSQCVNLTTRTQLPPAYTNSFTRGVYYPDKVFRSSVLHSTQDLFLPFFSNVTWFHAIHVSGTNGTKRFDNPVLPFNDGVYFASTEKSNIIRGWIFGTTLDSKTQSLLIVNNATNVVIKVCEFQFCNDPFLGVYYHKNNKSWMESEFRVYSSANNCTFEYVSQPFLMDLEGKQGNFKNLREFVFKNIDGYFKIYSKHTPINLVRDLPQGFSALEPLVDLPIGINITRFQTLLALHRSYLTPGDSSSGWTAGAAAYYVGYLQPRTFLLKYNENGTITDAVDCALDPLSETKCTLKSFTVEKGIYQTSNFRVQPTESIVRFPNITNLCPFGEVFNATRFASVYAWNRKRISNCVADYSVLYNSASFSTFKCYGVSPTKLNDLCFTNVYADSFVIRGDEVRQIAPGQTGKIADYNYKLPDDFTGCVIAWNSNNLDSKVGGNYNYLYRLFRKSNLKPFERDISTEIYQAGSTPCNGVEGFNCYFPLQSYGFQPTNGVGYQPYRVVVLSFELLHAPATVCGPKKSTNLVKNKCVNFNFNGLTGTGVLTESNKKFLPFQQFGRDIADTTDAVRDPQTLEILDITPCSFGGVSVITPGTNTSNQVAVLYQDVNCTEVPVAIHADQLTPTWRVYSTGSNVFQTRAGCLIGAEHVNNSYECDIPIGAGICASYQTQTNSPRRARSVASQSIIAYTMSLGAENSVAYSNNSIAIPTNFTISVTTEILPVSMTKTSVDCTMYICGDSTECSNLLLQYGSFCTQLNRALTGIAVEQDKNTQEVFAQVKQIYKTPPIKDFGGFNFSQILPDPSKPSKRSFIEDLLFNKVTLADAGFIKQYGDCLGDIAARDLICAQKFNGLTVLPPLLTDEMIAQYTSALLAGTITSGWTFGAGAALQIPFAMQMAYRFNGIGVTQNVLYENQKLIANQFNSAIGKIQDSLSSTASALGKLQDVVNQNAQALNTLVKQLSSNFGAISSVLNDILSRLDPPEAEVQIDRLITGRLQSLQTYVTQQLIRAAEIRASANLAATKMSECVLGQSKRVDFCGKGYHLMSFPQSAPHGVVFLHVTYVFAQEKNFTTAPAICHDGKAHFPREGVFVSNGTHWFVTQRNFYEPQIITTDNTFLSGNCDVVIGIVNNTVYDPLQPELDS

SEQ ID NO: 2879 - protein, 1147 aa, Artificial Sequence
  SARS-CoV-2/USA/UT-00034/2020__EPI_ISL_417977 spike protein (1-1147)(K986P_V987P_P1069F)
MFVFLVLLPLVSSQCVNLTTRTQLPPAYTNSFTRGVYYPDKVFRSSVLHSTQDLFLPFFSNVTWFHAIHVSGTNGTKRFDNPVLPFNDGVYFASTEKSNIIRGWIFGTTLDSKTQSLLIVNNATNVVIKVCEFQFCNDPFLGVYYYKNNKSWMESEFRVYSSANNCTFEYVSQPFLMDLEGKQGNFKNLREFVFKNIDGYFKIYSKHTPINLVRDLPQGFSALEPLVDLPIGINITRFQTLLALHRSYLTPGDSSSGWTAGAAAYYVGYLQPRTFLLKYNENGTITDAVDCALDPLSETKCTLKSFTVEKGIYQTSNFRVQPTESIVRFPNITNLCPFGEVFNATRFASVYAWNRKRISNCVADYSVLYNSASFSTFKCYGVSPTKLNDLCFTNVYADSFVIRGDEVRQIAPGQTGKIADYNYKLPDDFTGCVIAWNSNNLDSKVGGNYNYLYRLFRKSNLKPFERDISTEIYQAGSTPCNGVEGFNCYFPLQSYGFQPTNGVGYQPYRVVVLSFELLHAPATVCGPKKSTNLVKNKCVNFNFNGLTGTGVLTESNKKFLPFQQFGRDIADTTDAVRDPQTLEILDITPCSFGGVSVITPGTNTSNQVAVLYQGVNCTEVPVAIHADQLTPTWRVYSTGSNVFQTRAGCLIGAEHVNNSYECDIPIGAGICASYQTQTNSPRRARSVASQSIIAYTMSLGAENSVAYSNNSIAIPTNFTISVTTEILPVSMTKTSVDCTMYICGDSTECSNLLLQYGSFCTQLNRALTGIAVEQDKNTQEVFAQVKQIYKTPPIKDFGGFNFSQILPDPSKPSKRSFIEDLLFNKVTLADAGFIKQYGDCLGDIAARDLICAQKFNGLTVLPPLLTDEMIAQYTSALLAGTITSGWTFGAGAALQIPFAMQMAYRFNGIGVTQNVLYENQKLIANQFNSAIGKIQDSLSSTASALGKLQDVVNQNAQALNTLVKQLSSNFGAISSVLNDILSRLDPPEAEVQIDRLITGRLQSLQTYVTQQLIRAAEIRASANLAATKMSECVLGQSKRVDFCGKGYHLMSFPQSAPHGVVFLHVTYVFAQEKNFTTAPAICHDGKAHFPREGVFVSNGTHWFVTQRNFYEPQIITTDNTFVSGNCDVVIGIVNNTVYDPLQPELDS

SEQ ID NO: 2880 - protein, 1147 aa, Artificial Sequence
  SARS-CoV-2/USA/UT-00033/2020__EPI_ISL_417976 spike protein (1-1147)(K986P_V987P_P1069F)
MFVFLVLLPLVSSQCVNLTTRTQLPPAYTNSFTRGVYYPDKVFRSSVLHSTQDLFLPFFSNVTWFHAIHVSGTNGTKRFDNPVLPFNDGVYFASTEKSNIIRGWIFGTTLDSKTQSLLIVNNATNVVIKVCEFQFCNDPFLGVYYHKNNKSWMESEFRVYSSANNCTFEYVSQPFLMDLEGKQGNFKNLREFVFKNIDGYFKIYSKHTPINLVRDLPQGFSALEPLVDLPIGINITRFQTLLALHRSYLTPGDSSSGLTAGAAAYYVGYLQPRTFLLKYNENGTITDAVDCALDPLSETKCTLKSFTVEKGIYQTSNFRVQPTESIVRFPNITNLCPFGEVFNATRFASVYAWNRKRISNCVADYSVLYNSASFSTFKCYGVSPTKLNDLCFTNVYADSFVIRGDEVRQIAPGQTGKIADYNYKLPDDFTGCVIAWNSNNLDSKVGGNYNYLYRLFRKSNLKPFERDISTEIYQAGSTPCNGVEGFNCYFPLQSYGFQPTNGVGYQPYRVVVLSFELLHAPATVCGPKKSTNLVKNKCVNFNFNGLTGTGVLTESNKKFLPFQQFGRDIADTTDAVRDPQTLEILDITPCSFGGVSVITPGTNTSNQVAVLYQGVNCTEVPVAIHADQLTPTWRVYSTGSNVFQTRAGCLIGAEHVNNSYECDIPIGAGICASYQTQTNSPRRARSVASQSIIAYTMSLGAENSVAYSNNSIAIPTNFTISVTTEILPVSMTKTSVDCTMYICGDSTECSNLLLQYGSFCTQLNRALTGIAVEQDKNTQEVFAQVKQIYKTPPIKDFGGFNFSQILPDPSKPSKRSFIEDLLFNKVTLADAGFIKQYGDCLGDIAARDLICAQKFNGLTVLPPLLTDEMIAQYTSALLAGTITSGWTFGAGAALQIPFAMQMAYRFNGIGVTQNVLYENQKLIANQFNSAIGKIQDSLSSTASALGKLQDVVNQNAQALNTLVKQLSSNFGAISSVLNDILSRLDPPEAEVQIDRLITGRLQSLQTYVTQQLIRAAEIRASANLAATKMSECVLGQSKRVDFCGKGYHLMSFPQSAPHGVVFLHVTYVFAQEKNFTTAPAICHDGKAHFPREGVFVSNGTHWFVTQRNFYEPQIITTDNTFVSGNCDVVIGIVNNTVYDPLQPELDS

SEQ ID NO: 2881 - protein, 1147 aa, Artificial Sequence
  SARS-CoV-2/USA/WI-13/2020__EPI_ISL_417516 spike protein (1-1147)(K986P_V987P_P1069F)
MFVFLVLLPLVSSQCVNLTTRTQLPPAYTNSFTRGVYYPDKVFRSSVLHSTQDLFLPFFSNVTWFHAIHVSGTNGTKRFDNPVLPFNDGVYFASTEKSNIIRGWIFGTTLDSKTQSLLIVNNATNVVIKVCEFQFCNDPFLGVYYHKNNKSWMESEFRVYSSANNCTFEYVSQPFLMDLEGKQGNFKNLREFVFKNIDGYFKIYSKHTPINLVRDLPQGFSALEPLVDLPIGINITRFQTLLALHRSYLTPGDSSSGWTAGAAAYYVGYLQPRTFLLKYNENGTITDAVDCALDPLSETKCTLKSFTVEKGIYQTSNFRVLPTESIVRFPNITNLCPFGEVFNATRFASVYAWNRKRISNCVADYSVLYNSASFSTFKCYGVSPTKLNDLCFTNVYADSFVIRGDEVRQIAPGQTGKIADYNYKLPDDFTGCVIAWNSNNLDSKVGGNYNYLYRLFRKSNLKPFERDISTEIYQAGSTPCNGVEGFNCYFPLQSYGFQPTNGVGYQPYRVVVLSFELLHAPATVCGPKKSTNLVKNKCVNFNFNGLTGTGVLTESNKKFLPFQQFGRDIADTTDAVRDPQTLEILDITPCSFGGVSVITPGTNTSNQVAVLYQGVNCTEVPVAIHADQLTPTWRVYSTGSNVFQTRAGCLIGAEHVNNSYECDIPIGAGICASYQTQTNSPRRARSVASQSIIAYTMSLGAENSVAYSNNSIAIPTNFTISVTTEILPVSMTKTSVDCTMYICGDSTECSNLLLQYGSFCTQLNRALTGIAVEQDKNTQEVFAQVKQIYKTPPIKDFGGFNFSQILPDPSKPSKRSFIEDLLFNKVTLADAGFIKQYGDCLGDIAARDLICAQKFNGLTVLPPLLTDEMIAQYTSALLAGTITSGWTFGAGAALQIPFAMQMAYRFNGIGVTQNVLYENQKLIANQFNSAIGKIQDSLSSTASALGKLQDVVNQNAQALNTLVKQLSSNFGAISSVLNDILSRLDPPEAEVQIDRLITGRLQSLQTYVTQQLIRAAEIRASANLAATKMSECVLGQSKRVDFCGKGYHLMSFPQSAPHGVVFLHVTYVFAQEKNFTTAPAICHDGKAHFPREGVFVSNGTHWFVTQRNFYEPQIITTDNTFVSGNCDVVIGIVNNTVYDPLQPELDS

SEQ ID NO: 2882 - protein, 1146 aa, Artificial Sequence
  SARS-CoV-2/India/1-27/2020__EPI_ISL_413522 spike protein (1-1146)(K985P_V986P_P1068F)
MFVFLVLLPLVSSQCVNLTTRTQLPPAYTNSFTRGVYYPDKVFRSSVLHSTQDLFLPFFSNVTWFHAIHVSGTNGTKRFDNPVLPFNDGVYFASTEKSNIIRGWIFGTTLDSKTQSLLIVNNATNVVIKVCEFQFCNDPFLGVYHKNNKSWMESEFRVYSSANNCTFEYVSQPFLMDLEGKQGNFKNLREFVFKNIDGYFKIYSKHTPINLVRDLPQGFSALEPLVDLPIGINITRFQTLLALHRSYLTPGDSSSGWTAGAAAYYVGYLQPRTFLLKYNENGTITDAVDCALDPLSETKCTLKSFTVEKGIYQTSNFRVQPTESIVRFPNITNLCPFGEVFNATRFASVYAWNRKRISNCVADYSVLYNSASFSTFKCYGVSPTKLNDLCFTNVYADSFVIRGDEVIQIAPGQTGKIADYNYKLPDDFTGCVIAWNSNNLDSKVGGNYNYLYRLFRKSNLKPFERDISTEIYQAGSTPCNGVEGFNCYFPLQSYGFQPTNGVGYQPYRVVVLSFELLHAPATVCGPKKSTNLVKNKCVNFNFNGLTGTGVLTESNKKFLPFQQFGRDIADTTDAVRDPQTLEILDITPCSFGGVSVITPGTNTSNQVAVLYQDVNCTEVPVAIHADQLTPTWRVYSTGSNVFQTRAGCLIGAEHVNNSYECDIPIGAGICASYQTQTNSPRRARSVASQSIIAYTMSLGAENSVAYSNNSIAIPTNFTISVTTEILPVSMTKTSVDCTMYICGDSTECSNLLLQYGSFCTQLNRALTGIAVEQDKNTQEVFAQVKQIYKTPPIKDFGGFNFSQILPDPSKPSKRSFIEDLLFNKVTLADAGFIKQYGDCLGDIAARDLICAQKFNGLTVLPPLLTDEMIAQYTSALLAGTITSGWTFGAGAALQIPFAMQMAYRFNGIGVTQNVLYENQKLIANQFNSAIGKIQDSLSSTASALGKLQDVVNQNAQALNTLVKQLSSNFGAISSVLNDILSRLDPPEAEVQIDRLITGRLQSLQTYVTQQLIRAAEIRASANLAATKMSECVLGQSKRVDFCGKGYHLMSFPQSAPHGVVFLHVTYVFAQEKNFTTAPAICHDGKAHFPREGVFVSNGTHWFVTQRNFYEPQIITTDNTFVSGNCDVVIGIVNNTVYDPLQPELDS

SEQ ID NO: 2883 - protein, 1141 aa, Artificial Sequence
  SARS-CoV-2/pangolin/Guangxi/P4L/2017__EPI_ISL_410538 spike protein (1-1141)(K980P_V981P_P1063F)
MFVFLFVLPLVSSQCVNLTTRTGIPPGYTNSSTRGVYYPDKVFRSSILHLTQDLFLPFFSNVTWFNTINYQGGFKKFDNPVLPFNDGVYFASTEKSNIIRGWIFGTTLDARTQSLLIVNNATNVVIKVCEFQFCTDPFLGVYYHNNNKTWVENEFRVYSSANNCTFEYISQPFLMDLEGKQGNFKNLREFVFKNVDGYFKIYSKHTPIDLVRDLPRGFAALEPLVDLPIGINITRFQTLLALHRSYLTPGNLESGWTTGAAAYYVGYLQQRTFLLSYNQNGTITDAVDCSLDPLSETKCTLKSLTVEKGIYQTSNFRVQPTISIVRFPNITNLCPFGEVFNASKFASVYAWNRKRISNCVADYSVLYNSTSFSTFKCYGVSPTKLNDLCFTNVYADSFVVKGDEVRQIAPGQTGVIADYNYKLPDDFTGCVIAWNSVKQDALTGGNYGYLYRLFRKSKLKPFERDISTEIYQAGSTPCNGQVGLNCYYPLERYGFHPTTGVNYQPFRVVVLSFELLNGPATVCGPKLSTTLVKDKCVNFNFNGLTGTGVLTTSKKQFLPFQQFGRDISDTTDAVRDPQTLEILDITPCSFGGVSVITPGTNTSNQVAVLYQDVNCTEVPMAIHAEQLTPAWRVYSAGANVFQTRAGCLVGAEHVNNSYECDIPVGAGICASYHSMSSLRSVNQRSIIAYTMSLGAENSVAYSNNSIAIPTNFTISVTTEILPVSMTKTSVDCTMYICGDSIECSNLLLQYGSFCTQLNRALTGIAVEQDKNTQEVFAQVKQIYKTPPIKDFGGFNFSQILPDPSKPSKRSFIEDLLFNKVTLADAGFIKQYGDCLGDIAARDLICAQKFNGLTVLPPLLTDEMIAQYTSALLAGTITSGWTFGAGAALQIPFAMQMAYRFNGIGVTQNVLYENQKLIANQFNSAIGKIQDSLSSTASALGKLQDVVNQNAQALNTLVKQLSSNFGAISSVLNDILSRLDPPEAEVQIDRLITGRLQSLQTYVTQQLIRAAEIRASANLAATKMSECVLGQSKRVDFCGKGYHLMSFPQSAPHGVVFLHVTYVFAQEKNFTTAPAICHEGKAHFPREGVFVSNGTHWFITQRNFYEPQIITTDNTFVSGSCDVVIGIVNNTVYDPLQPELDS

SEQ ID NO: 2884 - protein, 1141 aa, Artificial Sequence
  SARS-CoV-2/pangolin/Guangxi/P5L/2017__EPI_ISL_410540 spike protein (1-1141)(K980P_V981P_P1063F)
MFVFLFVLPLVSSQCVNLTTRTGIPPGYTNSSTRGVYYPDKVFRSSILHLTQDLFLPFFSNVTWFNTINYQGGFKKFDNPVLPFNDGVYFASTEKSNIIRGWIFGTTLDARTQSLLIVNNATNVVIKVCEFQFCTDPFLGVYYHNNNKTWVENEFRVYSSANNCTFEYISQPFLMDLEGKQGNFKNLREFVFKNVDGYFKIYSKHTPIDLVRDLPRGFAALEPLVDLPIGINITRFQTLLALHRSYLTPGKLESGWTTGAAAYYVGYLQQRTFLLSYNQNGTITDAVDCSLDPLSETKCTLKSLTVEKGIYQTSNFRVQPTISIVRFPNITNLCPFGEVFNASKFASVYAWNRKRISNCVADYSVLYNSTSFSTFKCYGVSPTKLNDLCFTNVYADSFVVKGDEVRQIAPGQTGVIADYNYKLPDDFTGCVIAWNSVKQDALTGGNYGYLYRLFRKSKLKPFERDISTEIYQAGSTPCNGQVGLNCYYPLERYGFHPTTGVNYQPFRVVVLSFELLNGPATVCGPKLSTTLVKDKCVNFNFNGLTGTGVLTTSKKQFLPFQQFGRDISDTTDAVRDPQTLEILDITPCSFGGVSVITPGTNTSNQVAVLYQDVNCTEVPMAIHAEQLTPAWRVYSAGANVFQTRAGCLVGAEHVNNSYECDIPVGAGICASYHSMSSFRSVNQRSIIAYTMSLGAENSVAYSNNSIAIPTNFTISVTTEILPVSMTKTSVDCTMYICGDSIECSNLLLQYGSFCTQLNRALTGIAVEQDKNTQEVFAQVKQIYKTPPIKDFGGFNFSQILPDPSKPSKRSFIEDLLFNKVTLADAGFIKQYGDCLGDIAARDLICAQKFNGLTVLPPLLTDEMIAQYTSALLAGTITSGWTFGAGAALQIPFAMQMAYRFNGIGVTQNVLYENQKLIANQFNSAIGKIQDSLSSTASALGKLQDVVNQNAQALNTLVKQLSSNFGAISSVLNDILSRLDPPEAEVQIDRLITGRLQSLQTYVTQQLIRAAEIRASANLAATKMSECVLGQSKRVDFCGKGYHLMSFPQSAPHGVVFLHVTYVFAQEKNFTTAPAICHEGKAHFPREGVFVSNGTHWFITQRNFYEPQIITTDNTFVSGSCDVVIGIVNNTVYDPLQPELDS

SEQ ID NO: 2885 - protein, 1141 aa, Artificial Sequence
  SARS-CoV-2/pangolin/Guangxi/P5E/2017__EPI_ISL_410541 spike protein (1-1141)(K980P_V981P_P1063F)
MFVFLFVLPLVSSQCVNLTTRTGIPPGYTNSSTRGVYYPDKVFRSSILHLTQDLFLPFFSNVTWFNTITYQGGSKKFDNPVLPFNDGVYFASTEKSNIIRGWIFGTTLDARTQSLLIVNNATNVVIKVCEFQFCTDPFLGVYYHNNNKTWVENEFRVYSSANNCTFEYISQPFLMDLEGKQGNFKNLREFVFKNVDGYFKIYSKHTPIDLVRDLPRGFAALEPLVDLPIGINITRFQTLLALHRSYLTPGKLESGWTTGAAAYYVGYLQQRTFLLSYNQNGTITDAVDCSLDPLSETKCTLKSLTVEKGIYQTSNFRVQPTISIVRFPNITNLCPFGEVFNASKFASVYAWNRKRISNCVADYSVLYNSTSFSTFKCYGVSPTKLNDLCFTNVYADSFVVKGDEVRQIAPGQTGVIADYNYKLPDDFTGCVIAWNSVKQDALTGDNYGYLYRLFRKSKLKPFERDISTEIYQAGSTPCNGQVGLNCYYPLERYGFHPTTGVNYQPFRVVVLSFELLNGPATVCGPKLSTTLVKDKCVNFNFNGLTGTGVLTTSKKQFLPFQQFGRDISDTTDAVRDPQTLEILDITPCSFGGVSVITPGTNTSNQVAVLYQDVNCTEVPMAIHAEQLTPAWRVYSAGANVFQTRAGCLVGAEHVNNSYECDIPVGAGICASYHSMSSFRSVNQRSIIAYTMSLGAENSVAYSNNSIAIPTNFTISVTTEILPVSMTKTSVDCTMYICGDSIECSNLLLQYGSFCTQLNRALTGIAVEQDKNTQEVFAQVKQIYKTPPIKDFGGFNFSQILPDPSKPSKRSFIEDLLFNKVTLADAGFIKQYGDCLGDIAARDLICAQKFNGLTVLPPLLTDEMIAQYTSALLAGTITSGWTFGAGAALQIPFAMQMAYRFNGIGVTQNVLYENQKLIANQFNSAIGKIQDSLSSTASALGKLQDVVNQNAQALNTLVKQLSSNFGAISSVLNDILSRLDPPEAEVQIDRLITGRLQSLQTYVTQQLIRAAEIRASANLAATKMSECVLGQSKRVDFCGKGYHLMSFPQSAPHGVVFLHVTYVFAQEKNFTTAPAICHEGKAHFPREGVFVSNGTHWFITQRNFYEPQIITTDNTFVSGSCDVVIGIVNNTVYDPLQPELDS

SEQ ID NO: 2886 - protein, 1139 aa, Artificial Sequence
  SARS-CoV-2/pangolin/Guangxi/P1E/2017__EPI_ISL_410539 spike protein (1-1139)(K978P_V979P_P1061F)
MFVFLFVLPLVSSQCVNLTTRTGIQPGYTNSSTRGVYYPDKVFRSSILHLTQDLFLPFFSNVTWFNTINYQGGFKKFDNPVLPFNDGVYFASTEKSNIIRGWIFGTTLDARTQSLLIVNNATNVVIKVCEFQFCTDPFLGVYYHNNNKTWVENEFRVYSSANNCTFEYISQPFLMDLEGKQGNFKNLREFVFKNVDGYFKIYSKHTPIDLVRDLPRGFAALEPLVDLPIGINITRFQTLLALHRSYLTPGKLESGWTTGAAAYYVGYLQQRTFLLSYNQNGTITDAVDCSLDPLSETKCTLKSLTVEKGIYQTSNFRVQPTISIVRFPNITNLCPFGEVFNASKFASVYAWNRKRISNCVADYSVLYNSTSFSTFKCYGVSPTKLNDLCFTNVYADSFVVKGDEVRQIAPGQTGVIADYNYKLPDDFTGCVIAWNSVKQDALTGGNYLYRLFRKSKLKPFERDISTEIYQAGSTPCNGQVGLNCYYPLERYGFHPTTGVNYQPFRVVVLSFELLNGPATVCGPKLSTTLVKDKCVNFNFNGLTGTGVLTTSKKQFLPFQQFGRDISDTTDAVRDPQTLEILDITPCSFGGVSVITPGTNTSNQVAVLYQDVNCTEVPMAIHAEQLTPAWRVYSAGANVFQTRAGCLVGAEHVNNSYECDIPVGAGICASYHSMSSLRSVNQRSIIAYTMSLGAENSVAYSNNSIAIPTNFTISVTTEILPVSMTKTSVDCTMYICGDSIECSNLLLQYGSFCTQLNRALTGIAVEQDKNTQEVFAQVKQIYKTPPIKDFGGFNFSQILPDPSKPSKRSFIEDLLFNKVTLADAGFIKQYGDCLGDIAARDLICAQKFNGLTVLPPLLTDEMIAQYTSALLAGTITSGWTFGAGAALQIPFAMQMAYRFNGIGVTQNVLYENQKLIANQFNSAIGKIQDSLSSTASALGKLQDVVNQNAQALNTLVKQLSSNFGAISSVLNDILSRLDPPEAEVQIDRLITGRLQSLQTYVTQQLIRAAEIRASANLAATKMSECVLGQSKRVDFCGKGYHLMSFPQSAPHGVVFLHVTYVFAQEKNFTTAPAICHEGKAHFPREGVFVSNGTHWFITQRNFYEPQIITTDNTFVSGSCDVVIGIVNNTVYDPLQPELDS

SEQ ID NO: 2887 - protein, 1147 aa, Artificial Sequence
  SARS-CoV-2/Wuhan/WIV05/2019__EPI_ISL_402128 spike protein (1-1147)(K986P_V987P_ H1048Q_H1064N_ H1083N_H1101N)
MFVFLVLLPLVSSQCVNLTTRTQLPPAYTNSFTRGVYYPDKVFRSSVLHSTQDLFLPFFSNVTWFHAIHVSGTNGTKRFDNPVLPFNDGVYFASTEKSNIIRGWIFGTTLDSKTQSLLIVNNATNVVIKVCEFQFCNDPFLGVYYHKNNKSWMESEFRVYSSANNCTFEYVSQPFLMDLEGKQGNFKNLREFVFKNIDGYFKIYSKHTPINLVRDLPQGFSALEPLVDLPIGINITRFQTLLALHRSYLTPGDSSSGWTAGAAAYYVGYLQPRTFLLKYNENGTITDAVDCALDPLSETKCTLKSFTVEKGIYQTSNFRVQPTESIVRFPNITNLCPFGEVFNATRFASVYAWNRKRISNCVADYSVLYNSASFSTFKCYGVSPTKLNDLCFTNVYADSFVIRGDEVRQIAPGQTGKIADYNYKLPDDFTGCVIAWNSNNLDSKVGGNYNYLYRLFRKSNLKPFERDISTEIYQAGSTPCNGVEGFNCYFPLQSYGFQPTNGVGYQPYRVVVLSFELLHAPATVCGPKKSTNLVKNKCVNFNFNGLTGTGVLTESNKKFLPFQQFGRDIADTTDAVRDPQTLEILDITPCSFGGVSVITPGTNTSNQVAVLYQDVNCTEVPVAIHADQLTPTWRVYSTGSNVFQTRAGCLIGAEHVNNSYECDIPIGAGICASYQTQTNSPRRARSVASQSIIAYTMSLGAENSVAYSNNSIAIPTNFTISVTTEILPVSMTKTSVDCTMYICGDSTECSNLLLQYGSFCTQLNRALTGIAVEQDKNTQEVFAQVKQIYKTPPIKDFGGFNFSQILPDPSKPSKRSFIEDLLFNKVTLADAGFIKQYGDCLGDIAARDLICAQKFNGLTVLPPLLTDEMIAQYTSALLAGTITSGWTFGAGAALQIPFAMQMAYRFNGIGVTQNVLYENQKLIANQFNSAIGKIQDSLSSTASALGKLQDVVNQNAQALNTLVKQLSSNFGAISSVLNDILSRLDPPEAEVQIDRLITGRLQSLQTYVTQQLIRAAEIRASANLAATKMSECVLGQSKRVDFCGKGYQLMSFPQSAPHGVVFLNVTYVPAQEKNFTTAPAICNDGKAHFPREGVFVSNGTNWFVTQRNFYEPQIITTDNTFVSGNCDVVIGIVNNTVYDPLQPELDS

SEQ ID NO: 2888 - protein, 1143 aa, Artificial Sequence
  SARS-CoV-2/bat/Yunnan/RaTG13/2013__EPI_ISL_402131 spike protein (1-1143)(K982P_V983P_ H1044Q_H1060N_ H1079N_H1097N)
MFVFLVLLPLVSSQCVNLTTRTQLPPAYTNSSTRGVYYPDKVFRSSVLHLTQDLFLPFFSNVTWFHAIHVSGTNGIKRFDNPVLPFNDGVYFASTEKSNIIRGWIFGTTLDSKTQSLLIVNNATNVVIKVCEFQFCNDPFLGVYYHKNNKSWMESEFRVYSSANNCTFEYVSQPFLMDLEGKQGNFKNLREFVFKNIDGYFKIYSKHTPINLVRDLPPGFSALEPLVDLPIGINITRFQTLLALHRSYLTPGDSSSGWTAGAAAYYVGYLQPRTFLLKYNENGTITDAVDCALDPLSETKCTLKSFTVEKGIYQTSNFRVQPTDSIVRFPNITNLCPFGEVFNATTFASVYAWNRKRISNCVADYSVLYNSTSFSTFKCYGVSPTKLNDLCFTNVYADSFVITGDEVRQIAPGQTGKIADYNYKLPDDFTGCVIAWNSKHIDAKEGGNFNYLYRLFRKANLKPFERDISTEIYQAGSKPCNGQTGLNCYYPLYRYGFYPTDGVGHQPYRVVVLSFELLNAPATVCGPKKSTNLVKNKCVNFNFNGLTGTGVLTESNKKFLPFQQFGRDIADTTDAVRDPQTLEILDITPCSFGGVSVITPGTNASNQVAVLYQDVNCTEVPVAIHADQLTPTWRVYSTGSNVFQTRAGCLIGAEHVNNSYECDIPIGAGICASYQTQTNSRSVASQSIIAYTMSLGAENSVAYSNNSIAIPTNFTISVTTEILPVSMTKTSVDCTMYICGDSTECSNLLLQYGSFCTQLNRALTGIAVEQDKNTQEVFAQVKQIYKTPPIKDFGGFNFSQILPDPSKPSKRSFIEDLLFNKVTLADAGFIKQYGDCLGDIAARDLICAQKFNGLTVLPPLLTDEMIAQYTSALLAGTITSGWTFGAGAALQIPFAMQMAYRFNGIGVTQNVLYENQKLIANQFNSAIGKIQDSLSSTASALGKLQDVVNQNAQALNTLVKQLSSNFGAISSVLNDILSRLDPPEAEVQIDRLITGRLQSLQTYVTQQLIRAAEIRASANLAATKMSECVLGQSKRVDFCGKGYQLMSFPQSAPHGVVFLNVTYVPAQEKNFTTAPAICNDGKAHFPREGVFVSNGTNWFVTQRNFYEPQIITTDNTFVSGSCDVVIGIVNNTVYDPLQPELDS

SEQ ID NO: 2889 - protein, 1147 aa, Artificial Sequence
  SARS-CoV-2/Wuhan/HBCDC-HB-01/2019__EPI_ISL_402132 spike protein (1-1147)(K986P_V987P_ H1048Q_H1064N_ H1083N_H1101N)
MFVFLVLLPLVSSQCVNLTTRTQLPPAYTNSITRGVYYPDKVFRSSVLHSTQDLFLPFFSNVTWFHAIHVSGTNGTKRFDNPVLPFNDGVYFASTEKSNIIRGWIFGTTLDSKTQSLLIVNNATNVVIKVCEFQFCNDPFLGVYYHKNNKSWMESEFRVYSSANNCTFEYVSQPFLMDLEGKQGNFKNLREFVFKNIDGYFKIYSKHTPINLVRDLPQGFSALEPLVDLPIGINITRFQTLLALHRSYLTPGDSSSGWTAGAAAYYVGYLQPRTFLLKYNENGTITDAVDCALDPLSETKCTLKSFTVEKGIYQTSNFRVQPTESIVRFPNITNLCPFGEVFNATRFASVYAWNRKRISNCVADYSVLYNSASFSTFKCYGVSPTKLNDLCFTNVYADSFVIRGDEVRQIAPGQTGKIADYNYKLPDDFTGCVIAWNSNNLDSKVGGNYNYLYRLFRKSNLKPFERDISTEIYQAGSTPCNGVEGFNCYFPLQSYGFQPTNGVGYQPYRVVVLSFELLHAPATVCGPKKSTNLVKNKCVNFNFNGLTGTGVLTESNKKFLPFQQFGRDIADTTDAVRDPQTLEILDITPCSFGGVSVITPGTNTSNQVAVLYQDVNCTEVPVAIHADQLTPTWRVYSTGSNVFQTRAGCLIGAEHVNNSYECDIPIGAGICASYQTQTNSPRRARSVASQSIIAYTMSLGAENSVAYSNNSIAIPTNFTISVTTEILPVSMTKTSVDCTMYICGDSTECSNLLLQYGSFCTQLNRALTGIAVEQDKNTQEVFAQVKQIYKTPPIKDFGGFNFSQILPDPSKPSKRSFIEDLLFNKVTLADAGFIKQYGDCLGDIAARDLICAQKFNGLTVLPPLLTDEMIAQYTSALLAGTITSGWTFGAGAALQIPFAMQMAYRFNGIGVTQNVLYENQKLIANQFNSAIGKIQDSLSSTASALGKLQDVVNQNAQALNTLVKQLSSNFGAISSVLNDILSRLDPPEAEVQIDRLITGRLQSLQTYVTQQLIRAAEIRASANLAATKMSECVLGQSKRVDFCGKGYQLMSFPQSAPHGVVFLNVTYVPAQEKNFTTAPAICNDGKAHFPREGVFVSNGTNWFVTQRNFYEPQIITTDNTFVSGNCDVVIGIVNNTVYDPLQPELDS

SEQ ID NO: 2890 - protein, 1147 aa, Artificial Sequence
  SARS-CoV-2/Guangdong/20SF028/2020__EPI_ISL_403936 spike protein (1-1147)(K986P_V987P_ H1048Q_H1064N_ H1083N_H1101N)
MFVFLVLLPLVSSQCVNLTTRTQLPPAYTNSFTRGVYYPDKVFRSSVLYSTQDLFLPFFSNVTWFHAIHVSGTNGTKRFDNPVLPFNDGVYFASTEKSNIIRGWIFGTTLDSKTQSLLIVNNATNVVIKVCEFQFCNDPFLGVYYHKNNKSWMESEFRVYSSANNCTFEYVSQPFLMDLEGKQGNFKNLREFVFKNIDGYFKIYSKHTPINLVRDLPQGFSALEPLVDLPIGINITRFQTLLALHRSYLTPGDSSSGWTAGAAAYYVGYLQPRTFLLKYNENGTITDAVDCALDPLSETKCTLKSFTVEKGIYQTSNFRVQPTESIVRFPNITNLCPFGEVFNATRFASVYAWNRKRISNCVADYSVLYNSASFSTFKCYGVSPTKLNDLCFTNVYADSFVIRGDEVRQIAPGQTGKIADYNYKLPDDFTGCVIAWNSNNLDSKVGGNYNYLYRLFRKSNLKPFERDISTEIYQAGSTPCNGVEGFNCYFPLQSYGFQPTNGVGYQPYRVVVLSFELLHAPATVCGPKKSTNLVKNKCVNFNFNGLTGTGVLTESNKKFLPFQQFGRDIADTTDAVRDPQTLEILDITPCSFGGVSVITPGTNTSNQVAVLYQDVNCTEVPVAIHADQLTPTWRVYSTGSNVFQTRAGCLIGAEHVNNSYECDIPIGAGICASYQTQTNSPRRARSVASQSIIAYTMSLGAENSVAYSNNSIAIPTNFTISVTTEILPVSMTKTSVDCTMYICGDSTECSNLLLQYGSFCTQLNRALTGIAVEQDKNTQEVFAQVKQIYKTPPIKDFGGFNFSQILPDPSKPSKRSFIEDLLFNKVTLADAGFIKQYGDCLGDIAARDLICAQKFNGLTVLPPLLTDEMIAQYTSALLAGTITSGWTFGAGAALQIPFAMQMAYRFNGIGVTQNVLYENQKLIANQFNSAIGKIQDSLSSTASALGKLQDVVNQNAQALNTLVKQLSSNFGAISSVLNDILSRLDPPEAEVQIDRLITGRLQSLQTYVTQQLIRAAEIRASANLAATKMSECVLGQSKRVDFCGKGYQLMSFPQSAPHGVVFLNVTYVPAQEKNFTTAPAICNDGKAHFPREGVFVSNGTNWFVTQRNFYEPQIITTDNTFVSGNCDVVIGIVNNTVYDPLQPELDS

SEQ ID NO: 2891 - protein, 1147 aa, Artificial Sequence
  SARS-CoV-2/Shenzhen/SZTH-001/2020__EPI_ISL_406592 spike protein (1-1147)(K986P_V987P_ H1048Q_H1064N_ H1083N_H1101N)
MFVFLVLLPLVSSQCVNLTTRTQLPPAYTNSFTRGVYYPDKVFRSSVLHSTQDLFLPFFSNVTWFHAIHVSGTNGTKRFDNPVLPFNDGVYFASTEKSNIIRGWIFGTTLDSKTQSLLIVNNATNVVIKVCEFQFCNDPFLGVYYHKNNKSWMESEFRVYSSANNCTFEYVSQPFLMDLEGKQGNFKNLREFVFKNIDGYFKIYSKHTPINLVRDLPQGFSALEPLVDLPIGINITRFQTLLALHRSYLTPGDSSSGWTAGAAAYYVGYLQPRTFLLKYNENGTITDAVDCALDPLSETKCTLKSFTVEKGIYQTSNFRVQPTESIVRFPNITNLCPFGEVFNATRFASVYAWNRKRISNCVADYSVLYNSASFSTFKCYGVSPTKLNDLCFTNVYADSFVIRGDEVRQIAPGQTGKIADYNYKLPDDFTGCVIAWNSNNLDSKVGGNYNYLYRLFRKSNLKPFERDISTEIYQAGSTPCNGVEGFNCYFPLQSYGFQPTNGVGYQPYRVVVLSFELLHAPATVCGPKKSTNLVKNKCVNFNFNGLTGTGVLTESNKKFLPFQQFGRDIADTTDAVRDPQTLEILDITPCSFGGVSVITPGTNTSNQVAVLYQDVNCTEVPVAIHADQLTPTWRVYSTGSNVFQTRAGCLIGAEHVNNSYECDIPIGAGICASYQTQTNSPRRARSVASQSIIAYTMSLGAENSVAYSNNSIAIPTNFTISVTTEILPVSMTKTSVDCTMYICGDSTECSNLLLQYGSFCTQLNRALTGIAVEQDKNTQEVFAQVKQIYKTPPIKDFGGFNFSQILPDPSKPSKRSFIEDLLFNKVTLADAGFIKQYGDCLGDIAARDLICAQKFNGLTVLPPLLTDEMIAQYTSALLAGTITSGWTFGAGAALQIPFAMQMAYRFNGIGVTQNVLYENQKLIANQFNSAIGKIQDSLSSTASALGKLQDVVNQNAQALNTLVKQLSSNFGAISSVLNDILSRLDPPEAEVQIDRLITGRLQSLQTYVTQQLIRAAEIRASANLAATKMSECVLGQSKRVDFCGKGYQLMSFPQSAPHGVVFLNVTYVPAQEKNFTTAPAICNDGKAHFPREGVFVSNGTNWFVTQRNFYEPQIITTDNTFVSGNCDVLIGIVNNTVYDPLQPELDS

SEQ ID NO: 2892 - protein, 1147 aa, Artificial Sequence
  SARS-CoV-2/Shenzhen/SZTH-004/2020__EPI_ISL_406595 spike protein (1-1147)(K986P_V987P_ H1048Q_H1064N_ H1083N_H1101N)
MFVFLVLLPLVSSQCVNLTTRTQLPPAYTNSFTRGVYYPDKVFRSSVLHSTQDLFLPFFSNVTWFHAIHVSGTNGTKRFDNPVLPFNDGVYFASTEKSNIIRGWIFGTTLDSKTQSLLIVNNATNVVIKVCEFQFCNDPFLGVYYHKNNKSWMESEFRVYSSANNCTFEYVSQPFLMDLEGKQGNFKNLREFVFKNIDGYFKIYSKHTPINLVRDLPQGFSALEPLVDLPIGINITRFQTLLALHRSYLTPGDSSSGWTAGAAAYYVGYLQPRTFLLKYNENGTITDAVDCALDPLSETKCTLKSFTVEKGIYQTSNFRVQPTESIVRFPNITNLCPFGEVFNATRFASVYAWDRKRISNCVAYYSVLYNSASFSTFKCYGVSPTKLNDLCFTNVYADSFVIRGDEVRQIAPGQTGKIADYNYKLPDDFTGCVIAWNSNNLDSKVGGNYNYLYRLFRKSNLKPFERDISTEIYQAGSTPCNGVEGFNCYFPLQSYGFQPTNGVGYQPYRVVVLSFELLHAPATVCGPKKSTNLVKNKCVNFNFNGLTGTGVLTESNKKFLPFQQFGRDIADTTDAVRDPQTLEILDITPCSFGGVSVITPGTNTSNQVAVLYQDVNCTEVPVAIHADQLTPTWRVYSTGSNVFQTRAGCLIGAEHVNNSYECDIPIGAGICASYQTQTNSPRRARSVASQSIIAYTMSLGAENSVAYSNNSIAIPTNFTISVTTEILPVSMTKTSVDCTMYICGDSTECSNLLLQYGSFCTQLNRALTGIAVEQDKNTQEVFAQVKQIYKTPPIKDFGGFNFSQILPDPSKPSKRSFIEDLLFNKVTLADAGFIKQYGDCLGDIAARDLICAQKFNGLTVLPPLLTDEMIAQYTSALLAGTITSGWTFGAGAALQIPFAMQMAYRFNGIGVTQNVLYENQKLIANQFNSAIGKIQDSLSSTASALGKLQDVVNQNAQALNTLVKQLSSNFGAISSVLNDILSRLDPPEAEVQIDRLITGRLQSLQTYVTQQLIRAAEIRASANLAATKMSECVLGQSKRVDFCGKGYQLMSFPQSAPHGVVFLNVTYVPAQEKNFTTAPAICNDGKAHFPREGVFVSNGTNWFVTQRNFYEPQIITTDNTFVSGNCDVVIGIVNNTVYDPLQPELDS

SEQ ID NO: 2893 - protein, 1147 aa, Artificial Sequence
  SARS-CoV-2/France/IDF0372/2020__EPI_ISL_406596 spike protein (1-1147)(K986P_V987P_ H1048Q_H1064N_ H1083N_H1101N)
MFVFLVLLPLVSSQCVNLTTRTQLPPAYTNSFTRGVYYPDKVFRSSVLHSTQDLFLPFFSNVTWFHAIHVSGTNGTKRFDNPVLPFNDGVYFASTEKSNIIRGWIFGTTLDSKTQSLLIVNNATNVVIKVCEFQFCNDPFLGVYYHKNNKSWMESEFRVYSSANNCTFEYVSQPFLMDLEGKQGNFKNLREFVFKNIDGYFKIYSKHTPINLVRDLPQGFSALEPLVDLPIGINITRFQTLLALHRSYLTPGDSSSGWTAGAAAYYVGYLQPRTFLLKYNENGTITDAVDCALDPLSETKCTLKSFTVEKGIYQTSNFRVQPTESIVRFPNITNLCPFGEVFNATRFASVYAWNRKRISNCVADYSFLYNSASFSTFKCYGVSPTKLNDLCFTNVYADSFVIRGDEVRQIAPGQTGKIADYNYKLPDDFTGCVIAWNSNNLDSKVGGNYNYLYRLFRKSNLKPFERDISTEIYQAGSTPCNGVEGFNCYFPLQSYGFQPTNGVGYQPYRVVVLSFELLHAPATVCGPKKSTNLVKNKCVNFNFNGLTGTGVLTESNKKFLPFQQFGRDIADTTDAVRDPQTLEILDITPCSFGGVSVITPGTNTSNQVAVLYQDVNCTEVPVAIHADQLTPTWRVYSTGSNVFQTRAGCLIGAEHVNNSYECDIPIGAGICASYQTQTNSPRRARSVASQSIIAYTMSLGAENSVAYSNNSIAIPTNFTISVTTEILPVSMTKTSVDCTMYICGDSTECSNLLLQYGSFCTQLNRALTGIAVEQDKNTQEVFAQVKQIYKTPPIKDFGGFNFSQILPDPSKPSKRSFIEDLLFNKVTLADAGFIKQYGDCLGDIAARDLICAQKFNGLTVLPPLLTDEMIAQYTSALLAGTITSGWTFGAGAALQIPFAMQMAYRFNGIGVTQNVLYENQKLIANQFNSAIGKIQDSLSSTASALGKLQDVVNQNAQALNTLVKQLSSNFGAISSVLNDILSRLDPPEAEVQIDRLITGRLQSLQTYVTQQLIRAAEIRASANLAATKMSECVLGQSKRVDFCGKGYQLMSFPQSAPHGVVFLNVTYVPAQEKNFTTAPAICNDGKAHFPREGVFVSNGTNWFVTQRNFYEPQIITTDNTFVSGNCDVVIGIVNNTVYDPLQPELDS

SEQ ID NO: 2894 - protein, 1147 aa, Artificial Sequence
  SARS-CoV-2/Australia/VIC01/2020__EPI_ISL_406844 spike protein (1-1147)(K986P_V987P_ H1048Q_H1064N_ H1083N_H1101N)
MFVFLVLLPLVSSQCVNLTTRTQLPPAYTNSFTRGVYYPDKVFRSSVLHSTQDLFLPFFSNVTWFHAIHVSGTNGTKRFDNPVLPFNDGVYFASTEKSNIIRGWIFGTTLDSKTQSLLIVNNATNVVIKVCEFQFCNDPFLGVYYHKNNKSWMESEFRVYSSANNCTFEYVSQPFLMDLEGKQGNFKNLREFVFKNIDGYFKIYSKHTPINLVRDLPQGFSALEPLVDLPIGINITRFQTLLALHRRYLTPGDSSSGWTAGAAAYYVGYLQPRTFLLKYNENGTITDAVDCALDPLSETKCTLKSFTVEKGIYQTSNFRVQPTESIVRFPNITNLCPFGEVFNATRFASVYAWNRKRISNCVADYSVLYNSASFSTFKCYGVSPTKLNDLCFTNVYADSFVIRGDEVRQIAPGQTGKIADYNYKLPDDFTGCVIAWNSNNLDSKVGGNYNYLYRLFRKSNLKPFERDISTEIYQAGSTPCNGVEGFNCYFPLQSYGFQPTNGVGYQPYRVVVLSFELLHAPATVCGPKKSTNLVKNKCVNFNFNGLTGTGVLTESNKKFLPFQQFGRDIADTTDAVRDPQTLEILDITPCSFGGVSVITPGTNTSNQVAVLYQDVNCTEVPVAIHADQLTPTWRVYSTGSNVFQTRAGCLIGAEHVNNSYECDIPIGAGICASYQTQTNSPRRARSVASQSIIAYTMSLGAENSVAYSNNSIAIPTNFTISVTTEILPVSMTKTSVDCTMYICGDSTECSNLLLQYGSFCTQLNRALTGIAVEQDKNTQEVFAQVKQIYKTPPIKDFGGFNFSQILPDPSKPSKRSFIEDLLFNKVTLADAGFIKQYGDCLGDIAARDLICAQKFNGLTVLPPLLTDEMIAQYTSALLAGTITSGWTFGAGAALQIPFAMQMAYRFNGIGVTQNVLYENQKLIANQFNSAIGKIQDSLSSTASALGKLQDVVNQNAQALNTLVKQLSSNFGAISSVLNDILSRLDPPEAEVQIDRLITGRLQSLQTYVTQQLIRAAEIRASANLAATKMSECVLGQSKRVDFCGKGYQLMSFPQSAPHGVVFLNVTYVPAQEKNFTTAPAICNDGKAHFPREGVFVSNGTNWFVTQRNFYEPQIITTDNTFVSGNCDVVIGIVNNTVYDPLQPELDS

SEQ ID NO: 2895 - protein, 1147 aa, Artificial Sequence
  SARS-CoV-2/Germany/BavPat1/2020__EPI_ISL_406862 spike protein (1-1147)(K986P_V987P_ H1048Q_H1064N_ H1083N_H1101N)
MFVFLVLLPLVSSQCVNLTTRTQLPPAYTNSFTRGVYYPDKVFRSSVLHSTQDLFLPFFSNVTWFHAIHVSGTNGTKRFDNPVLPFNDGVYFASTEKSNIIRGWIFGTTLDSKTQSLLIVNNATNVVIKVCEFQFCNDPFLGVYYHKNNKSWMESEFRVYSSANNCTFEYVSQPFLMDLEGKQGNFKNLREFVFKNIDGYFKIYSKHTPINLVRDLPQGFSALEPLVDLPIGINITRFQTLLALHRSYLTPGDSSSGWTAGAAAYYVGYLQPRTFLLKYNENGTITDAVDCALDPLSETKCTLKSFTVEKGIYQTSNFRVQPTESIVRFPNITNLCPFGEVFNATRFASVYAWNRKRISNCVADYSVLYNSASFSTFKCYGVSPTKLNDLCFTNVYADSFVIRGDEVRQIAPGQTGKIADYNYKLPDDFTGCVIAWNSNNLDSKVGGNYNYLYRLFRKSNLKPFERDISTEIYQAGSTPCNGVEGFNCYFPLQSYGFQPTNGVGYQPYRVVVLSFELLHAPATVCGPKKSTNLVKNKCVNFNFNGLTGTGVLTESNKKFLPFQQFGRDIADTTDAVRDPQTLEILDITPCSFGGVSVITPGTNTSNQVAVLYQGVNCTEVPVAIHADQLTPTWRVYSTGSNVFQTRAGCLIGAEHVNNSYECDIPIGAGICASYQTQTNSPRRARSVASQSIIAYTMSLGAENSVAYSNNSIAIPTNFTISVTTEILPVSMTKTSVDCTMYICGDSTECSNLLLQYGSFCTQLNRALTGIAVEQDKNTQEVFAQVKQIYKTPPIKDFGGFNFSQILPDPSKPSKRSFIEDLLFNKVTLADAGFIKQYGDCLGDIAARDLICAQKFNGLTVLPPLLTDEMIAQYTSALLAGTITSGWTFGAGAALQIPFAMQMAYRFNGIGVTQNVLYENQKLIANQFNSAIGKIQDSLSSTASALGKLQDVVNQNAQALNTLVKQLSSNFGAISSVLNDILSRLDPPEAEVQIDRLITGRLQSLQTYVTQQLIRAAEIRASANLAATKMSECVLGQSKRVDFCGKGYQLMSFPQSAPHGVVFLNVTYVPAQEKNFTTAPAICNDGKAHFPREGVFVSNGTNWFVTQRNFYEPQIITTDNTFVSGNCDVVIGIVNNTVYDPLQPELDS

SEQ ID NO: 2896 - protein, 1147 aa, Artificial Sequence
  SARS-CoV-2/Wuhan/HBCDC-HB-02/2020__EPI_ISL_412978 spike protein (1-1147)(K986P_V987P_ H1048Q_H1064N_ H1083N_H1101N)
MFVFLVLLPLVSSQCVNLTTRTQLPPAYTNSFTRGVYYPDKVFRSSVLHSTQDLFLPFFSNVTWFHAIHVSGTNGTKRFDNPVLPFNDGVYFASTEKSNIIRGWIFGTTLDSKTQSLLIVNNATNVVIKVCEFQFCNDPFLGVYYHKNNKSWMESEFRVYSSANNCTFEYVSQPFLMDLEGKQGNFKNLREFVFKNIDGYFKIYSKHTPINLVRDLPQGFSALEPLVDLPIGINITRFQTLLALHRSYLTPGDSSSGWTAGAAAYYVGYLQPRTFLLKYNENGTITDAVDCALDPLSETKCTLKSFTVEKGIYQTSNFRVQPTESIVRFPNITNLCPFGEVFNATRFASVYAWNRKRISNCVADYSVLYNSASFSTFKCYGVSPTKLNDLCFTNVYADSFVIRGDEVRQIAPGQTGKIADYNYKLPDDFTGCVIAWNSNNLDSKVGGNYNYLYRLFRKSNLKPFERDISTEIYQAGSTPCNGVEGFNCYFPLQSYGFQPTNGVGYQPYRVVVLSFELLHAPATVCGPKKSTNLVKNKCVNFNFNGLTGTGVLTESNKKFLPFQQFGRDIADTTDAVRDPQTLEILDITPCSFGGVSVITPGTNTSNQVAVLYQDVNCTEVPVAIHADQLTPTWRVYSTGSNVFQTRAGCLIGAEHVNNSYECDIPIGAGICASYQTQTNSPRRARSVASQSIIAYTMSLGAENSVAYSNNSIAIPTNFTISVTTEILPVSMTKTSVDCTMYICGDSTECSNFLLQYGSFCTQLNRALTGIAVEQDKNTQEVFAQVKQIYKTPPIKDFGGFNFSQILPDPSKPSKRSFIEDLLFNKVTLADAGFIKQYGDCLGDIAARDLICAQKFNGLTVLPPLLTDEMIAQYTSALLAGTITSGWTFGAGAALQIPFAMQMAYRFNGIGVTQNVLYENQKLIANQFNSAIGKIQDSLSSTASALGKLQDVVNQNAQALNTLVKQLSSNFGAISSVLNDILSRLDPPEAEVQIDRLITGRLQSLQTYVTQQLIRAAEIRASANLAATKMSECVLGQSKRVDFCGKGYQLMSFPQSAPHGVVFLNVTYVPAQEKNFTTAPAICNDGKAHFPREGVFVSNGTNWFVTQRNFYEPQIITTDNTFVSGNCDVVIGIVNNTVYDPLQPELDS

SEQ ID NO: 2897 - protein, 1147 aa, Artificial Sequence
  SARS-CoV-2/Australia/QLD02/2020__EPI_ISL_407896 spike protein (1-1147)(K986P_V987P_ H1048Q_H1064N_ H1083N_H1101N)
MFVFLVLLPLVSSQCVNLTTRTQLPPAYTNSFTRGVYYPDKVFRSSVLHSTQDLFLPFFSNVTWFHAIHVSGTNGTKRFDNPVLPFNDGVYFASTEKSNIIRGWIFGTTLDSKTQSLLIVNNATNVVIKVCEFQFCNDPFLGVYYHKNNKSWMESEFRVYSSANNCTFEYVSQPFLMDLEGKQGNFKNLREFVFKNIDGYFKIYSKHTPINLVRDLPQGFSALEPLVDLPIGINITRFQTLLALHRSYLTPGDSSSGWTAGAAAYYVGYLQPRTFLLKYNENGTITDAVDCALDPLSETKCTLKSFTVEKGIYQTSNFRVQPTESIVRFPNITNLCPFGEVFNATRFASVYAWNRKRISNCVADYSVLYNSASFSTFKCYGVSPTKLNDLCFTNVYADSFVIRGDEVRQIAPGQTGKIADYNYKLPDDFTGCVIAWNSNNLDSKVGGNYNYLYRLFRKSNLKPFERDISTEIYQAGSTPCNGVEGFNCYFPLQSYGFQPTNGVGYQPYRVVVLSFELLHAPATVCGPKKSTNLVKNKCVNFNFNGLTGTGVLTESNKKFLPFQQFGRDIADTTDAVRDPQTLEILDITPCSFGGVSVITPGTNTSNQVAVLYQDVNCTEVPVAIHADQLTPTWRVYSTGSNVFQTRAGCLIGAEHVNNSYECDIPIGAGICASYQTQTNSPRRARSVASQSIIAYTMSLGAENSVAYSNNSIAIPTNFTISVTTEILPVSMTKTSVDCTMYICGDSTECSNLLLQYGSFCTQLNRALTGIAVEQDKNTQEVFAQVKQIYKTPPIKDFGGFNFSQILPDPSKPSKRSFIEDLLFNKVTLADAGFIKQYGDCLGDIAARDLICAQKFNGLTVLPPLLTDEMIAQYTSALLAGTITSGWTFGAGAALQIPFAMQMAYRFNGIGVTQNVLYENQKLIANQFNSAIGKIQDSLSSTASALGKLQDVVNQNAQALNTLVKQLSSNFGAISSVLNDILSRLDPPEAEVQIDRLITGRLQSLQTYVTQQLIRAAEIRASANLAATKMSECVLGQSKRVDFCGKGYQLMSFPQSAPHGVVFLNVTYVPAQEKNFTTAPAICNDGKAHFPREGVFVSNGTNWFVTQRNFYEPQIITTDNTFVSGNCDVVIGIVNNTVYDPLQLELDS

SEQ ID NO: 2898 - protein, 1147 aa, Artificial Sequence
  SARS-CoV-2/India/1-31/2020__EPI_ISL_413523 spike protein (1-1147)(K986P_V987P_ H1048Q_H1064N_ H1083N_H1101N)
MFVFLVLLPLVSSQCVNLTTRTQLPPAYTNSFTRGVYYPDKVFRSSVLHSTQDLFLPFFSNVTWFHAIHVSGTNGTKRFDNPVLPFNDGVYFASTEKSNIIRGWIFGTTLDSKTQSLLIVNNATNVVIKVCEFQFCNDPFLGVYYHKNNKSWMESEFRVYSSANNCTFEYVSQPFLMDLEGKQGNFKNLREFVFKNIDGYFKIYSKHTPINLVRDLPQGFSALEPLVDLPIGINITRFQTLLALHRSYLTPGDSSSGWTAGAAAYYVGYLQPRTFLLKYNENGTITDAVDCALDPLSETKCTLKSFTVEKGIYQTSNFRVQPTESIVRFPNITNLCPFGEVFNATRFASVYAWNRKRISNCVADYSVLYNSASFSTFKCYGVSPTKLNDLCFTNVYADSFVIRGDEVRQIAPGQTGKIADYNYKLPDDFTGCVIAWNSNNLDSKVGGNYNYLYRLFRKSNLKPFERDISTEIYQAGSTPCNGVEGFNCYFPLQSYGFQPTNGVGYQPYRVVVLSFELLHAPATVCGPKKSTNLVKNKCVNFNFNGLTGTGVLTESNKKFLPFQQFGRDIADTTDAVRDPQTLEILDITPCSFGGVSVITPGTNTSNQVAVLYQDVNCTEVPVAIHADQLTPTWRVYSTGSNVFQTRAGCLIGAEHVNNSYECDIPIGAGICASYQTQTNSPRRARSVASQSIIAYTMSLGAENSVAYSNNSIAIPTNFTISVTTEILPVSMTKTSVDCTMYICGDSTECSNLLLQYGSFCTQLNRALTGIAVEQDKNTQEVFAQVKQIYKTPPIKDFGGFNFSQILPDPSKPSKRSFIEDLLFNKVTLADAGFIKQYGDCLGDIAARDLICAQKFNGLTVLPPLLTDEMIAQYTSALLAGTITSGWTFGAGAALQIPFAMQMAYRFNGIGVTQNVLYENQKLIANQFNSVIGKIQDSLSSTASALGKLQDVVNQNAQALNTLVKQLSSNFGAISSVLNDILSRLDPPEAEVQIDRLITGRLQSLQTYVTQQLIRAAEIRASANLAATKMSECVLGQSKRVDFCGKGYQLMSFPQSAPHGVVFLNVTYVPAQEKNFTTAPAICNDGKAHFPREGVFVSNGTNWFVTQRNFYEPQIITTDNTFVSGNCDVVIGIVNNTVYDPLQPELDS

SEQ ID NO: 2899 - protein, 1147 aa, Artificial Sequence
  SARS-CoV-2/Guangdong/GD2020087-P0008/2020__EPI_ISL_413863 spike protein (1-1147)(K986P_V987P_ H1048Q_H1064N_ H1083N_H1101N)
MFVFLVLLPLVSSQCVNLTTRTQLPPAYTNSFTRGVYYPDKVFRSSVLHSTQDLFLPFFSNVTWFHAIHVSGTNGTKRFDNPVLPFNDGVYFASTEKSNIIRGWIFGTTLDSKTQSLLIVNNATNVVIKVCEFQFCNDPFLGVYYHKNNKSWMESEFRVYSSANNCTFEYVSQPFLMDLEGKQGNFKNLREFVFKNIDGYFKIYSKHTPINLVRDLPQGFSALEPLVDLPIGINITRFQTLLALHRSYLTPGDSSSGWTAGAAAYYVGYLQPRTFLLKYNENGTITDAVDCALDPLSETKCTLKSFTVEKGIYQTSNFRVQPTESIVRFPNITNLCPFGEVFNATRFASVYAWNRKRISNCVADYSVLYNSASFSTFKCYGVSPTKLNDLCFTNVYADSFVIRGDEVREIAPGQTGKIADYNYKLPDDFTGCVIAWNSNNLDSKVGGNYNYLYRLFRKSNLKPFERDISTEIYQAGSTPCNGVEGFNCYFPLQSYGFQPTNGVGYQPYRVVVLSFELLHAPATVCGPKKSTNLVKNKCVNFNFNGLTGTGVLTESNKKFLPFQQFGRDIADTTDAVRDPQTLEILDITPCSFGGVSVITPGTNTSNQVAVLYQDVNCTEVPVAIHADQLTPTWRVYSTGSNVFQTRAGCLIGAEHVNNSYECDIPIGAGICASYQTQTNSPRRARSVASQSIIAYTMSLGAENSVAYSNNSIAIPTNFTISVTTEILPVSMTKTSVDCTMYICGDSTECSNLLLQYGSFCTQLNRALTGIAVEQDKNTQEVFAQVKQIYKTPPIKDFGGFNFSQILPDPSKPSKRSFIEDLLFNKVTLADAGFIKQYGDCLGDIAARDLICAQKFNGLTVLPPLLTDEMIAQYTSALLAGTITSGWTFGAGAALQIPFAMQMAYRFNGIGVTQNVLYENQKLIANQFNSAIGKIQDSLSSTASALGKLQDVVNQNAQALNTLVKQLSSNFGAISSVLNDILSRLDPPEAEVQIDRLITGRLQSLQTYVTQQLIRAAEIRASANLAATKMSECVLGQSKRVDFCGKGYQLMSFPQSAPHGVVFLNVTYVPAQEKNFTTAPAICNDGKAHFPREGVFVSNGTNWFVTQRNFYEPQIITTDNTFVSGNCDVVIGIVNNTVYDPLQPELDS

SEQ ID NO: 2900 - protein, 1147 aa, Artificial Sequence
  SARS-CoV-2/Sweden/01/2020__EPI_ISL_411951 spike protein (1-1147)(K986P_V987P_ H1048Q_H1064N_ H1083N_H1101N)
MFVFLVLLPLVSSQCVNLTTRTQLPPAYTNSFTRGVYYPDKVFRSSVLHSTQDLFLPFFSNVTWFHAIHVSGTNGTKRFDNPVLPFNDGVYFASTEKSNIIRGWIFGTTLDSKTQSLLIVNNATNVVIKVCEFQFCNDPFLGVYYHKNNKSWMESEFRVYSSANNCTFEYVSQPFLMDLEGKQGNFKNLREFVFKNIDGYFKIYSKHTPINLVRDLPQGFSALEPLVDLPIGINITRFQTLLALHRSYLTPGDSSSGWTAGAAAYYVGYLQPRTFLLKYNENGTITDAVDCALDPLSETKCTLKSFTVEKGIYQTSNFRVQPTESIVRFPNITNLCPFGEVFNATRFASVYAWNRKRISNCVADYSVLYNSASFSTFKCYGVSPTKLNDLCFTNVYADSFVIRGDEVRQIAPGQTGKIADYNYKLPDDFTGCVIAWNSNNLDSKVGGNYNYLYRLFRKSNLKPFERDISTEIYQAGSTPCNGVEGFNCYFPLQSYGFQPTNGVGYQPYRVVVLSFELLHAPATVCGPKKSTNLVKNKCVNFNFNGLTGTGVLTESNKKFLPFQQFGRDIADTTDAVRDPQTLEILDITPCSFGGVSVITPGTNTSNQVAVLYQDVNCTEVPVAIHADQLTPTWRVYSTGSNVFQTRAGCLIGAEHVNNSYECDIPIGAGICASYQTQTNSPRRARSVASQSIIAYTMSLGAENSVAYSNNSIAIPTNFTISVTTEILPVSMTKTSVDCTMYICGDSTECSNLLLQYGSFCTQLNRALTGIAVEQDKNTQEVFAQVKQIYKTPPIKDCGGFNFSQILPDPSKPSKRSFIEDLLFNKVTLADAGFIKQYGDCLGDIAARDLICAQKFNGLTVLPPLLTDEMIAQYTSALLAGTITSGWTFGAGAALQIPFAMQMAYRFNGIGVTQNVLYENQKLIANQFNSAIGKIQDSLSSTASALGKLQDVVNQNAQALNTLVKQLSSNFGAISSVLNDILSRLDPPEAEVQIDRLITGRLQSLQTYVTQQLIRAAEIRASANLAATKMSECVLGQSKRVDFCGKGYQLMSFPQSAPHGVVFLNVTYVPAQEKNFTTAPAICNDGKAHFPREGVFVSNGTNWFVTQRNFYEPQIITTDNTFVSGNCDVVIGIVNNTVYDPLQPELDS

SEQ ID NO: 2901 - protein, 1147 aa, Artificial Sequence
  SARS-CoV-2/Tianmen/HBCDC-HB-07/2020__EPI_ISL_412983 spike protein (1-1147)(K986P_V987P_ H1048Q_H1064N_ H1083N_H1101N)
MFVFLVLLPLVSSQCVNLTTRTQLPPAYTNSFTRGVYYPDKVFRSSVLHSTQDLFLPFFSNVTWFHAIHVSGTNGTKRFDNPVLPFNDGVYFASTEKSNIIRGWIFGTTLDSKTQSLLIVNNATNVVIKVCEFQFCNDPFLGVYYHKNNKSWMESEFRVYSSANNCTFEYVSQPFLMDLEGKQGNFKNLREFVFKNIDGYFKIYSKHTPINLVRDLPQGFSALEPLVDLPIGINITRFQTLLALHRSYLTPGDSSSGWTAGAAAYYVGYLQPRTFLLKYNENGTITDAVDCALDPLSETKCTLKSFTVEKGIYQTSNFRVQPTESIVRFPNITNLCPFGEVFNATRFASVYAWNRKRISNCVADYSVLYNSASFSTFKCYGVSPTKLNDLCFTNVYADSFVIRGDEVRQIAPGQTGKIADYNYKLPDDFTGCVIAWNSNNLDSKVGGNYNYLYRLFRKSNLKPFERDISTEIYQAGSTPCNGVEGFNCYFPLQSYGFQPTNGVGYQPYRVVVLSFELLHAPATVCGPKKSTNLVKNKCVNFNFNGLTGTGVLTESNKKFLPFQQFGRDIADTTDAVRDPQTLEILDITPCSFGGVSVITPGTNTSNQVAVLYQDLNCTEVPVAIHADQLTPTWRVYSTGSNVFQTRAGCLIGAEHVNNSYECDIPIGAGICASYQTQTNSPRRARSVASQSIIAYTMSLGAENSVAYSNNSIAIPTNFTISVTTEILPVSMTKTSVDCTMYICGDSTECSNLLLQYGSFCTQLNRALTGIAVEQDKNTQEVFAQVKQIYKTPPIKDFGGFNFSQILPDPSKPSKRSFIEDLLFNKVTLADAGFIKQYGDCLGDIAARDLICAQKFNGLTVLPPLLTDEMIAQYTSALLAGTITSGWTFGAGAALQIPFAMQMAYRFNGIGVTQNVLYENQKLIANQFNSAIGKIQDSLSSTASALGKLQDVVNQNAQALNTLVKQLSSNFGAISSVLNDILSRLDPPEAEVQIDRLITGRLQSLQTYVTQQLIRAAEIRASANLAATKMSECVLGQSKRVDFCGKGYQLMSFPQSAPHGVVFLNVTYVPAQEKNFTTAPAICNDGKAHFPREGVFVSNGTNWFVTQRNFYEPQIITTDNTFVSGNCDVVIGIVNNTVYDPLQPELDS

SEQ ID NO: 2902 - protein, 1147 aa, Artificial Sequence
  SARS-CoV-2/Hong Kong/case42_VM20002493/2020__EPI_ISL_414527 spike protein (1-1147)(K986P_V987P_ H1048Q_H1064N_ H1083N_H1101N)
MFVFLVLLPLVSSQCVNLTTRTQLPPAYTNSFTRGVYYPDKVFRSSVLHSTQDLFLPFFSNVTWFHAIHVSGTNGTKRFDNPVLPFNDGVYFASTEKSNIIRGWIFGTTLDSKTQSLLIVNNATNVVIKVCEFQFCNDPFLGVYYHKNNKSWMESEFRVYSSANNCTFEYVSQPFLMDLEGKQGNFKNLREFVFKNIDGYFKIYSKHTPINLVRDLPQGFSALEPLVDLPIGINITRFQTLLALHRSYLTPGDSSSGWTAGAAAYYVGYLQPRTFLLKYNENGTITDAVDCALDPLSETKCTLKSFTVEKGIYQTSNFRVQPTESIVRFPNITNLCPFGEVFNATRFASVYAWNRKRISNCVADYSVLYNSASFSTFKCYGVSPTKLNDLCFTNVYADSFVIRGDEVRQIAPGQTGKIADYNYKLPDDFTGCVIAWNSNNLDSKVGGNYNYLYRLFRKSNLKPFERDISTEIYQAGSTPCNGVEGFNCYFPLQSYGFQPTNGVGYQPYRVVVLSFELLHAPATVCGPKKSTNLVKNKCVNFNFNGLTGTGVLTESNKKFLPFQQFGRDIADTTDAVRDPQTLEILDITPCSFGGVSVITPGTNTSNQVAVLYQDVNCTEVPVAIHADQLTPTWRVYSTGSNVFQTRAGCLIGAEHVNNSYECDIPIGAGICASYQTQTNSPRRARSVASQSIIAYTMSLGAENSVAYSNNSIAIPTNFAISVTTEILPVSMTKTSVDCTMYICGDSTECSNLLLQYGSFCTQLNRALTGIAVEQDKNTQEVFAQVKQIYKTPPIKDFGGFNFSQILPDPSKPSKRSFIEDLLFNKVTLADAGFIKQYGDCLGDIAARDLICAQKFNGLTVLPPLLTDEMIAQYTSALLAGTITSGWTFGAGAALQIPFAMQMAYRFNGIGVTQNVLYENQKLIANQFNSAIGKIQDSLSSTASALGKLQDVVNQNAQALNTLVKQLSSNFGAISSVLNDILSRLDPPEAEVQIDRLITGRLQSLQTYVTQQLIRAAEIRASANLAATKMSECVLGQSKRVDFCGKGYQLMSFPQSAPHGVVFLNVTYVPAQEKNFTTAPAICNDGKAHFPREGVFVSNGTNWFVTQRNFYEPQIITTDNTFVSGNCDVVIGIVNNTVYDPLQPELDS

SEQ ID NO: 2903 - protein, 1147 aa, Artificial Sequence
  SARS-CoV-2/USA/CruiseA-23/2020__EPI_ISL_414482 spike protein (1-1147)(K986P_V987P_ H1048Q_H1064N_ H1083N_H1101N)
MFVFLVLLPLVSSQCVNLTTRTQLPPAYTNSFTRGVYYPDKVFRSSVLHSTQDLFLPFFSNVTWFHAIHVSGTNGTKRFDNPVLPFNDGVYFASTEKSNIIRGWIFGTTLDSKTQSLLIVNNATNVVIKVCEFQFCNDPFLGVYYHKNNKSWMESEFRVYSSANNCTFEYVSQPFLMDLEVKQGNFKNLREFVFKNIDGYFKIYSKHTPINLVRDLPQGFSALEPLVDLPIGINITRFQTLLALHRSYLTPGDSSSGWTAGAAAYYVGYLQPRTFLLKYNENGTITDAVDCALDPLSETKCTLKSFTVEKGIYQTSNFRVQPTESIVRFPNITNLCPFGEVFNATRFASVYAWNRKRISNCVADYSVLYNSASFSTFKCYGVSPTKLNDLCFTNVYADSFVIRGDEVRQIAPGQTGKIADYNYKLPDDFTGCVIAWNSNNLDSKVGGNYNYLYRLFRKSNLKPFERDISTEIYQAGSTPCNGVEGFNCYFPLQSYGFQPTNGVGYQPYRVVVLSFELLHAPATVCGPKKSTNLVKNKCVNFNFNGLTGTGVLTESNKKFLPFQQFGRDIADTTDAVRDPQTLEILDITPCSFGGVSVITPGTNTSNQVAVLYQDVNCTEVPVAIHADQLTPTWRVYSTGSNVFQTRAGCLIGAEHVNNSYECDIPIGAGICASYQTQTNSPRRARSVASQSIIAYTMSLGAENSVAYSNNSIAIPTNFTISVTTEILPVSMTKTSVDCTMYICGDSTECSNLLLQYGSFCTQLNRALTGIAVEQDKNTQEVFAQVKQIYKTPPIKDFGGFNFSQILPDPSKPSKRSFIEDLLFNKVTLADAGFIKQYGDCLGDIAARDLICAQKFNGLTVLPPLLTDEMIAQYTSALLAGTITSGWTFGAGAALQIPFAMQMAYRFNGIGVTQNVLYENQKLIANQFNSAIGKIQDSLSSTASALGKLQDVVNQNAQALNTLVKQLSSNFGAISSVLNDILSRLDPPEAEVQIDRLITGRLQSLQTYVTQQLIRAAEIRASANLAATKMSECVLGQSKRVDFCGKGYQLMSFPQSAPHGVVFLNVTYVPAQEKNFTTAPAICNDGKAHFPREGVFVSNGTNWFVTQRNFYEPQIITTDNTFVSGNCDVVIGIVNNTVYDPLQPELDS

SEQ ID NO: 2904 - protein, 1147 aa, Artificial Sequence
  SARS-CoV-2/Hong Kong/case85_VM20002868/2020__EPI_ISL_414519 spike protein (1-1147)(K986P_V987P_ H1048Q_H1064N_ H1083N_H1101N)
MFVFLVLVPLVSSQCVNLTTRTQLPPAYTNSFTRGVYYPDKVFRSSVLHSTQDLFLPFFSNVTWFHAIHVSGTNGTKRFDNPVLPFNDGVYFASTEKSNIIRGWIFGTTLDSKTQSLLIVNNATNVVIKVCEFQFCNDPFLGVYYHKNNKSWMESEFRVYSSANNCTFEYVSQPFLMDLEGKQGNFKNLREFVFKNIDGYFKIYSKHTPINLVRDLPQGFSALEPLVDLPIGINITRFQTLLALHRSYLTPGDSSSGWTAGAAAYYVGYLQPRTFLLKYNENGTITDAVDCALDPLSETKCTLKSFTVEKGIYQTSNFRVQPTESIVRFPNITNLCPFGEVFNATRFASVYAWNRKRISNCVADYSVLYNSASFSTFKCYGVSPTKLNDLCFTNVYADSFVIRGDEVRQIAPGQTGKIADYNYKLPDDFTGCVIAWNSNNLDSKVGGNYNYLYRLFRKSNLKPFERDISTEIYQAGSTPCNGVEGFNCYFPLQSYGFQPTNGVGYQPYRVVVLSFELLHAPATVCGPKKSTNLVKNKCVNFNFNGLTGTGVLTESNKKFLPFQQFGRDIADTTDAVRDPQTLEILDITPCSFGGVSVITPGTNTSNQVAVLYQDVNCTEVPVAIHADQLTPTWRVYSTGSNVFQTRAGCLIGAEHVNNSYECDIPIGAGICASYQTQTNSPRRARSVASQSIIAYTMSLGAENSVAYSNNSIAIPTNFTISVTTEILPVSMTKTSVDCTMYICGDSTECSNLLLQYGSFCTQLNRALTGIAVEQDKNTQEVFAQVKQIYKTPPIKDFGGFNFSQILPDPSKPSKRSFIEDLLFNKVTLADAGFIKQYGDCLGDIAARDLICAQKFNGLTVLPPLLTDEMIAQYTSALLAGTITSGWTFGAGAALQIPFAMQMAYRFNGIGVTQNVLYENQKLIANQFNSAIGKIQDSLSSTASALGKLQDVVNQNAQALNTLVKQLSSNFGAISSVLNDILSRLDPPEAEVQIDRLITGRLQSLQTYVTQQLIRAAEIRASANLAATKMSECVLGQSKRVDFCGKGYQLMSFPQSAPHGVVFLNVTYVPAQEKNFTTAPAICNDGKAHFPREGVFVSNGTNWFVTQRNFYEPQIITTDNTFVSGNCDVVIGIVNNTVYDPLQPELDS

SEQ ID NO: 2905 - protein, 1147 aa, Artificial Sequence; identical to SEQ ID NO: 2895
  SARS-CoV-2/England/200990660/2020__EPI_ISL_414523 spike protein (1-1147)(K986P_V987P_ H1048Q_H1064N_ H1083N_H1101N)

SEQ ID NO: 2906 - protein, 1147 aa, Artificial Sequence
  SARS-CoV-2/Australia/NSW09/2020__EPI_ISL_413595 spike protein (1-1147)(K986P_V987P_ H1048Q_H1064N_ H1083N_H1101N)
MFVFLVLLPLVSSQCVNLTTRTQLPPAYTNSFTRGVYYPDKVFRSSVLHSTQDLFLPFFSNVTWFHAIHVSGTNGTKRFDNPVLPFNDGVYFASTEKSNIIRGWIFGTTLDSKTQSLLIVNNATNVVIKVCEFQFCNDPFLGVYYHKNNKSWMESEFRVYSSANNCTFEYVSQPFLMDLEGKQGNFKNLREFVFKNIDGYFKIYSKHTPINLVRDLPQGFSALEPLVDLPIGINITRFQTLLALHRSYLTPGDSSSGWTAGAAAYYVGYLQPRTFLLKYNENGTITDAVDCALDPLSETKCTLKSFTVEKGIYQTSNFRVQPTESIVRFPNITNLCPFGEVFNATRFASVYAWNRKRISNCVADYSVLYNSASFSTFKCYGVSPTKLNDLCFTNVYADSFVIRGDEVRQIAPGQTGKIADYNYKLPDDFTGCVIAWNSNNLDSKVGGNYNYLYRLFRKSNLKPFERDISTEIYQAGSTPCNGVEGFNCYFPLQSYGFQPTNGVGYQPYRVVVLSFELLHAPATVCGPKKSTNLVKNKCVNFNFNGLTGTGVLTESNKKFLPFQQFGRDIADTTDAVRDPQTLEILDITPCSFGGVSVITPGTNTSNQVAVLYQDVNCTEVPVAIHADQLTPTWRVYSTGSNVFQTRAGCLIGAEHVNNSYECDIPIGAGICASYQTQTNSPRRARSVASQSIIAYTMSLGAENSVAYSNNSIAIPTNFTISVTTEILPVSMTKTSVDCTMYICGDSTECSNLLLQYGSFCTQLNRALTGIAVEQDKNTQEVFAQVKQIYKTPPIKDFGGFNFSQILPDPSKPSKRSFIEDLLFNKVTLADAGFIKQYGDCLGDIAARDLICAQKFNGLTVLPPLLTDEMIAQYTSALLAGTITSGWTFGAGAALQIPFAMQMAYRFNGIGVTQNVLYENQKLIANQFNSAIGKIQDSLSFTASALGKLQDVVNQNAQALNTLVKQLSSNFGAISSVLNDILSRLDPPEAEVQIDRLITGRLQSLQTYVTQQLIRAAEIRASANLAATKMSECVLGQSKRVDFCGKGYQLMSFPQSAPHGVVFLNVTYVPAQEKNFTTAPAICNDGKAHFPREGVFVSNGTNWFVTQRNFYEPQIITTDNTFVSGNCDVVIGIVNNTVYDPLQPELDS

SEQ ID NO: 2907 - protein, 1147 aa, Artificial Sequence; identical to SEQ ID NO: 2887
  SARS-CoV-2/Australia/NSW10/2020__EPI_ISL_413596 spike protein (1-1147)(K986P_V987P_ H1048Q_H1064N_ H1083N_H1101N)

SEQ ID NO: 2908 - protein, 1147 aa, Artificial Sequence
  SARS-CoV-2/Switzerland/1000477797/2020__EPI_ISL_413023 spike protein (1-1147)(K986P_V987P_ H1048Q_H1064N_ H1083N_H1101N)
MFVFLVLLPLVSSQCVNLTTRTQLPPAYTNSFTRGVYYPDKVFRSSVLHSTQDLFLPFFSNVTWFHAIHVSGTNGTKRFDNPVLPFNDGVYFASTEKSNIIRGWIFGTTLDSKTQSLLIVNNATNVVIKVCEFQFCNDPFLGVYYHKNNKSWMESEFRVYSSANNCTFEYVSQPFLMDLEGKQGNFKNLREFVFKNIDGYFNIYSKHTPINLVRDLPQGFSALEPLVDLPIGINITRFQTLLALHRSYLTPGDSSSGWTAGAAAYYVGYLQPRTFLLKYNENGTITDAVDCALDPLSETKCTLKSFTVEKGIYQTSNFRVQPTESIVRFPNITNLCPFGEVFNATRFASVYAWNRKRISNCVADYSVLYNSASFSTFKCYGVSPTKLNDLCFTNVYADSFVIRGDEVRQIAPGQTGKIADYNYKLPDDFTGCVIAWNSNNLDSKVGGNYNYLYRLFRKSNLKPFERDISTEIYQAGSTPCNGVEGFNCYFPLQSYGFQPTNGVGYQPYRVVVLSFELLHAPATVCGPKKSTNLVKNKCVNFNFNGLTGTGVLTESNKKFLPFQQFGRDIADTTDAVRDPQTLEILDITPCSFGGVSVITPGTNTSNQVAVLYQGVNCTEVPVAIHADQLTPTWRVYSTGSNVFQTRAGCLIGAEHVNNSYECDIPIGAGICASYQTQTNSPRRARSVASQSIIAYTMSLGAENSVAYSNNSIAIPTNFTISVTTEILPVSMTKTSVDCTMYICGDSTECSNLLLQYGSFCTQLNRALTGIAVEQDKNTQEVFAQVKQIYKTPPIKDFGGFNFSQILPDPSKPSKRSFIEDLLFNKVTLADAGFIKQYGDCLGDIAARDLICAQKFNGLTVLPPLLTDEMIAQYTSALLAGTITSGWTFGAGAALQIPFAMQMAYRFNGIGVTQNVLYENQKLIANQFNSAIGKIQDSLSSTASALGKLQDVVNQNAQALNTLVKQLSSNFGAISSVLNDILSRLDPPEAEVQIDRLITGRLQSLQTYVTQQLIRAAEIRASANLAATKMSECVLGQSKRVDFCGKGYQLMSFPQSAPHGVVFLNVTYVPAQEKNFTTAPAICNDGKAHFPREGVFVSNGTNWFVTQRNFYEPQIITTDNTFVSGNCDVVIGIVNNTVYDPLQPELDS

SEQ ID NO: 2909 - protein, 1147 aa, Artificial Sequence
  SARS-CoV-2/Belgium/BA-02291/2020__EPI_ISL_415159 spike protein (1-1147)(K986P_V987P_ H1048Q_H1064N_ H1083N_H1101N)
MFVFLVLLPLVSSQCVNLTTRTQLPPAYTNSFTRGVYYPDKVFRSSVLHSTQDLFLPFFSNVTWFHAIHVSGTNGTKRFDNPVLPFNDGVYFASTEKSNIIRGWIFGTTLDSKTQSLLIVNNATNVVIKVCEFQFCNDPFLGVYYHKNNKSWMESEFRVYSSANNCTFEYVSQPFLMDLEGKQGNFKNLREFVFKNIDGYFKIYSKHTPINLVRDLPQGFSALEPLVDLPIGINITRFQTLLALHRSYLTPGDSSSGWTAGAAAYYVGYLQPRTFLLKYNENGTITDAVDCALDPLSETKCTLKSFTVEKGIYQTSNFRVQPTESIVRFPNITNLCPFGEVFNATRFASVYAWNRKRISNCVADYSVLYNSASFSTFKCYGVSPTKLNDLCFTNVYADSFVIRGDEVRQIAPGQTGKIADYNYKLPDDFTGCVIAWNSNNLDSKVGGNYNYLYRLFRRSNLKPFERDISTEIYQAGSTPCNGVEGFNCYFPLQSYGFQPTNGVGYQPYRVVVLSFELLPAPATVCGPKKSTNLVKNKCVNFNFNGLTGTGVLTESNKKFLPFQQFGRDIADTTDAVRDPQTLEILDITPCSFGGVSVITPGTNTSNQVAVLYQGVNCTEVPVAIHADQLTPTWRVYSTGSNVFQTRAGCLIGAEHVNNSYECDIPIGAGICASYQTQTNSPRRARSVASQSIIAYTMSLGAENSVAYSNNSIAIPTNFTISVTTEILPVSMTKTSVDCTMYICGDSTECSNLLLQYGSFCTQLNRALTGIAVEQDKNTQEVFAQVKQIYKTPPIKDFGGFNFSQILPDPSKPSKRSFIEDLLFNKVTLADAGFIKQYGDCLGDIAARDLICAQKFNGLTVLPPLLTDEMIAQYTSALLAGTITSGWTFGAGAALQIPFAMQMAYRFNGIGVTQNVLYENQKLIANQFNSAIGKIQDSLSSAAPALGKLQDVVNQNAQALNTLVKQLSSNFGAISSVLNDILSRLDPPEAEVQIDRLITGRLQSLQTYVTQQLIRAAEIRASANLAATKMSECVLGQSKRVDFCGKGYQLMSFPQSAPHGVVFLNVTYVPAQEKNFTTAPAICNDGKAHFPREGVFVSNGTNWFVTQRNFYEPQIITTDNTFVSGNCDVVIGIVNNTVYDPLQPELDS

SEQ ID NO: 2910 - protein, 1147 aa, Artificial Sequence
  SARS-CoV-2/USA/WA8-UW5/2020__EPI_ISL_413486 spike protein (1-1147)(K986P_V987P_ H1048Q_H1064N_ H1083N_H1101N)
MFVFLVLLPLVSSQCVNLTTRTQLPPAYTNSFTRGVYYPDKVFRSSVLHSTQDLFLPFFSNVTWFHAIHVSGTNGTKRFDNPVLPFNDGVYFASTEKSNIIRGWIFGTTLDSKTQSLLIVNNATNVVIKVCEFQFCNDPFLGVYYHKNNKSWMESEFRVYSSANNCTFEYVSQPFLMDLEGKQGNFKNLREFVFKNIDGYFKIYSKHTPINLVRDLPQGFSALEPLVDLPIGINITRFQTLLALHRSYLTPGDSSSGWTAGAAAYYVGYLQPRTFLLKYNENGTITDAVDCALDPLSETKCTLKSFTVEKGIYQTSNFRVQPTESIVRFPNITNLCPFGEVFNATRFASVYAWNRKRISNCVADYSVLYNSASFSTFKCYGVSPTKLNDLCFTNVYADSFVIRGDEVRQIAPGQTGKIADYNYKLPDDFTGCVIAWNSNNLDSKVGGNYNYLYRLFRKSNLKPFERDISTEIYQAGSTPCNGVEGFNCYFPLQSYGFQPTNGVGYQPYRVVVLSFELLHAPATVCGPKKSTNLVKNKCVNFNFNGLTGTGVLTESNKKFLPFQQFGRDIADTTDAVRDPQTLEILDITPCSFGGVSVITPGTNTSNQVAVLYQDVNCTEVPVAIHADQLTPTWRVYSTGSNVFQTRAGCLIGAEYVNNSYECDIPIGAGICASYQTQTNSPRRARSVASQSIIAYTMSLGAENSVAYSNNSIAIPTNFTISVTTEILPVSMTKTSVDCTMYICGDSTECSNLLLQYGSFCTQLNRALTGIAVEQDKNTQEVFAQVKQIYKTPPIKDFGGFNFSQILPDPSKPSKRSFIEDLLFNKVTLADAGFIKQYGDCLGDIAARDLICAQKFNGLTVLPPLLTDEMIAQYTSALLAGTITSGWTFGAGAALQIPFAMQMAYRFNGIGVTQNVLYENQKLIANQFNSAIGKIQDSLSSTASALGKLQDVVNQNAQALNTLVKQLSSNFGAISSVLNDILSRLDPPEAEVQIDRLITGRLQSLQTYVTQQLIRAAEIRASANLAATKMSECVLGQSKRVDFCGKGYQLMSFPQSAPHGVVFLNVTYVPAQEKNFTTAPAICNDGKAHFPREGVFVSNGTNWFVTQRNFYEPQIITTDNTFVSGNCDVVIGIVNNTVYDPLQPELDS

SEQ ID NO: 2911 - protein, 1147 aa, Artificial Sequence
  SARS-CoV-2/England/20102000506/2020__EPI_ISL_415147 spike protein (1-1147)(K986P_V987P_ H1048Q_H1064N_ H1083N_H1101N)
MFVFLVLLPLVSSQCVNLTTRTQLPPAYTNSFTRGVYYPDKVFRSSVLHSTQDLFLPFFSNVTWFHAIHVSGTNGTKRFDNPVLPFNDGVYFASTEKSNIIRGWIFGTTLDSKTQSLLIVNNATNVVIKVCEFQFCNDPFLGVYYHKNNKSWMESEFRVYSSANNCTFEYVSQPFLMDLEGKQGNFKNLREFVFKNIDGYFKIYSKHTPINLVRDLPQGFSALEPLVDLPIGINITRFQTLLALHRSYLTPGDSSSGWTAGAAAYYVGYLQPRTFLLKYNENGTITDAVDCALDPLSETKCTLKSFTVEKGIYQTSNFRVQPTESIVRFPNITNLCPFGEVFNATRFASVYAWNRKRISNCVADYSVLYNSASFSTFKCYGVSPTKLNDLCFTNVYADSFVIRGDEVRQIAPGQTGKIADYNYKLPDDFTGCVIAWNSNNLDSKVGGNYNYLYRLFRKSNLKPFERDISTEIYQAGSTPCNGVEGFNCYFPLQSYGFQPTNGVGYQPYRVVVLSFELLHAPATVCGPKKSTNLVKNKCVNFNFNGLTGTGVLTESNKKFLPFQQFGRDIADTTDAVRDPQTLEILDITPCSFGGVSVITPGTNTSNQVAVLYQGVNCTEVPVAIHADQLTPTWRVYSTGSNVFQTRAGCLIGAEHVNNSYECDIPIGAGICASYQTQTNSPRRARSVASQSIIAYTMSLGAENSVAYSNNSIAIPTNFTISVTTEILPVSMTKTSVDCTMYICGDSTECSNLLLQYGSFCTQLNRALTGIAVEQDKNTQEVFAQVKQIYKTPPIKDFGGFNFSQILPDPSKPSKRSFIEDLLFNKVTLADAGFIKQYGYCLGDIAARDLICAQKFNGLTVLPPLLTDEMIAQYTSALLAGTITSGWTFGAGAALQIPFAMQMAYRFNGIGVTQNVLYENQKLIANQFNSAIGKIQDSLSSTASALGKLQDVVNQNAQALNTLVKQLSSNFGAISSVLNDILSRLDPPEAEVQIDRLITGRLQSLQTYVTQQLIRAAEIRASANLAATKMSECVLGQSKRVDFCGKGYQLMSFPQSAPHGVVFLNVTYVPAQEKNFTTAPAICNDGKAHFPREGVFVSNGTNWFVTQRNFYEPQIITTDNTFVSGNCDVVIGIVNNTVYDPLQPELDS

SEQ ID NO: 2912 - protein, 1147 aa, Artificial Sequence
  SARS-CoV-2/Belgium/VAG-03013/2020__EPI_ISL_415155 spike protein (1-1147)(K986P_V987P_ H1048Q_H1064N_ H1083N_H1101N)
MFVFLVLLPLVSSQCVNLTTRTQLPPAYTNSFTRGVYYPDKVFRSSVLHSTQDLFLPFFSNVTWFHAIHVSGTNGTKRFDNPVLPFNDGVYFASTEKSNIIRGWIFGTTLDSKTQSLLIVNNATNVVIKVCEFQFCNDPFLGVYYHKNNKSWMESEFRVYSSANNCTFEYVSQPFLMDLEGKQGNFKNLREFVFKNIDGYFKIYSKHTPINLVRDLPQGFSALEPLVDLPIGINITRFQTLLALHRSYLTPGDSSSGWTAGAAAYYVGYLQPRTFLLKYNENGTITDAVDCALDPLSETKCTLKSFTVEKGIYQTSNFRVQPTESIVRFPNITNLCPFGEVFNATRFASVYAWNRKRISNCVADYSVLYNSASFSTFKCYGVSPTKLNDLCFTNVYADSFVIRGDEVRQIAPGQTGKIADYNYKLPDDFTGCVIAWNSNNLDSKVGGNYNYLYRLFRKSNLKPFERDISTEIYQAGSTPCNGVEGFNCYFPLQSYGFQPTNGVGYQPYRVVVLSFELLHAPATVCGPKKSTNLVKNKCVNFNFNGLTGTGVLTESNKKFLPFQQFGRDIADTTDAVRDPQTLEILDITPCSFGGVSVITPGTNTSNQVAVLYQGVNCTEVPVAIHADQLTPTWRVYSTGSNVFQTRAGCLIGAEHVNNSYECDIPIGAGICASYQTQTNSPRRARSVASQSIIAYTMSLGAENSVAYSNNSIAIPTNFTISVTTEILPVSMTKTSVDCTMYICGDSTECSNLLLQYGSFCTQLNRALTGIAVEQDKNTQEVFAQVKQIYKTPPIKDFGGFNFSQILPDPSKPSKRSFIEDLLFNKVTLADAGFIKQYGDCLGDIAARDLICAQKFNGLTVLPPLLTDEMIAQYTSALLAGTITSGWTFGAGAALQIPFAMQMAYRFNGIGVTQNVLYENQKLIANQFNSAIGKIQDSLSSTATALGKLQDVVNQNAQALNTLVKQLSSNFGAISSVLNDILSRLDPPEAEVQIDRLITGRLQSLQTYVTQQLIRAAEIRASANLAATKMSECVLGQSKRVDFCGKGYQLMSFPQSAPHGVVFLNVTYVPAQEKNFTTAPAICNDGKAHFPREGVFVSNGTNWFVTQRNFYEPQIITTDNTFVSGNCDVVIGIVNNTVYDPLQPELDS

SEQ ID NO: 2913 - protein, 1147 aa, Artificial Sequence
  SARS-CoV-2/Belgium/BC-03016/2020__EPI_ISL_415157 spike protein (1-1147)(K986P_V987P_ H1048Q_H1064N_ H1083N_H1101N)
MFVFLVLLPLVSSQCVNLTTRTQLPPAYTNSFTRGVYYPDKVFRSSVLHSTQDLFLPFFSNVTWFHAIHVSGTNGTKRFDNPVLPFNDGVYFASTEKSNIIRGWIFGTTLDSKTQSLLIVNNATNVVIKVCEFQFCNDPFLGVYYHKNNKSWMESEFRVYSSANNCTFEYVSQPFLMDLEGKQGNFKNLREFVFKNIDGYFKIYSKHTPINLVRDLPQGFSALEPLVDLPIGINITRFQTLLALHRSYLTPGDSSSGWTAGAAAYYVGYLQPRTFLLKYNENGTITDAVDCALDPLSETKCTLKSFTVEKGIYQTSNFRVQPTESIVRFPNITNLCPFGEVFNATRFASVYAWNRKRISNCVADYSVLYNSASFSTFKCYGVSPTKLNDLCFTNVYADSFVIRGDEVRQIAPGQTGKIADYNYKLPDDFTGCVIAWNSNNLDSKVGGNYNYLYRLFRKSNLKPFERDISTEIYQAGSTPCNGVEGFNCYFPLQSYGFQPTNGVGYQPYRVVVLSFELLHAPATVCGPKKSTNLVKNKCVNFNFNGLTGTGVLTESNKKFLPFQQFGRDIADTTDAVRDPQTLEILDITPCSFGGVSVITPGTNTSNQVAVLYQGVNCTEVPVAIHADQLTPTWRVYSTGSNVFQTRAGCLIGAEHVNNSYECDIPIGAGICASYQTQTNSPRRARSVASQSIIAYTMSLGAENSVAYSNNSIAIPTNFTISVTTEILPVSMTKTSVDCTMYICGDSTECSNLLLQYGSFCTQLNRALTGIAVEQDKNTQEVFAQVKQIYKTPPIKDFGGFNFSQILPDPSKPSKRSFIEDLLFNKVTLADAGFIKQYGDCLGDIAARDLICAQKFNGLTVLPPLLTDEMIAQYTSALLAGTITSGWTFGAGAALQIPFAMQMAYRFNGIGVTQNVLYENQKLIANQFNSAIGKIQDSLSSTAPALGKLQDVVNQNAQALNTLVKQLSSNFGAISSVLNDILSRLDPPEAEVQIDRLITGRLQSLQTYVTQQLIRAAEIRASANLAATKMSECVLGQSKRVDFCGKGYQLMSFPQSAPHGVVFLNVTYVPAQEKNFTTAPAICNDGKAHFPREGVFVSNGTNWFVTQRNFYEPQIITTDNTFVSGNCDVVIGIVNNTVYDPLQPELDS

SEQ ID NO: 2914 - protein, 1147 aa, Artificial Sequence
  SARS-CoV-2/Germany/BavPat3/2020__EPI_ISL_414521 spike protein (1-1147)(K986P_V987P_ H1048Q_H1064N_ H1083N_H1101N)
MFVFLVLLPLVSSQCVNLTTRTQLPPAYTNSFTRGVYYPDKVFRSSVLHSTQDLFLPFFSNVTWFHAIHVSGTNGTKRFDNPVLPFNDGVYFASTEKSNIIRGWIFGTTLDSKTQSLLIVNNATNVVIKVCEFQFCNDPFLGVYYHKNNKSWMESEFRVYSSANNCTFEYVSQPFLMDLEGKQGNFKNLREFVFKNIDGYFKIYSKHTPINLVRDLPQGFSALEPLVDLPIGINITRFQTLLALHRSYLTPGDSSSGWTAGAAAYYVGYLQPRTFLLKYNENGTITDAVDCALDPLSETKCTLKSFTVEKGIYQTSNFRVQPTESIVRFPNITNLCPFGEVFNATRFASVYAWNRKRISNCVADYSVLYNSASFSTFKCYGVSPTKLNDLCFTNVYADSFVIRGDEVRQIAPGQTGKIADYNYKLPDDFTGCVIAWNSNNLDSKVGGNYNYLYRLFRKSNLKPFERDISTEIYQAGSTPCNGVEGFNCYFPLQSYGFQPTNGVGYQPYRVVVLSFELLHAPATVCGPKKSTNLVKNKCVNFNFNGLTGTGVLTESNKKFLPFQQFGRDIADTTDAVRDPQTLEILDITPCSFGGVSVITPGTNTSNQVAVLYQDVNCTEVPVAIHADQLTPTWRVYSTGSNVFQTRAGCLIGAEHVNNSYECDIPIGAGICASYQTQTNSPRRARSVASQSIIAYTMSLGAENSVAYSNNSIAIPTNFTISVTTEILPVSMTKTSVDCTMYICGDSTECSNLLLQYGSFCTQLNRALTGIAVEQDKNTQQVFAQVKQIYKTPPIKDFGGFNFSQILPDPSKPSKRSFIEDLLFNKVTLADAGFIKQYGDCLGDIAARDLICAQKFNGLTVLPPLLTDEMIAQYTSALLAGTITSGWTFGAGAALQIPFAMQMAYRFNGIGVTQNVLYENQKLIANQFNSAIGKIQDSLSSTASALGKLQDVVNQNAQALNTLVKQLSSNFGAISSVLNDILSRLDPPEAEVQIDRLITGRLQSLQTYVTQQLIRAAEIRASANLAATKMSECVLGQSKRVDFCGKGYQLMSFPQSAPHGVVFLNVTYVPAQEKNFTTAPAICNDGKAHFPREGVFVSNGTNWFVTQRNFYEPQIITTDNTFVSGNCDVVIGIVNNTVYDPLQPELDS

SEQ ID NO: 2915 - protein, 1147 aa, Artificial Sequence
  SARS-CoV-2/France/HF1805/2020__EPI_ISL_414628 spike protein (1-1147)(K986P_V987P_ H1048Q_H1064N_ H1083N_H1101N)
MFVFLVLLPLVSSQCVNLTTRTQLPPAYTNSFTRGVYYPDKVFRSSVLHSTQDLFLPFFSNVTWFHAIHVSGTNGTKRFDNPVLPFNDGVYFASTEKSNIIRGWIFGTTLDSKTQSLLIVNNATNVVIKVCEFQFCNDPFLGVYYHKNNKSWMESEFRVYSSANNCTFEYVSQPFLMDLEGKQGNFKNLREFVFKNIDGYFKIYSKHTPINLVRDLPQGFSALEPLVDLPIGINITRFQTLLALHRSYLTPGDSSSGWTAGAAAYYVGYLQPRTFLLKYNENGTITDAVDCALDPLSETKCTLKSFTVEKGIYQTSNFRVQPTESIVRFPNITNLCPFGEVFNATRFASVYAWNRKRISNCVADYSVLYNSASFSTFKCYGVSPTKLNDLCFTNVYADSFVIRGDEVRQIAPGQTGKIADYNYKLPDDFTGCVIAWNSNNLDSKVGGNYNYLYRLFRKSNLKPFERDISTEIYQAGSTPCNGVEGFNCYFPLQSYGFQPTNGVGYQPYRVVVLSFELLHAPATVCGPKKSTNLVKNKCVNFNFNGLTGTGVLTESNKKFLPFQQFGRDIADTTDAVRDPQTLEILDITPCSFGGVSVITPGTNTSNQVAVLYQGVNCTEVPVAIHADQLTPTWRVYSTGSNVFQTRAGCLIGAEHVNNSYECDIPIGAGICASYQTQTNSPRRARSVASQSIIAYTMSLGAENSVAYSNNSIAIPTNFTISVTTEILPVSMTKTSVDCTMYICGDSTECSNLLLQYGSFCTQLNRALTGIAVEQDKNTQEVFAQVKQIYKTPPIKDFGGFNFSQILPDPSKPSKRSFIEDLLFNKVTLADAGFIKQYGDCLGDIAARDLICAQKFNGLTVLPPLLTDEMIAQYTSALLAGTITSGWTFGAGAALQIPFAMQMAYRFNGIGVTQNVLYENQKLIANQFNSAIGKIQDSLSSTASALGKLQDVVNQNAQALNTLVKQLSSNFGAISSVLNDILSRLDPPEAEVQIDRLITGRLQSLQTYVTQQLIRAAEIRASANLAATKMSECVLGQSKRVDFCGKGYQLMSFPQSAPHGVVFLNVTYVPAQEKNFTTAPAICNDGKAHFPREGVFVSNGTNWFVTQRNFYEPQIITTDNTFVSGNCDVVIGVVNNTVYDPLQPELDS

SEQ ID NO: 2916 - protein, 1147 aa, Artificial Sequence
  SARS-CoV-2/Netherlands/ZuidHolland_9/2020__EPI_ISL_414445 spike protein (1-1147)(K986P_V987P_ H1048Q_H1064N_ H1083N_H1101N)
MFVFLVLLPLVSSQCVNLTTRTQLPPAYTNSFTRGVYYPDKVFRSSVLHSTQDLFLPFFSNVTWFHAIHVSGTNGTKRFDNPVLPFNDGVYFASTEKSNIIRGWIFGTTLDSKTQSLLIVNNATNVVIKVCEFQFCNDPFLGVYYHKNNKSWMESEFRVYSSANNCTFEYVSQPFLMDLEGKQGNFKNLREFVFKNIDGYFKIYSKHTPINLVRDLPQGFSALEPLVDLPIGINITRFQTLLALHRSYLTPGDSSSGWTAGAAAYYVGYLQPRTFLLKYNENGTITDAVDCALDPLSETKCTLKSFTVEKGIYQTSNFRVQPTESIVRFPNITNLCPFGEVFNATRFASVYAWNRKRISNCVADYSVLYNSASFSTFKCYGVSPTKLNDLCFTNVYADSFVIRGDEVRQIAPGQTGKIADYNYKLPDDFTGCVIAWNSNNLDSKVGGNYNYLYRLFRKSNLKPFERDISTEIYQAGSTPCNGVEGFNCYFPLQSYGFQPTNGVGYQPYRVVVLSFELLHAPATVCGPKKSTNLVKNKCVNFNFNGLTGTGVLTESNKKFLPFQQFGRDIADTTDAVRDPQTLEILDITPCSFGGVSVITPGTNTSNQVAVLYQGVNCTEVPVAIHADQLTPTWRVYSTGSNVFQTRAGCLIGAEHVNNSYECDIPIGAGICASYQTQTNSPRRARSVASQSIIAYTMSLGAENSVAYSNNSIAIPTNFTISVTTEILPVSMTKTSVDCTMYICGDSTECSNLLLQYGSFCTQLNRALTGIAVEQDKNTQEVFAQVKQIYKTPPIKDFGGFNFSQILPDPSKPSKRSFIEDLLFNKVTLADAGFIKQYGDCLGDIAARDLICVQKFNGLTVLPPLLTDEMIAQYTSALLAGTITSGWTFGAGAALQIPFAMQMAYRFNGIGVTQNVLYENQKLIANQFNSAIGKIQDSLSSTASALGKLQDVVNQNAQALNTLVKQLSSNFGAISSVLNDILSRLDPPEAEVQIDRLITGRLQSLQTYVTQQLIRAAEIRASANLAATKMSECVLGQSKRVDFCGKGYQLMSFPQSAPHGVVFLNVTYVPAQEKNFTTAPAICNDGKAHFPREGVFVSNGTNWFVTQRNFYEPQIITTDNTFVSGNCDVVIGIVNNTVYDPLQPELDS

SEQ ID NO: 2917 - protein, 1147 aa, Artificial Sequence
  SARS-CoV-2/Finland/FIN03032020A/2020__EPI_ISL_413602 spike protein (1-1147)(K986P_V987P_ H1048Q_H1064N_ H1083N_H1101N)
MFVFLVLLPLVSSQCVNLTTRTQLPPAYTNSFTRGVYYPDKVFRSSVLHSTQDLFLPFFSNVTWFHAIHVSGTNGTKRFDNPVLPFNDGVYFASTEKSNIIRGWIFGTTLDSKTQSLLIVNNATNVVIKVCEFQFCNDPFLGVYYHKNNKSWMESEFRVYSSANNCTFEYVSQPFLMDLEGKQGNFKNLREFVFKNIDGYFKIYSKHTPINLVRDLPQGFSALEPLVDLPIGINITRFQTLLALHRSYLTPGDSSSGWTAGAAAYYVGYLQPRTFLLKYNENGTITDAVDCALDPLSETKCTLKSFTVEKGIYQTSNFRVQPTESIVRFPNITNLCPFGEVFNATRFASVYAWNRKRISNCVADYSVLYNSASFSTFKCYGVSPTKLNDLCFTNVYADSFVIRGDEVRQIAPGQTGKIADYNYKLPDDFTGCVISWNSNNLDSKVGGNYNYLYRLFRKSNLKPFERDISTEIYQAGSTPCNGVEGFNCYFPLQSYGFQPTNGVGYQPYRVVVLSFELLHAPATVCGPKKSTNLVKNKCVNFNFNGLTGTGVLTESNKKFLPFQQFGRDIADTTDAVRDPQTLEILDITPCSFGGVSVITPGTNTSNQVAVLYQGVNCTEVPVAIHADQLTPTWRVYSTGSNVFQTRAGCLIGAEHVNNSYECDIPIGAGICASYQTQTNSPRRARSVASQSIIAYTMSLGAENSVAYSNNSIAIPTNFTISVTTEILPVSMTKTSVDCTMYICGDSTECSNLLLQYGSFCTQLNRALTGIAVEQDKNTQEVFAQVKQIYKTPPIKDFGGFNFSQILPDPSKPSKRSFIEDLLFNKVTLADAGFIKQYGDCLGDIAARDLICAQKFNGLTVLPPLLTDEMIAQYTSALLAGTITSGWTFGAGAALQIPFAMQMAYRFNGIGVTQNVLYENQKLIANQFNSAIGKIQDSLSSTASALGKLQDVVNQNAQALNTLVKQLSSNFGAISSVLNDILSRLDPPEAEVQIDRLITGRLQSLQTYVTQQLIRAAEIRASANLAATKMSECVLGQSKRVDFCGKGYQLMSFPQSAPHGVVFLNVTYVPAQEKNFTTAPAICNDGKAHFPREGVFVSNGTNWFVTQRNFYEPQIITTDNTFVSGNCDVVIGIVNNTVYDPLQPELDS

SEQ ID NO: 2918 - protein, 1147 aa, Artificial Sequence
  SARS-CoV-2/France/GE1977/2020__EPI_ISL_414632 spike protein (1-1147)(K986P_V987P_ H1048Q_H1064N_ H1083N_H1101N)
MFVFLVLLPLVSSQCVNLTTRTQLPPAYTNSFTRGVYYPDKVFRSSVLHSTQDLFLPFFSNVTWFHAIHVSGTNGTKRFDNPVLPFNDGVYFASTEKSNIIRGWIFGTTLDSKTQSLLIVNNATNVVIKVCEFQFCNDPFLGVYYHKNNKSWMESEFRVYSSANNCTFEYVSQPFLMDLEGKQGNFKNLREFVFKNIDGYFKIYSKHTPINLVRDLPQGFSALEPLVDLPIGINITRFQTLLALHRSYLTPGDSSSGWTAGAAAYYVGYLQPRTFLLKYNENGTITDAVDCALDPLSETKCTLKSFTVEKGIYQTSNFRVQPTESIVRFPNITNLCPFGEVFNATRFASVYAWNRKRISNCVADYSVLYNSASFSTFKCYGVSPTKLNDLCFTNVYADSFVIRGDEVRQIAPGQTGKIADYNYKLPDDFTGCVIAWNSNNLDSKVGGNYNYLYRLFRKSNLKPFERDISTEIYQAGSTPCNGVEGFNCYFPLQSYGFQPTNGVGYQPYRVVVLSFELLHAPATVCGPKKSTNLVKNKCVNFNFNGLTGTGVLTESNKKFLPFQQFGRDIADTTDAVRDPQTLEILDITPCSFGGVSVITPGTNTSNQVAVLYQGVNCTEVPVAIHADQLTPTWRVYSTGSNVFQTRAGCLIGAEHVNNSYECDIPIGAGICASYQTQTNSPRRARSVASQSIIAYTMSLGAENSVAYSNNSIAIPTNFTISVTTEILPVSMTKTSVDCTMYICGDSTECSNLLLQYGSFCTQLNRALTGIAVEQDKNTQEVFAQVKQIYKTPPIKDFGGFNFSQILPDPSKPSKRSFIEDLLFNKVTLADAGFIKQYGDCLGDIAARDLICAQKFNGLTVLPPLLTDEMIAQYTSALLAGTITSGWTFGAGAALQIPFAMQMAYRFNGIGVTQNVLYENQKLIANQFNSAIGKIQDSLFSTASALGKLQDVVNQNAQALNTLVKQLSSNFGAISSVLNDILSRLDPPEAEVQIDRLITGRLQSLQTYVTQQLIRAAEIRASANLAATKMSECVLGQSKRVDFCGKGYQLMSFPQSAPHGVVFLNVTYVPAQEKNFTTAPAICNDGKAHFPREGVFVSNGTNWFVTQRNFYEPQIITTDNTFVSGNCDVVIGIVNNTVYDPLQPELDS

SEQ ID NO: 2919 - protein, 1147 aa, Artificial Sequence
  SARS-CoV-2/Finland/FIN-313/2020__EPI_ISL_414641 spike protein (1-1147)(K986P_V987P_ H1048Q_H1064N_ H1083N_H1101N)
MFVFLVLLPLVSSQCVNLTTRTQLPPAYTNSFTRGVYYPDKVFRSSVLHSTQDLFLPFFSNVTWFHAIHVSGTNGTKRFDNPVLPFNDGVYFASTEKSNIIRGWIFGTTLDSKTQSLLIVNNATNVVIKVCEFQFCNDPFLGVYYHKNNKSWMESEFRVYSSANNCTFEYVSQPFLMDLEGKQGNFKNLREFVFKNIDGYFKIYSKHTPINLVRDLPQGFSALEPLVDLPIGINITRFKTLLALHRSYLTPGDSSSGWTAGAAAYYVGYLQPRTFLLKYNENGTITDAVDCALDPLSETKCTLKSFTVEKGIYQTSNFRVQPTESIVRFPNITNLCPFGEVFNATRFASVYAWNRKRISNCVADYSVLYNSASFSTFKCYGVSPTKLNDLCFTNVYADSFVIRGDEVRQIAPGQTGKIADYNYKLPDDFTGCVIAWNSNNLDSKVGGNYNYLYRLFRKSNLKPFERDISTEIYQAGSTPCNGVEGFNCYFPLQSYGFQPTNGVGYQPYRVVVLSFELLHAPATVCGPKKSTNLVKNKCVNFNFNGLTGTGVLTESNKKFLPFQQFGRDIADTTDAVRDPQTLEILDITPCSFGGVSVITPGTNTSNQVAVLYQGVNCTEVPVAIHADQLTPTWRVYSTGSNVFQTRAGCLIGAEHVNNSYECDIPIGAGICASYQTQTNSPRRARSVASQSIIAYTMSLGAENSVAYSNNSIAIPTNFTISVTTEILPVSMTKTSVDCTMYICGDSTECSNLLLQYGSFCTQLNRALTGIAVEQDKNTQEVFAQVKQIYKTPPIKDFGGFNFSQILPDPSKPSKRSFIEDLLFNKVTLADAGFIKQYGDCLGDIAARDLICAQKFNGLTVLPPLLTDEMIAQYTSALLAGTITSGWTFGAGAALQIPFAMQMAYRFNGIGVTQNVLYENQKLIANQFNSAIGKIQDSLSSTASALGKLQDVVNQNAQALNTLVKQLSSNFGAISSVLNDILSRLDPPEAEVQIDRLITGRLQSLQTYVTQQLIRAAEIRASANLAATKMSECVLGQSKRVDFCGKGYQLMSFPQSAPHGVVFLNVTYVPAQEKNFTTAPAICNDGKAHFPREGVFVSNGTNWFVTQRNFYEPQIITTDNTFVSGNCDVVIGIVNNTVYDPLQPELDS

SEQ ID NO: 2920 - protein, 1147 aa, Artificial Sequence
  SARS-CoV-2/Netherlands/ZuidHolland_2/2020__EPI_ISL_414556 spike protein (1-1147)(K986P_V987P_ H1048Q_H1064N_ H1083N_H1101N)
MFVFLVLLPLVSSQCVNLTTRTQLPPAYTNSFTRGVYYPDKVFRSSVLHSTQDLFLPFFSNVTWFHAIHVSGTNGTKRFDNPVLPFNDGVYFASTEKSNIIRGWIFGTTLDSKTQSLLIVNNATNVVIKVCEFQFCNDPFLGVYYHKNNKSWMESEFRVYSSANNCTFEYVSQPFLMDLEGKQGNFKNLREFVFKNIDGYFKIYSKHTPINLVRDLPQGFSALEPLVDLPIGINITRFQTLLALHRSYLTPGDSSSGWTAGAAAYYVGYLQPRTFLLKYNENGTITDAVDCALDPLSETKCTLKSFTVEKGIYQTSNFRVQPTESIVRFPNITNLCPFGEVFNATRFASVYAWNRKRISNCVADYSVLYNSASFSTFKCYGVSPTKLNDLCFTNVYADSFVIRGDEVRQIAPGQTGKIADYNYKLPDDFTGCVIAWNSNNLDSKVGGNYNYLYRLFRKSNLKPFERDISTEIYQAGSTPCNGVEGFNCYFPLQSYGFQPTNGVGYQPYRVVVLSFELLHAPATVCGPKKSTNLVKNKCVNFNFNGLTGTGVLTESNKKFLPFQQFGRDIADTTDAVRDPQTLEILDITPCSFGGVSVITPGTNTSNQVAVLYQGVNCTEVPVAIHADQLTPTWRVYSTGSNVFQTRAGCLIGAEHVNNSYECDIPIGAGICASYQTQTNSPRRARSVASQSIIAYTMSLGAENSVAYSNNSIAIPTNFTISVTTEILPVSMTKTSVDCTMYICGDSTECSNLLLQYGSFCTQLNRALTGIALEQDKNTQEVFAQVKQIYKTPPIKDFGGFNFSQILPDPSKPSKRSFIEDLLFNKVTLADAGFIKQYGDCLGDIAARDLICAQKFNGLTVLPPLLTDEMIAQYTSALLAGTITSGWTFGAGAALQIPFAMQMAYRFNGIGVTQNVLYENQKLIANQFNSAIGKIQDSLSSTASALGKLQDVVNQNAQALNTLVKQLSSNFGAISSVLNDILSRLDPPEAEVQIDRLITGRLQSLQTYVTQQLIRAAEIRASANLAATKMSECVLGQSKRVDFCGKGYQLMSFPQSAPHGVVFLNVTYVPAQEKNFTTAPAICNDGKAHFPREGVFVSNGTNWFVTQRNFYEPQIITTDNTFVSGNCDVVIGIVNNTVYDPLQPELDS

SEQ ID NO: 2921 - protein, 1147 aa, Artificial Sequence
  SARS-CoV-2/USA/WA-UW31/2020__EPI_ISL_414618 spike protein (1-1147)(K986P_V987P_ H1048Q_H1064N_ H1083N_H1101N)
MFVFLVLLPLVSSQCVNLTTRTQLPPAYTNSFTRGVYYPDKVFRSSVLHSTQDLFLPFFSNVTWFHAIHVSGTNGTKRFDNPVLPFNDGVYFASTEKSNIIRGWIFGTTLDSKTQSLLIVNNATNVVIKVCEFQFCNDPFLGVYYHKNNKSWMESEFRVYSSANNCTFEYVSQPFLMDLEGKQGNFKNLREFVFKNIDGYFKIYSKHTPINLVRDLPQGFSALEPLVDLPIGINITRFQTLLALHRSYLTPGDSSSGWTAGAAAYYVGYLQPRTFLLKYNENGTITDAVDCALDPLSETKCTLKSFTVEKGIYQTSNFRVQPTESIVRFPNITNLCPFGEVFNATRFASVYAWNRKRISNCVADYSVLYNSASFSTFKCYGVSPTKLNDLCFTNVYADSFVIRGDEVRQIAPGQTGKIADYNYKLPDDFTGCVIAWNSNNLDSKVGGNYNYLYRLFRKSNLKPFERDISTEIYQAGSTPCNGAEGFNCYFPLQSYGFQPTNGVGYQPYRVVVLSFELLHAPATVCGPKKSTNLVKNKCVNFNFNGLTGTGVLTESNKKFLPFQQFGRDIADTTDAVRDPQTLEILDITPCSFGGVSVITPGTNTSNQVAVLYQDVNCTEVPVAIHADQLTPTWRVYSTGSNVFQTRAGCLIGAEHVNNSYECDIPIGAGICASYQTQTNSPRRARSVASQSIIAYTMSLGAENSVAYSNNSIAIPTNFTISVTTEILPVSMTKTSVDCTMYICGDSTECSNLLLQYGSFCTQLNRALTGIAVEQDKNTQEVFAQVKQIYKTPPIKDFGGFNFSQILPDPSKPSKRSFIEDLLFNKVTLADAGFIKQYGDCLGDIAARDLICAQKFNGLTVLPPLLTDEMIAQYTSALLAGTITSGWTFGAGAALQIPFAMQMAYRFNGIGVTQNVLYENQKLIANQFNSAIGKIQDSLSSTASALGKLQDVVNQNAQALNTLVKQLSSNFGAISSVLNDILSRLDPPEAEVQIDRLITGRLQSLQTYVTQQLIRAAEIRASANLAATKMSECVLGQSKRVDFCGKGYQLMSFPQSAPHGVVFLNVTYVPAQEKNFTTAPAICNDGKAHFPREGVFVSNGTNWFVTQRNFYEPQIITTDNTFVSGNCDVVIGIVNNTVYDPLQPELDS

SEQ ID NO: 2922 - protein, 1147 aa, Artificial Sequence
  SARS-CoV-2/South Korea/SNU01/2020__EPI_ISL_411929 spike protein (1-1147)(K986P_V987P_ H1048Q_H1064N_ H1083N_H1101N)
MFVFLVLLPLVSSQCVNLTTRTQLPPAYTNSFTRGVYYPDKVFRSSVLHSTQDLFLPFFSNVTWFHAIHVSGTNGTKRFDNPVLPFNDGVYFASTEKSNIIRGWIFGTTLDSKTQSLLIVNNATNVVIKVCEFQFCNDPFLGVYYHKNNKSWMESEFRVYSSANNCTFEYVSQPFLMDLEGKQGNFKNLREFVFKNIDGYFKIYSKHTPINLVRDLPQGFWALEPLVDLPIGINITRFQTLLALHRSYLTPGDSSSGWTAGAAAYYVGYLQPRTFLLKYNENGTITDAVDCALDPLSETKCTLKSFTVEKGIYQTSNFRVQPTESIVRFPNITNLCPFGEVFNATRFASVYAWNRKRISNCVADYSVLYNSASFSTFKCYGVSPTKLNDLCFTNVYADSFVIRGDEVRQIAPGQTGKIADYNYKLPDDFTGCVIAWNSNNLDSKVGGNYNYLYRLFRKSNLKPFERDISTEIYQAGSTPCNGVEGFNCYFPLQSYGFQPTNGVGYQPYRVVVLSFELLHAPATVCGPKKSTNLVKNKCVNFNFNGLTGTGVLTESNKKFLPFQQFGRDIADTTDAVRDPQTLEILDITPCSFGGVSVITPGTNTSNQVAVLYQDVNCTEVPVAIHADQLTPTWRVYSTGSNVFQTRAGCLIGAEHVNNSYECDIPIGAGICASYQTQTNSPRRARSVASQSIIAYTMSLGAENSVAYSNNSIAIPTNFTISVTTEILPVSMTKTSVDCTMYICGDSTECSNLLLQYGSFCTQLNRALTGIAVEQDKNTQEVFAQVKQIYKTPPIKDFGGFNFSQILPDPSKPSKRSFIEDLLFNKVTLADAGFIKQYGDCLGDIAARDLICAQKFNGLTVLPPLLTDEMIAQYTSALLAGTITSGWTFGAGAALQIPFAMQMAYRFNGIGVTQNVLYENQKLIANQFNSAIGKIQDSLSSTASALGKLQDVVNQNAQALNTLVKQLSSNFGAISSVLNDILSRLDPPEAEVQIDRLITGRLQSLQTYVTQQLIRAAEIRASANLAATKMSECVLGQSKRVDFCGKGYQLMSFPQSAPHGVVFLNVTYVPAQEKNFTTAPAICNDGKAHFPREGVFVSNGTNWFVTQRNFYEPQIITTDNTFVSGNCDVVIGIVNNTVYDPLQPELDS

SEQ ID NO: 2923 - protein, 1147 aa, Artificial Sequence
  SARS-CoV-2/China/WF0004/2020__EPI_ISL_413694 spike protein (1-1147)(K986P_V987P_ H1048Q_H1064N_ H1083N_H1101N)
MFVFLVLLPLVSSQCVNLTTRTQLPPAYTNSFTRGVYYPDKVFRSSVLHSTQDLFLPFFSNVTWFHAIHVSGTNGTKRFDNPVLPFNDGVYFASTEKSNIIRGWIFGTTLDSKTQSLLIVNNATNVVIKVCEFQFCNDPFLGVYYHKNNKSWTESEFRVYSSANNCTFEYVSQPFLMDLEGKQGNFKNLREFVFKNIDGYFKIYSKHTPINLVRDLPQGFSALEPLVDLPIGINITRFQTLLALHRSYLTPGDSSSGWTAGAAAYYVGYLQPRTFLLKYNENGTITDAVDCALDPLSETKCTLKSFTVEKGIYQTSNFRVQPTESIVRFPNITNLCPFGEVFNATRFASVYAWNRKRISNCVADYSVLYNSASFSTFKCYGVSPTKLNDLCFTNVYADSFVIRGDEVRQIAPGQTGKIADYNYKLPDDFTGCVIAWNSNNLDSKVGGNYNYLYRLFRKSNLKPFERDISTEIYQAGSTPCNGVEGFNCYFPLQSYGFQPTNGVGYQPYRVVVLSFELLHAPATVCGPKKSTNLVKNKCVNFNFNGLTGTGVLTESNKKFLPFQQFGRDIADTTDAVRDPQTLEILDITPCSFGGVSVITPGTNTSNQVAVLYQDVNCTEVPVAIHADQLTPTWRVYSTGSNVFQTRAGCLIGAEHVNNSYECDIPIGAGICASYQTQTNSPRRARSVASQSIIAYTMSLGAENSVAYSNNSIAIPTNFTISVTTEILPVSMTKTSVDCTMYICGDSTECSNLLLQYGSFCTQLNRALTGIAVEQDKNTQEVFAQVKQIYKTPPIKDFGGFNFSQILPDPSKPSKRSFIEDLLFNKVTLADAGFIKQYGDCLGDIAARDLICAQKFNGLTVLPPLLTDEMIAQYTSALLAGTITSGWTFGAGAALQIPFAMQMAYRFNGIGVTQNVLYENQKLIANQFNSAIGKIQDSLSSTASALGKLQDVVNQNAQALNTLVKQLSSNFGAISSVLNDILSRLDPPEAEVQIDRLITGRLQSLQTYVTQQLIRAAEIRASANLAATKMSECVLGQSKRFDFCGKGYQLMSFPQSAPHGVVFLNVTYVPAQEKNFTTAPAICNDGKAHFPREGVFVSNGTNWFVTQRNFYEPQIITTDNTFVSGNCDVVIGIVNNTVYDPLQPELDS

SEQ ID NO: 2924 - protein, 1147 aa, Artificial Sequence
  SARS-CoV-2/China/WF0028/2020__EPI_ISL_413791 spike protein (1-1147)(K986P_V987P_ H1048Q_H1064N_ H1083N_H1101N)
MFVFLVLLPLVSSQCVNLTTRTQLPPAYTNSFTRGVYYPDKVFRSSVLHSTQDLFLPFFSNVTWFHAIHVSGTNGTKRFDNPVLPFNDGVYFASTEKSNIIRGWIFGTTLDSKTQSLLIVNNATNVVIKVCEFQFCNDPFLGVYYHKNNKSWMESEFRVYSSANNCTFEYVSQPFLMDLEGKQGNFKNLREFVFKNIDGYFKIYSKHTPINLVRDLPQGFSALEPLVDLPIGINITRFQTLLALHRSYLTPGDSSSGWTAGAAAYYVGYLQPRTFLLKYNENGTITDAVDCALDPLSETKCTLKSFTVEKGIYQTSNFRVQPTESIVRFPNITNLCPFGEVFNATRFASVYAWNRKRISNCVADYSVLYNSASFSTFKCYGVSPTKLNDLCFTNVYADSFVIRGDEVRQIAPGQTGKIADYNYKLPDDFTGCVIAWNSNNLDSKVGGNYNYLYRLFRKSNLKPFERDISTEIYQAGSTPCNGVEGFNCYFPLQSYGFQPTNGVGYQPYRVVVLSFELLHAPATVCGPKKSTNLVKNKCVNFNFNGLTGTGVLTESNKKFLPFQQFGRDIADTTDAVRDPQTLEILDITPCSFGGVSVITPGTNTSNQVAVLYQDVNCTEVPVAIHADQLTPTWRVYSTGSNVFQTRAGCLIGAEHVNNSYECDIPIGAGICASYQTQTNSPRRARSVASQSIIAYTMSLGAENSVAYSNNSIAIPTNFTISVTTEILPVSMTKTSVDCTMYICGDSTECSNLLLQYGSFCTQLNRALTGIAVEQDKNTQEVFAQVKQIYKTPPIKDFGGFNFSQILPDPSKPSKRSFIEDLLFNKVTLADAGFIKQYGDCLGDIAARDLICAQKFNGLTVLPPLLTDEMIAQYTSALLAGTITSGWTFGAGAALQIPFAMQMAYRFNGIGVTQNVLYENQKLIANQFNSAIGKIQDSLSSTASALGKLQDVVNQNAQALNTLVKQLSSNFGAISSVLNDILSRLDPPEAEVQIDRLITGRLQSLQTYVTQQLIRAAEIRASANLAATKMSECVLGQSKRVDFCGKGYQLMSFPQSAPHGVVFLNVTYVPAQEKNFTTAPAICNDGKAHFPREGVFVSNGTNWFVTQRNFYEPQIITTDNTFVSGNCDVVIGIVNNTVYDPLQPELES

SEQ ID NO: 2925 - protein, 1147 aa, Artificial Sequence
  SARS-CoV-2/2019-nCoV/USA-CruiseA-18/2020__MT159716.1 spike protein (1-1147)(K986P_V987P_ H1048Q_H1064N_ H1083N_H1101N)
MFVFLVLLPLVSSQCVNLTTRTQLPPAYTNSFTRGVYYPDKVFRSSVLHSTQDLFLPFFSNVTWFHAIHVSGTNGTKRFDNPVLPFNDGVYFASTEKSNIIRGWIFGTTLDSKTQSLLIVNNATNVVIKVCEFQFCNDPFLGVYYHKNNKSWMESELRVYSSANNCTFEYVSQPFLMDLEGKQGNFKNLREFVFKNIDGYFKIYSKHTPINLVRDLPQGFSALEPLVDLPIGINITRFQTLLALHRSYLTPGDSSSGWTAGAAAYYVGYLQPRTFLLKYNENGTITDAVDCALDPLSETKCTLKSFTVEKGIYQTSNFRVQPTESIVRFPNITNLCPFGEVFNATRFASVYAWNRKRISNCVADYSVLYNSASFSTFKCYGVSPTKLNDLCFTNVYADSFVIRGDEVRQIAPGQTGKIADYNYKLPDDFTGCVIAWNSNNLDSKVGGNYNYLYRLFRKSNLKPFERDISTEIYQAGSTPCNGVEGFNCYFPLQSYGFQPTNGVGYQPYRVVVLSFELLHAPATVCGPKKSTNLVKNKCVNFNFNGLTGTGVLTESNKKFLPFQQFGRDIADTTDAVRDPQTLEILDITPCSFGGVSVITPGTNTSNQVAVLYQDVNCTEVPVAIHADQLTPTWRVYSTGSNVFQTRAGCLIGAEHVNNSYECDIPIGAGICASYQTQTNSPRRARSVASQSIIAYTMSLGAENSVAYSNNSIAIPTNFTISVTTEILPVSMTKTSVDCTMYICGDSTECSNLLLQYGSFCTQLNRALTGIAVEQDKNTQEVFAQVKQIYKTPPIKDFGGFNFSQILPDPSKPSKRSFIEDLLFNKVTLADAGFIKQYGDCLGDIAARDLICAQKFNGLTVLPPLLTDEMIAQYTSALLAGTITSGWTFGAGAALQIPFAMQMAYRFNGIGVTQNVLYENQKLIANQFNSAIGKIQDSLSSTASALGKLQDVVNQNAQALNTLVKQLSSNFGAISSVLNDILSRLDPPEAEVQIDRLITGRLQSLQTYVTQQLIRAAEIRASANLAATKMSECVLGQSKRVDFCGKGYQLMSFPQSAPHGVVFLNVTYVPAQEKNFTTAPAICNDGKAHFPREGVFVSNGTNWFVTQRNFYEPQIITTDNTFVSGNCDVVIGIVNNTVYDPLQPELDS

SEQ ID NO: 2926 - protein, 1147 aa, Artificial Sequence
  SARS-CoV-2/SARS-CoV-2/Yunnan-01/human/2020/CHN__MT049951.1 spike protein (1-1147)(K986P_V987P_ H1048Q_H1064N_ H1083N_H1101N)
MFVFLVLLPLVSSQCVNLTTRTQLPPANTNSFTRGVYYPDKVFRSSVLHSTQDLFLPFFSNVTWFHAIHVSGTNGTKRFDNPVLPFNDGVYFASTEKSNIIRGWIFGTTLDSKTQSLLIVNNATNVVIKVCEFQFCNDPFLGVYYHKNNKSWMESEFRVYSSANNCTFEYVSQPFLMDLEGKQGNFKNLREFVFKNIDGYFKIYSKHTPINLVRDLPQGFSALEPLVDLPIGINITRFQTLLALHRSYLTPGDSSSGWTAGAAAYYVGYLQPRTFLLKYNENGTITDAVDCALDPLSETKCTLKSFTVEKGIYQTSNFRVQPTESIVRFPNITNLCPFGEVFNATRFASVYAWNRKRISNCVADYSVLYNSASFSTFKCYGVSPTKLNDLCFTNVYADSFVIRGDEVRQIAPGQTGKIADYNYKLPDDFTGCVIAWNSNNLDSKVGGNYNYLYRLFRKSNLKPFERDISTEIYQAGSTPCNGVEGFNCYFPLQSYGFQPTNGVGYQPYRVVVLSFELLHAPATVCGPKKSTNLVKNKCVNFNFNGLTGTGVLTESNKKFLPFQQFGRDIADTTDAVRDPQTLEILDITPCSFGGVSVITPGTNTSNQVAVLYQDVNCTEVPVAIHADQLTPTWRVYSTGSNVFQTRAGCLIGAEHVNNSYECDIPIGAGICASYQTQTNSPRRARSVASQSIIAYTMSLGAENSVAYSNNSIAIPTNFTISVTTEILPVSMTKTSVDCTMYICGDSTECSNLLLQYGSFCTQLNRALTGIAVEQDKNTQEVFAQVKQIYKTPPIKDFGGFNFSQILPDPSKPSKRSFIEDLLFNKVTLADAGFIKQYGDCLGDIAARDLICAQKFNGLTVLPPLLTDEMIAQYTSALLAGTITSGWTFGAGAALQIPFAMQMAYRFNGIGVTQNVLYENQKLIANQFNSAIGKIQDSLSSTASALGKLQDVVNQNAQALNTLVKQLSSNFGAISSVLNDILSRLDPPEAEVQIDRLITGRLQSLQTYVTQQLIRAAEIRASANLAATKMSECVLGQSKRVDFCGKGYQLMSFPQSAPHGVVFLNVTYVPAQEKNFTTAPAICNDGKAHFPREGVFVSNGTNWFVTQRNFYEPQIITTDNTFVSGNCDVVIGIVNNTVYDPLQPELDS

SEQ ID NO: 2927 - protein, 1147 aa, Artificial Sequence
  SARS-CoV-2/USA/WA-UW292/2020__EPI_ISL_418077 spike protein (1-1147)(K986P_V987P_ H1048Q_H1064N_ H1083N_H1101N)
MFVFLVLLPLVSSQCVNLTTRTQLPPAYTNSFTRGVYYPDKVFRSSVLHSTQDLFLPFFSNVTWFHAIHVSGTNGTKRFDNPVLPFNDGVYFASTEKSNIIRGWIFGTTLDSKTQSLLIVNNATNVVIKVCEFQFCNDPFLGVYYHKNNKSWMESEFRVYSSANNCTFEYVSQPFLMDLEGKQGNFKNLREFVFKNIDGYFKIYSKHTPINLVRDLPQGFSALEPLVDLPIGINITRFQTLLALHRSYLTPGDSSSGWTAGAAAYYVGYLQPRTFLLKYNENGTITDAVDCALDPLSETKCTLKSFTVEKGIYQTSNFRVQPTESIVRFPNITNLCPFGEVFNATRFASVYAWNRKRISNCVADYSVLYNSASFSTFKCYGVSPTKLNDLCFTNVYADSFVIRGDEVRQIAPGQTGKIADYNYKLPDDFTGCVIAWNSNNLDSKVGGNYNYLYRLFRKSNLKPFERDISTEIYQASSTPCNGVEGFNCYFPLQSYGFQPTNGVGYQPYRVVVLSFELLHAPATVCGPKKSTNLVKNKCVNFNFNGLTGTGVLTESNKKFLPFQQFGRDIADTTDAVRDPQTLEILDITPCSFGGVSVITPGTNTSNQVAVLYQDVNCTEVPVAIHADQLTPTWRVYSTGSNVFQTRAGCLIGAEHVNNSYECDIPIGAGICASYQTQTNSPRRARSVASQSIIAYTMSLGAENSVAYSNNSIAIPTNFTISVTTEILPVSMTKTSVDCTMYICGDSTECSNLLLQYGSFCTQLNRALTGIAVEQDKNTQEVFAQVKQIYKTPPIKDFGGFNFSQILPDPSKPSKRSFIEDLLFNKVTLADAGFIKQYGDCLGDIAARDLICAQKFNGLTVLPPLLTDEMIAQYTSALLAGTITSGWTFGAGAALQIPFAMQMAYRFNGIGVTQNVLYENQKLIANQFNSAIGKIQDSLSSTASALGKLQDVVNQNAQALNTLVKQLSSNFGAISSVLNDILSRLDPPEAEVQIDRLITGRLQSLQTYVTQQLIRAAEIRASANLAATKMSECVLGQSKRVDFCGKGYQLMSFPQSAPHGVVFLNVTYVPAQEKNFTTAPAICNDGKAHFPREGVFVSNGTNWFVTQRNFYEPQIITTDNTFVSGNCDVVIGIVNNTVYDPLQPELDS

SEQ ID NO: 2928 - protein, 1147 aa, Artificial Sequence
  SARS-CoV-2/Iceland/192/2020__EPI_ISL_417819 spike protein (1-1147)(K986P_V987P_ H1048Q_H1064N_ H1083N_H1101N)
MFVFFVLLPLVSSQCVNLTTRTQLPPAYTNSFTRGVYYPDKVFRSSVLHSTQDLFLPFFSNVTWFHAIHVSGTNGTKRFDNPVLPFNDGVYFASTEKSNIIRGWIFGTTLDSKTQSLLIVNNATNVVIKVCEFQFCNDPFLGVYYHKNNKSWMESEFRVYSSANNCTFEYVSQPFLMDLEGKQGNFKNLREFVFKNIDGYFKIYSKHTPINLVRDLPQGFSALEPLVDLPIGINITRFQTLLALHRSYLTPGDSSSGWTAGAAAYYVGYLQPRTFLLKYNENGTITDAVDCALDPLSETKCTLKSFTVEKGIYQTSNFRVQPTESIVRFPNITNLCPFGEVFNATRFASVYAWNRKRISNCVADYSVLYNSASFSTFKCYGVSPTKLNDLCFTNVYADSFVIRGDEVRQIAPGQTGKIADYNYKLPDDFTGCVIAWNSNNLDSKVGGNYNYLYRLFRKSNLKPFERDISTEIYQAGSTPCNGVEGFNCYFPLQSYGFQPTNGVGYQPYRVVVLSFELLHAPATVCGPKKSTNLVKNKCVNFNFNGLTGTGVLTESNKKFLPFQQFGRDIADTTDAVRDPQTLEILDITPCSFGGVSVITPGTNTSNQVAVLYQGVNCTEVPVAIHADQLTPTWRVYSTGSNVFQTRAGCLIGAEHVNNSYECDIPIGAGICASYQTQTNSPRRARSVASQSIIAYTMSLGAENSVAYSNNSIAIPTNFTISVTTEILPVSMTKTSVDCTMYICGDSTECSNLLLQYGSFCTQLNRALTGIAVEQDKNTQEVFAQVKQIYKTPPIKDFGGFNFSQILPDPSKPSKRSFIEDLLFNKVTLADAGFIKQYGDCLGDIAARDLICAQKFNGLTVLPPLLTDEMIAQYTSALLAGTITSGWTFGAGAALQIPFAMQMAYRFNGIGVTQNVLYENQKLIANQFNSAIGKIQDSLSSTASALGKLQDVVNQNAQALNTLVKQLSSNFGAISSVLNDILSRLDPPEAEVQIDRLITGRLQSLQTYVTQQLIRAAEIRASANLAATKMSECVLGQSKRVDFCGKGYQLMSFPQSAPHGVVFLNVTYVPAQEKNFTTAPAICNDGKAHFPREGVFVSNGTNWFVTQRNFYEPQIITTDNTFVSGNCDVVIGIVNNTVYDPLQPELDS

SEQ ID NO: 2929 - protein, 1147 aa, Artificial Sequence
  SARS-CoV-2/Belgium/ULG-6939/2020__EPI_ISL_417020 spike protein (1-1147)(K986P_V987P_ H1048Q_H1064N_ H1083N_H1101N)
MFVFLVLLPLVSSQCVNLTTRTQLPPAYTNSFTRGVYYPDKVFRSSVLHSTQDLFLPFFSNVTWFHAIHVSGTNGTKRFDNPVLPFNDGVYFASTEKSNIIRGWIFGTTLDSKTQSLLIVNNATNVVIKVCEFQFCNDPFLGVYYHKNNKSWMESEFRVYSSANNCTFEYVSQPFLMDLEGKQGNFKNLREFVFKNIDGYFKIYSKHTPINLVRDLPQGFSALEPLVDLPIGINITRFQTLLALHRSYLTPGDSSSGWTAGAAAYYVGYLQPRTFLLKYNENGTITDAVDCALDPLSETKCTLKSFTVEKGIYQTSNFRVQPTESIVRFPNITNLCPFGEVFNATRFASVYAWNRKRISNCVADYSVLYNSASFSTFKCYGVSPTKLNDLCFTNVYADSFVIRGDEVRQIAPGQTGKIADYNYKLPDDFTGCVIAWNSNNLDSKVGGNYNYLYRLFRKSNLKPFERDISTEIYQAGSTPCNGVEGFNCYFPLQSYGFQPTNGVGYQPYRVVVLSFELLHAPATVCGPKKSTNLVKNKCVNFNFNGLTGTGVLTESNKKFLPFQQFGRDIADTTDAVRDPQTLEILDITPCSFGGVSVITPGTNTSNQVAVLYQGVNCTEVPVAIHADQLTPTWRVYSTGSNVFQTRAGCLIGAEHVNNSYECDIPIGAGICASYQTQTNSPRRARSVASQSIIAYTMSLGAENSVVYSNNSIAIPTNFTISVTTEILPVSMTKTSVDCTMYICGDSTECSNLLLQYGSFCTQLNRALTGIAVEQDKNTQEVFAQVKQIYKTPPIKDFGGFNFSQILPDPSKPSKRSFIEDLLFNKVTLADAGFIKQYGDCLGDIAARDLICAQKFNGLTVLPPLLTDEMIAQYTSALLAGTITSGWTFGAGAALQIPFAMQMAYRFNGIGVTQNVLYENQKLIANQFNSAIGKIQDSLSSTASALGKLQDVVNQNAQALNTLVKQLSSNFGAISSVLNDILSRLDPPEAEVQIDRLITGRLQSLQTYVTQQLIRAAEIRASANLAATKMSECVLGQSKRVDFCGKGYQLMSFPQSAPHGVVFLNVTYVPAQEKNFTTAPAICNDGKAHFPREGVFVSNGTNWFVTQRNFYEPQIITTDNTFVSGNCDVVIGIVNNTVYDPLQPELDS

SEQ ID NO: 2930 - protein, 1147 aa, Artificial Sequence
  SARS-CoV-2/France/HF2496/2020__EPI_ISL_418231 spike protein (1-1147)(K986P_V987P_ H1048Q_H1064N_ H1083N_H1101N)
MFVFLVLLPLVSSQCVNLTTRTQLPPAYTNSFTRGVYYPDKVFRSSVLHSTQDLFLPFFSNVTWFHAIHVSGTNGTKRFDNPVLPFNDGVYFASTEKSNIIRGWIFGTTLDSKTQSLLIVNNATNVVIKVCEFQFCNDPFLGVYYHKNNKSWMESEFRVYSSANNCTFEYVSQPFLMDLEGKQGNFKNLREFVFKNIDGYFKIYSKHTPINLVRDLPQGFSALEPLVDLPIGINITRFQTLLALHRSYLTPGDSSSGWTAGAAAYYVGYLQPRTFLLKYNENGTITDAVDCALDPLSETKCTLKSFTVEKGIYQTSNFRVQPTESIVRFPNITNLCPFGEVFNATRFASVYAWNRKRISNCVADYSVLYNSASFSTFKCYGVSPTKLNDLCFTNVYADSFVIRGDEVRQIAPGQTGKIADYNYKLPDDFTGCVIAWNSNNLDSKVGGNYNYLYRLFRKSNLKPFERDISTEIYQAGSTPCNGVEGFNCYFPLQSYGFQPTNGVGYQPYRVVVLSFELLHAPATVCGPKKSTNLVKNKCVNFNFNGLTGTGVLTESNKKFLPFQQFGRDIADTTDAVRDPQTLEILDITPCSFGGVSVITPGTNTSNQVAVLYQGVNCTEVPVAIHADQLTPTWRVYSTGSNVFQTRAGCLIGAEHVNNSYECDIPIGAGICASYQTQTNSPRRARSVASQSIIAYTMSLGAENSVAYSNNSIAIPTNFTISVTTEILPVSMTKTSVDCTMYICGDSTECSNLLLQYGSFCTQLNRALTGIAVEQDKNTQEVFAQVKQIYKTPPIKDFGGFNFSQILPDPSKPSKRSFIEDLLFNKVTLADAGFIKQYGDCLGDIVARDLICAQKFNGLTVLPPLLTDEMIAQYTSALLAGTITSGWTFGAGAALQIPFAMQMAYRFNGIGVTQNVLYENQKLIANQFNSAIGKIQDSLSSTASALGKLQDVVNQNAQALNTLVKQLSSNFGAISSVLNDILSRLDPPEAEVQIDRLITGRLQSLQTYVTQQLIRAAEIRASANLAATKMSECVLGQSKRVDFCGKGYQLMSFPQSAPHGVVFLNVTYVPAQEKNFTTAPAICNDGKAHFPREGVFVSNGTNWFVTQRNFYEPQIITTDNTFVSGNCDVVIGIVNNTVYDPLQPELDS

SEQ ID NO: 2931 - protein, 1147 aa, Artificial Sequence
  SARS-CoV-2/USA/WA-UW291/2020__EPI_ISL_418076 spike protein (1-1147)(K986P_V987P_ H1048Q_H1064N_ H1083N_H1101N)
MFVFLVLLPLVSSQCVNLTTRTQLPPAYTNSFTRGVYYPDKVFRSSVLHSTQDLFLPFFSNVTWFHAIHVSGTNGTKRFDNPVLPFNDGVYFASTEKSNIIRGWIFGTTLDSKTQSLLIVNNATNVVIKVCEFQFCNDPFLGVYYHKNNKSWMESEFRVYSSANNCTFEYVSQPFLMDLEGKQGNFKNLREFVFKNIDGYFKIYSKHTPINLVRDLPQGFSALEPLVDLPIGINITRFQTLLALHRSYLTPGDSSSGWTAGAAAYYVGYLQPRTFLLKYNENGTITDAVDCALDPLSETKCTLKSFTVEKGIYQTSNFRVQPTESIVRFPNITNLCPFGEVFNATRFASVYAWNRKRISNCVADYSVLYNSASFSTFKCYGVSPTKLNDLCFTNVYADSFVIRGDEVRQIAPGQTGKIADYNYKLPDDFTGCVIAWNSNNLDSKVGGNYNYLYRLFRKSNLKPFERDISTEIYQAGSTPCNGVEGFNCYFPLQSYGFQPTNGVGYQPYRVVVLSFELLHAPATVCGPKKSTNLVKNKCVNFNFNGLTGTGVLTESNKKFLPFQQFGRDIADTTDAVRDPQTLEILDITPCSFGGVSVITPGTNTSNQVAVLYQGVNCTEVPVAIHADQLTPTWRVYSTGSNVFQTRAGCLIGAEHVNNSYECDIPIGAGICASYQTQTNSPRRARSVASQSIIAYTMSLGAENSVAYSNNSIAIPTNFTISVTTEILPVSMTKTSVDCTMYICGDSTECSNLLLQYGSFCTQLNRALTGIAVEQDKNTQEVFAQVKQIYKTPPIKDFGGFNFSQILPDPSKPSKRSFIEDLLFNKVTLADAGFIKQYGDCLGDIAARDLICAQKFNGLTVLPPLLTDEMIAQYTSALLAGTITSGWTFGAGAALQIPFAMQMAYRFNGIGVTQNVLYENQKLIANQFNSAIGKIQYSLSSTASALGKLQDVVNQNAQALNTLVKQLSSNFGAISSVLNDILSRLDPPEAEVQIDRLITGRLQSLQTYVTQQLIRAAEIRASANLAATKMSECVLGQSKRVDFCGKGYQLMSFPQSAPHGVVFLNVTYVPAQEKNFTTAPAICNDGKAHFPREGVFVSNGTNWFVTQRNFYEPQIITTDNTFVSGNCDVVIGIVNNTVYDPLQPELDS

SEQ ID NO: 2932 - protein, 1147 aa, Artificial Sequence; identical to SEQ ID NO: 2895
  SARS-CoV-2/Portugal/PT0034/2020__EPI_ISL_418019 spike protein (1-1147)(K986P_V987P_ H1048Q_H1064N_ H1083N_H1101N)

SEQ ID NO: 2933 - protein, 1147 aa, Artificial Sequence; identical to SEQ ID NO: 2887
  SARS-CoV-2/Iceland/202/2020__EPI_ISL_417750 spike protein (1-1147)(K986P_V987P_ H1048Q_H1064N_ H1083N_H1101N)

SEQ ID NO: 2934 - protein, 1147 aa, Artificial Sequence
  SARS-CoV-2/USA/WA-UW261/2020__EPI_ISL_418046 spike protein (1-1147)(K986P_V987P_ H1048Q_H1064N_ H1083N_H1101N)
MFVFLVLLPLVSSQCVNLTTRTQLPPAYTNSFTRGVYYPDKVFRSSVLHSTQDLFLPFFSNVTWFHAIHVSGTNGTKRFDNPVLPFNDGVYFASTEKSNIIRGWIFGTTLDSKTQSLLIVNNATNVVIKVCEFQFCNDPFLGVYYHKNNKSWMESEFRVYSSANNCTFEYVSQPFLMDLEGKQGNFKNLREFVFKNIDGYFKIYSKHTPINLVRDLPQGFSALEPLVDLPIGINITRFQTLLALHRSYLTPGDSSSGWTAGAAAYYVGYLQPRTFLLKYNENGTITDAVDCALDPLSETKCTLKSFTVEKGIYQTSNFRVQPTESIVRFPNITNLCPFGEVFNATRFTSVYAWNRKRISNCVADYSVLYNSASFSTFKCYGVSPTKLNDLCFTNVYADSFVIRGDEVRQIAPGQTGKIADYNYKLPDDFTGCVIAWNSNNLDSKVGGNYNYLYRLFRKSNLKPFERDISTEIYQAGSTPCNGVEGFNCYFPLQSYGFQPTNGVGYQPYRVVVLSFELLHAPATVCGPKKSTNLVKNKCVNFNFNGLTGTGVLTESNKKFLPFQQFGRDIADTTDAVRDPQTLEILDITPCSFGGVSVITPGTNTSNQVAVLYQDVNCTEVPVAIHADQLTPTWRVYSTGSNVFQTRAGCLIGAEHVNNSYECDIPIGAGICASYQTQTNSPRRARSVASQSIIAYTMSLGAENSVAYSNNSIAIPTNFTISVTTEILPVSMTKTSVDCTMYICGDSTECSNLLLQYGSFCTQLNRALTGIAVEQDKNTQEVFAQVKQIYKTPPIKDFGGFNFSQILPDPSKPSKRSFIEDLLFNKVTLADAGFIKQYGDCLGDIAARDLICAQKFNGLTVLPPLLTDEMIAQYTSALLAGTITSGWTFGAGAALQIPFAMQMAYRFNGIGVTQNVLYENQKLIANQFNSAIGKIQDSLSSTASALGKLQDVVNQNAQALNTLVKQLSSNFGAISSVLNDILSRLDPPEAEVQIDRLITGRLQSLQTYVTQQLIRAAEIRASANLAATKMSECVLGQSKRVDFCGKGYQLMSFPQSAPHGVVFLNVTYVPAQEKNFTTAPAICNDGKAHFPREGVFVSNGTNWFVTQRNFYEPQIITTDNTFVSGNCDVVIGIVNNTVYDPLQPELDS

SEQ ID NO: 2935 - protein, 1147 aa, Artificial Sequence
  SARS-CoV-2/Portugal/PT0035/2020__EPI_ISL_418020 spike protein (1-1147)(K986P_V987P_ H1048Q_H1064N_ H1083N_H1101N)
MFVFLVLLPLVSSQCVNLTTRTQLPPAYTNSFTRGVYYPDKVFRSSVLHSTQDLFLPFFSNVTWFHAIHVSGTNGTKRFDNPVLPFNDGVYFASTEKSNIIRGWIFGTTLDSKTQSLLIVNNATNVVIKVCEFQFCNDPFLGVYYHKNNKSWMESEFRVYSSANNCTFEYVSQPFLMDLEGKQGNFKNLREFVFKNIDGYFKIYSKHTPINLVRDLPQGFSALEPLVDLPIGINITRFQTLLALHRSYLTPGDSSSGWTAGAAAYYVGYLQPRTFLLKYNENGTITDAVDCALDPLSETKCTLKSFTVEKGIYQTSNFRVQPTESIVRFPNITNLCPFGEVFNATRFASVYAWNRKRISNCVADYSVLYNSASFSTFKCYGVSPTKLNDLCFTNVYADSFVIRGDEVRQIAPGQTGKIADYNYKLPDDFTGCVIAWNSNNLDSKVGGNYNYLYRLFRKSNLKPFERDISTEIYQAGSTPCNGVEGFNCYFPLQSYGFQPTNGVGYQPYRVVVLSFELLHAPATVCGPKKSTNLVKNKCVNFNFNGLTGTGVLTESNKKFLPFQQFGRDIADTTDAVRDPQTLEILDITPCSFGGVSVITPGTNTSNQVAVLYQDVNCTEVPVAIHADQLTPTWRVYSTGSNVFQTRAGCLIGAEHVNNSYECDIPIGAGICASYQTQTNSPRRARSVASQSIIAYTMSLGAENSVAYSNNSIAIPTNFTISVTTEILPVSMTKTSVDCTMYICGDSTECSNLLLQYGSFCTQLNRALTGIAVEQDKNTQEVFAQVKQIYKTPPIKDFGGFNFSQILPDPSKPSKRSFIEDLLFNKVTLADAGFIKQYGDCLGDISARDLICAQKFNGLTVLPPLLTDEMIAQYTSALLAGTITSGWTFGAGAALQIPFAMQMAYRFNGIGVTQNVLYENQKLIANQFNSAIGKIQDSLSSTASALGKLQDVVNQNAQALNTLVKQLSSNFGAISSVLNDILSRLDPPEAEVQIDRLITGRLQSLQTYVTQQLIRAAEIRASANLAATKMSECVLGQSKRVDFCGKGYQLMSFPQSAPHGVVFLNVTYVPAQEKNFTTAPAICNDGKAHFPREGVFVSNGTNWFVTQRNFYEPQIITTDNTFVSGNCDVVIGIVNNTVYDPLQPELDS

SEQ ID NO: 2936 - protein, 1147 aa, Artificial Sequence
  SARS-CoV-2/USA/NY-NYUMC7/2020__EPI_ISL_418192 spike protein (1-1147)(K986P_V987P_ H1048Q_H1064N_ H1083N_H1101N)
MFVFLVLLPLVSSQCVNLTTRTQLPPAYTNSFTRGVYYPDKVFRSSVLHSTQDLFLPFFSNVTWFHAIHVSGTNGTKRFDNPVLPFNDGVYFASTEKSNIIRGWIFGTTLDSKTQSLLIVNNATNVVIKVCEFQFCNDPFLGVYHHKNNKSWMESEFRVYSSANNCTFEYVSQPFLMDLEGKQGNFKNLREFVFKNIDGYFKIYSKHTPINLVRDLPQGFSALEPLVDLPIGINITRFQTLLALHRSYLTPGDSSSGWTAGAAAYYVGYLQPRTFLLKYNENGTITDAVDCALDPLSETKCTLKSFTVEKGIYQTSNFRVQPTESIVRFPNITNLCPFGEVFNATRFASVYAWNRKRISNCVADYSVLYNSASFSTFKCYGVSPTKLNDLCFTNVYADSFVIRGDEVRQIAPGQTGKIADYNYKLPDDFTGCVIAWNSNNLDSKVGGNYNYLYRLFRKSNLKPFERDISTEIYQAGSTPCNGVEGFNCYFPLQSYGFQPTNGVGYQPYRVVVLSFELLHAPATVCGPKKSTNLVKNKCVNFNFNGLTGTGVLTESNKKFLPFQQFGRDIADTTDAVRDPQTLEILDITPCSFGGVSVITPGTNTSNQVAVLYQGVNCTEVPVAIHADQLTPTWRVYSTGSNVFQTRAGCLIGAEHVNNSYECDIPIGAGICASYQTQTNSPRRARSVASQSIIAYTMSLGAENSVAYSNNSIAIPTNFTISVTTEILPVSMTKTSVDCTMYICGDSTECSNLLLQYGSFCTQLNRALTGIAVEQDKNTQEVFAQVKQIYKTPPIKDFGGFNFSQILPDPSKPSKRSFIEDLLFNKVTLADAGFIKQYGDCLGDIAARDLICAQKFNGLTVLPPLLTDEMIAQYTSALLAGTITSGWTFGAGAALQIPFAMQMAYRFNGIGVTQNVLYENQKLIANQFNSAIGKIQDSLSSTASALGKLQDVVNQNAQALNTLVKQLSSNFGAISSVLNDILSRLDPPEAEVQIDRLITGRLQSLQTYVTQQLIRAAEIRASANLAATKMSECVLGQSKRVDFCGKGYQLMSFPQSAPHGVVFLNVTYVPAQEKNFTTAPAICNDGKAHFPREGVFVSNGTNWFVTQRNFYEPQIITTDNTFVSGNCDVVIGIVNNTVYDPLQPELDS

SEQ ID NO: 2937 - protein, 1147 aa, Artificial Sequence
  SARS-CoV-2/Iceland/189/2020__EPI_ISL_417709 spike protein (1-1147)(K986P_V987P_ H1048Q_H1064N_ H1083N_H1101N)
MFVFLVLLPLVSSQCVNLTTRTQLPPAYTNSFTRGVYYPDKVFRSSVLHSTQDLFLPFFSNVTWFHAIHVSGTNGTKRFDNPVLPFNDGVYFASTEKSNIIRGWIFGTTLDSKTQSLLIVNNATNVVIKVCEFQFCNDPFLGVYYHKNNKSWMESEFRVYSSANNCTFEYVSQPFLMDLEGKQGNFKNLREFVFKNIDGYFKIYSKHTPINLVRDLPQGFSALEPLVDLPIGINITRFQTLLALHRSYLTPGDSSSGWTAGAAAYYVGYLQPRTFLLKYNENGTITDAVDCALDPLSETKCTLKSFTVEKGIYQTSNFRVQPTESIVRFPNITNLCPFGEVFNATRFASVYAWNRKRISNCVADYSVLYNSASFSTFKCYGVSPTKLNDLCFTNVYADSFVIRGDEVRQIAPGQTGKIADYNYKLPDDFTGCVIAWNSNNLDSKVGGNYNYLYRLFRKSNLKPFERDISTEIYQAGSTPCNGVEGFNCYFPLQSYGFQPTNGVGYQPYRVVVLSFELLHAPATVCGPKKSTNLVKNKCVNFNFNGLTGTGVLTESNKKFLPFQQFGRDIADTTDAVRDPQTLEILDITPCSFGGVSVITPGTNTSNQVAVLYQGVNCTEVPVAIHADQLTPTWRVYSTGSNVFQTRAGCLIGAEHVNNSYECDIPIGAGICASYQTQTNSPRRARSVASQSIIAYTMSLGAENSVAYSNNSIAIPTNFTISVTTEILPVSMTKTSVDCTMYICGDSTECSNLLLQYGSFCTQLNRALTGIAVEQDKNTQEVFAQVKQIYKTPPIKDFGGFNFSQILPDPSKPSKRSFIEDLLFNKVTLADAGFTKQYGDCLGDIAARDLICAQKFNGLTVLPPLLTDEMIAQYTSALLAGTITSGWTFGAGAALQIPFAMQMAYRFNGIGVTQNVLYENQKLIANQFNSAIGKIQDSLSSTASALGKLQDVVNQNAQALNTLVKQLSSNFGAISSVLNDILSRLDPPEAEVQIDRLITGRLQSLQTYVTQQLIRAAEIRASANLAATKMSECVLGQSKRVDFCGKGYQLMSFPQSAPHGVVFLNVTYVPAQEKNFTTAPAICNDGKAHFPREGVFVSNGTNWFVTQRNFYEPQIITTDNTFVSGNCDVVIGIVNNTVYDPLQPELDS

SEQ ID NO: 2938 - protein, 1147 aa, Artificial Sequence
  SARS-CoV-2/Australia/NSW56/2020__EPI_ISL_417408 spike protein (1-1147)(K986P_V987P_ H1048Q_H1064N_ H1083N_H1101N)
MFVFLVLLPLVSSQCVNLTTRTQLPPAYTNSFTRGVYYPDKVFRSSVLHSTQDLFLPFFSNVTWFHAIHVSGTNGTKRFDNPVLPFNDGVYFASTEKSNIIRGWIFGTTLDSKTQSLLIVNNATNVVIKVCEFQFCNDPFLGVYYHKNNKSWMESEFRVYSSANNCTFEYVSQPFLMDLEGKQGNFKNLREFVFKNIDGYFKIYSKHTPINLVRDLPQGFSALEPLVDLPIGINITRFQTLLALHRSYLTPGDSSSGWTAGAAAYYVGYLQPRTFLLKYNENGTITDAVDCALDPLSETKCTLKSFTVEKGIYQTSNFRVQPTESIVRFPNITNLCPFGEVFNATRFASVYAWNRKRISNCVADYSVLYNSASFSTFKCYGVSPTKLNDLCFTNVYADSFVIRGDEVRQIAPGQTGKIADYNYKLPDDFTGCVIAWNSNNLDSKVGGNYNYLYRLFRKSNLKPFERDISTEIYQAGSTPCNGVEGFNCYFPLQSYGFQPTNGVGYQPYRVVVLSFELLHAPATVCGPKKSTNLVKNKCVNFNFNGLTGTGVLTESNKKFLPFQQFGRDIADTTDAVRDPQTLEILDITPCSFGGVSVITPGTNTSNQVAVLYQDVNCTEVPVAIHADQLTPTWRVYSTGSNVFQTRAGCLIGAEHVNNSYECDIPIGAGICASYQTQTNSPRRARSVASQSIIAYTMSLGAENSVAYSNNSIAIPTNFTISVTTEILPVSMTKTSVDCTMYICGDSTECSNLLLQYGSFCTQLNRALTGIAVEQDKNTQEVFAQVKQIYKTPPIKDFGGFNFSQILPDSSKPSKRSFIEDLLFNKVTLADAGFIKQYGDCLGDIAARDLICAQKFNGLTVLPPLLTDEMIAQYTSALLAGTITSGWTFGAGAALQIPFAMQMAYRFNGIGVTQNVLYENQKLIANQFNSAIGKIQDSLSSTASALGKLQDVVNQNAQALNTLVKQLSSNFGAISSVLNDILSRLDPPEAEVQIDRLITGRLQSLQTYVTQQLIRAAEIRASANLAATKMSECVLGQSKRVDFCGKGYQLMSFPQSAPHGVVFLNVTYVPAQEKNFTTAPAICNDGKAHFPREGVFVSNGTNWFVTQRNFYEPQIITTDNTFVSGNCDVVIGIVNNTVYDPLQPELDS

SEQ ID NO: 2939 - protein, 1147 aa, Artificial Sequence
  SARS-CoV-2/Iceland/280/2020__EPI_ISL_417608 spike protein (1-1147)(K986P_V987P_ H1048Q_H1064N_ H1083N_H1101N)
MFVFLVLLPLVSSQCVNLTTRTQLPPAYTNSFTRGVYYPDKVFRSSVLHSTQDLFLPFFSNVTWFHAIHVSGTNGTKRFDNPVLPFNDGVYFASTEKSNIIRGWIFGTTLDSKTQSLLIVNNATNVVIKVCEFQFCNDPFLGVYYHKNNKSWMESEFRVYSSANNCTFEYVSQPFLMDLEGKQGNFKNLREFVFKNIDGYFKIYSKHTPINLVRDLPQGFSALEPLVDLPIGINITRFQTLLALHRSYLTPGDSSSGWTAGAAAYYVGYLQPRTFLLKYNENGTITDAVDCALDPLSETKCTLKSFTVEKGIYQTSNFRVQPTESIVRFPNITNLCPFGEVFNATRFASVYAWNRKRISNCVADYSVLYNSASFSTFKCYGVSPTKLNDLCFTNVYADSFVIRGDEVRQIAPGQTGKIADYNYKLPDDFTGCVIAWNSNNLDSKVGGNYNYLYRLFRKSNLKPFERDISTEIYQAGSTPCNGVEGFNCYFPLQSYGFQPTNGVGYQPYRVVVLSFELLHAPATVCGPKKSTNLVKNKCVNFNFNGLTGTGVLTESNKKFLPFQQFGRDIADTTDAVRDPQTLEILDITPCSFGGVSVITPGTNTSNQVAVLYQGVNCTEVPVAIHADQLTPTWRVYSTGSNVFQTRAGCLIGAEHVNNSYECDIPIGAGICASYHTQTNSPRRARSVASQSIIAYTMSLGAENSVAYSNNSIAIPTNFTISVTTEILPVSMTKTSVDCTMYICGDSTECSNLLLQYGSFCTQLNRALTGIAVEQDKNTQEVFAQVKQIYKTPPIKDFGGFNFSQILPDPSKPSKRSFIEDLLFNKVTLADAGFIKQYGDCLGDIAARDLICAQKFNGLTVLPPLLTDEMIAQYTSALLAGTITSGWTFGAGAALQIPFAMQMAYRFNGIGVTQNVLYENQKLIANQFNSAIGKIQDSLSSTASALGKLQDVVNQNAQALNTLVKQLSSNFGAISSVLNDILSRLDPPEAEVQIDRLITGRLQSLQTYVTQQLIRAAEIRASANLAATKMSECVLGQSKRVDFCGKGYQLMSFPQSAPHGVVFLNVTYVPAQEKNFTTAPAICNDGKAHFPREGVFVSNGTNWFVTQRNFYEPQIITTDNTFVSGNCDVVIGIVNNTVYDPLQPELDS

SEQ ID NO: 2940 - protein, 1147 aa, Artificial Sequence; identical to SEQ ID NO: 2895
  SARS-CoV-2/Iceland/247/2020__EPI_ISL_417575 spike protein (1-1147)(K986P_V987P_ H1048Q_H1064N_ H1083N_H1101N)

SEQ ID NO: 2941 - protein, 1147 aa, Artificial Sequence
  SARS-CoV-2/Iceland/238/2020__EPI_ISL_417566 spike protein (1-1147)(K986P_V987P_ H1048Q_H1064N_ H1083N_H1101N)
MFVFLVLLPLVSSQCVNLTTRTQLPPAYTNSFTRGVYYPDKVFRSSVLHSTQDLFLPFFSNVTWFHAIHVSGTNGTKRFDNPVLPFNDGVYFASTEKSNIIRGWIFGTTLDSKTQSLLIVNNATNVVIKVCEFQFCNDPFLGVYYHKNNKSWMESEFRVYSSANNCTFEYVSQPFLMDLEGKQGNFKNLREFVFKNIDGYFKIYSKHTPINLVRDLPQGFSALEPLVDLPIGINITRFQTLLALHRSYLTPGDSSSGWTAGAAAYYVGYLQPRTFLLKYNENGTITDAVDCALDPLSETKCTLKSFTVEKGIYQTSNFRVQPTESIVRFPNITNLCPFGEVFNATRFASVYAWNRKRISNCVADYSVLYNSASFSTFKCYGVSPTKLNDLCFTNVYADSFVIRGDEVRQIAPGQTGKIADYNYKLPDDFTGCVIAWNSNNLDSKVGGNYNYLYRLFRKSNLKPFERDISTEIYQAGSTPCNGVEGFNCYFPLQSYGFQPTNGVGYQPYRVVVLSFELLHAPATVCGPKKSTNLVKNKCVNFNFNGLTGTGVLTESNKKFLPFQQFGRDIADTTDAVRDPQTLEILDITPCSFGGVSVITPGTNTSNQVAVLYQGVNCTEVPVAIHADQLTPTWRVYSTGSNVFQTRAGCLIGAEHVNNSYECDIPIGAGICASYQTQTNSPRRARSVASQSIIAYTMSLGAENSVAYSNNSIAIPTNFTISVTTEILPVSMTKTSVDCTMYICGDSTECSNLLLQYGSFCTQLNRALTGIAVEQDKNTQEVFAQVKQIYKTPPIKDFGGFNFSQILPDPSKPSKRSFIEDLLFNKVTLADVGFIKQYGDCLGDIAARDLICAQKFNGLTVLPPLLTDEMIAQYTSALLAGTITSGWTFGAGAALQIPFAMQMAYRFNGIGVTQNVLYENQKLIANQFNSAIGKIQDSLSSTASALGKLQDVVNQNAQALNTLVKQLSSNFGAISSVLNDILSRLDPPEAEVQIDRLITGRLQSLQTYVTQQLIRAAEIRASANLAATKMSECVLGQSKRVDFCGKGYQLMSFPQSAPHGVVFLNVTYVPAQEKNFTTAPAICNDGKAHFPREGVFVSNGTNWFVTQRNFYEPQIITTDNTFVSGNCDVVIGIVNNTVYDPLQPELDS

SEQ ID NO: 2942 - protein, 1147 aa, Artificial Sequence
  SARS-CoV-2/Greece/16/2020__EPI_ISL_418265 spike protein (1-1147)(K986P_V987P_ H1048Q_H1064N_ H1083N_H1101N)
MFVFLVLLPLVSSQCVNLTTRTQLPPAYTNSFTRGVYYPDKVFRSSVLHSTQDLFLPFFSNVTWFHAIHVSGTNGTKRFDNPVLPFNDGVYFASTEKSNIIRGWIFGTTLDSKTQSLLIVNNATNVVIKVCEFQFCNDPFLGVYYHKNNKSWMESEFRVYSSANNCTFEYVSQPFLMDLEGKQGNFKNLREFVFKNVDGYFKIYSKHTPINLVRDLPQGFSALEPLVDLPIGINITRFQTLLALHRSYLTPGDSSSGWTAGAAAYYVGYLQPRTFLLKYNENGTITDAVDCALDPLSETKCTLKSFTVEKGIYQTSNFRVQPTESIVRFPNITNLCPFGEVFNATRFASVYAWNRKRISNCVADYSVLYNSASFSTFKCYGVSPTKLNDLCFTNVYADSFVIRGDEVRQIAPGQTGKIADYNYKLPDDFTGCVIAWNSNNLDSKVGGNYNYLYRLFRKSNLKPFERDISTEIYQAGSTPCNGVEGFNCYFPLQSYGFQPTNGVGYQPYRVVVLSFELLHAPATVCGPKKSTNLVKNKCVNFNFNGLTGTGVLTESNKKFLPFQQFGRDIADTTDAVRDPQTLEILDITPCSFGGVSVITPGTNTSNQVAVLYQDVNCTEVPVAIHADQLTPTWRVYSTGSNVFQTRAGCLIGAEHVNNSYECDIPIGAGICASYQTQTNSPRRARSVASQSIIAYTMSLGAENSVAYSNNSIAIPTNFTISVTTEILPVSMTKTSVDCTMYICGDSTECSNLLLQYGSFCTQLNRALTGIAVEQDKNTQEVFAQVKQIYKTPPIKDFGGFNFSQILPDPSKPSKRSFIEDLLFNKVTLADAGFIKQYGDCLGDIAARDLICAQKFNGLTVLPPLLTDEMIAQYTSALLAGTITSGWTFGAGAALQIPFAMQMAYRFNGIGVTQNVLYENQKLIANQFNSAIGKIQDSLSSTASALGKLQDVVNQNAQALNTLVKQLSSNFGAISSVLNDILSRLDPPEAEVQIDRLITGRLQSLQTYVTQQLIRAAEIRASANLAATKMSECVLGQSKRVDFCGKGYQLMSFPQSAPHGVVFLNVTYVPAQEKNFTTAPAICNDGKAHFPREGVFVSNGTNWFVTQRNFYEPQIITTDNTFVSGNCDVVIGIVNNTVYDPLQPELDS

SEQ ID NO: 2943 - protein, 1147 aa, Artificial Sequence
  SARS-CoV-2/Iceland/319/2020__EPI_ISL_417648 spike protein (1-1147)(K986P_V987P_ H1048Q_H1064N_ H1083N_H1101N)
MFVFLVLLPLVSSQCVNLTTRTQLPPAYTNSFTRGVYYPDKVFRSSVLHSTQDLFLPFFSNVTWFHAIHVSGTNGTKRFDNPVLPFNDGVYFASTEKSNIIRGWIFGTTLDSKTQSLLIVNNATNVVIKVCEFQFCNDPFLGVYYHKNNKSWMESEFRVYSSANNCTFEYVSQPFLIDLEGKQGNFKNLREFVFKNIDGYFKIYSKHTPINLVRDLPQGFSALEPLVDLPIGINITRFQTLLALHRSYLTPGDSSSGWTAGAAAYYVGYLQPRTFLLKYNENGTITDAVDCALDPLSETKCTLKSFTVEKGIYQTSNFRVQPTESIVRFPNITNLCPFGEVFNATRFASVYAWNRKRISNCVADYSVLYNSASFSTFKCYGVSPTKLNDLCFTNVYADSFVIRGDEVRQIAPGQTGKIADYNYKLPDDFTGCVIAWNSNNLDSKVGGNYNYLYRLFRKSNLKPFERDISTEIYQAGSTPCNGVEGFNCYFPLQSYGFQPTNGVGYQPYRVVVLSFELLHAPATVCGPKKSTNLVKNKCVNFNFNGLTGTGVLTESNKKFLPFQQFGRDIADTTDAVRDPQTLEILDITPCSFGGVSVITPGTNTSNQVAVLYQGVNCTEVPVAIHADQLTPTWRVYSTGSNVFQTRAGCLIGAEHVNNSYECDIPIGAGICASYQTQTNSPRRARSVASQSIIAYTMSLGAENSVAYSNNSIAIPTNFTISVTTEILPVSMTKTSVDCTMYICGDSTECSNLLLQYGSFCTQLNRALTGIAVEQDKNTQEVFAQVKQIYKTPPIKDFGGFNFSQILPDPSKPSKRSFIEDLLFNKVTLADAGFIKQYGDCLGDIAARDLICAQKFNGLTVLPPLLTDEMIAQYTSALLAGTITSGWTFGAGAALQIPFAMQMAYRFNGIGVTQNVLYENQKLIANQFNSAIGKIQDSLSSTASALGKLQDVVNQNAQALNTLVKQLSSNFGAISSVLNDILSRLDPPEAEVQIDRLITGRLQSLQTYVTQQLIRAAEIRASANLAATKMSECVLGQSKRVDFCGKGYQLMSFPQSAPHGVVFLNVTYVPAQEKNFTTAPAICNDGKAHFPREGVFVSNGTNWFVTQRNFYEPQIITTDNTFVSGNCDVVIGIVNNTVYDPLQPELDS

SEQ ID NO: 2944 - protein, 1147 aa, Artificial Sequence
  SARS-CoV-2/Congo/94/2020__EPI_ISL_417947 spike protein (1-1147)(K986P_V987P_ H1048Q_H1064N_ H1083N_H1101N)
MFVFLVLLPLVSSQCVNLTTRTQLPPAYTNSFTRGVYYPDKVFRSSVLHSTQDLFLPFFSNVTWFHAIHVSGTNGTKRFDNPVLPFNDGVYFASTEKSNIIRGWIFGTTLDSKTQSLLIVNNATNVVIKVCEFQFCNDPFLGVYYHKNNKSWMESEFRVYSSANNCTFEYVSQPFLMDLEGKQGNFKNLREFVFKNIDGYFKIYSKHTPINLVRDLPQGFSALEPLVDLPIGINITRFQTLLALHRSYLTPGDSSSGWTAGAAAYYVGYLQPRTFLLKYNENGTITDAVDCALDPLSETKCTLKSFTVEKGIYQTSNFRVQPTESIVRFPNITNLCPFGEVFNATRFASVYAWNRKRISNCVADYSVLYNSASFSTFKCYGVSPTKLNDLCFTNVYADSFVIRGDEVRQIAPGQTGKIADYNYKLPDDFTGCVIAWNSNNLDSKVGGNYNYLYRLFRKSNLKPFERDISTEIYQAGSTPCNGVEGFNCYFPLQSYGFQPTNGVGYQPYRVVVLSFELLHAPATVCGPKKSTNLVKNKCVNFNFNGLTGTGVLTESNKKFLPFQQFGRDIADTTDAVRDPQTLEILDITPCSFGGVSVITPGTNTSNQVAVLYQGVNCTEVPVAIHADQLTPTWRVYSTGSNVFQTRAGCLIGAEHVNNSYECDIPIGAGICASYQTQTNSPRRARSVASQSIIAYTMSLGAENSVAYSNNSIAIPTNFTISVTTEILPVSMTKTSVDCTMYICGDSTECSNLLLQYGSFCTQLNRALTGIAVEQDKNTQEVFAQVKQIYKTPPIKDFGGFNFSQILPDPSKPSKRSFIEDILFNKVTLADAGFIKQYGDCLGDIAARDLICAQKFNGLTVLPPLLTDEMIAQYTSALLAGTITSGWTFGAGAALQIPFAMQMAYRFNGIGVTQNVLYENQKLIANQFNSAIGKIQDSLSSTASALGKLQDVVNQNAQALNTLVKQLSSNFGAISSVLNDILSRLDPPEAEVQIDRLITGRLQSLQTYVTQQLIRAAEIRASANLAATKMSECVLGQSKRVDFCGKGYQLMSFPQSAPHGVVFLNVTYVPAQEKNFTTAPAICNDGKAHFPREGVFVSNGTNWFVTQRNFYEPQIITTDNTFVSGNCDVVIGIVNNTVYDPLQPELDS

SEQ ID NO: 2945 - protein, 1147 aa, Artificial Sequence
  SARS-CoV-2/Congo/158/2020__EPI_ISL_417950 spike protein (1-1147)(K986P_V987P_ H1048Q_H1064N_ H1083N_H1101N)
MFVFLVLLPLVSSQCVNLTTRTQLPPAYTNSFTRGVYYPDKVFRSSVLHSTQDLFLPFFSNVTWFHAIHVSGTNGTKRFDNPVLPFNDGVYFASTEKSNIIRGWIFGTTLDSKTQSLLIVNNATNVVIKVCEFQFCNDPFLGVYYHKNNKSWMESEFRVYSSANNCTFEYVSQPFLMDLEGKQGNFKNLREFVFKNIDGYFKIYSKHTPINLVRDLPQGFSALEPLVDLPIGINITRFQTLLALHRSYLTPGDSSSGWTAGAAAYYVGYLQPRTFLLKYNENGTITDAVDCALDPLSETKCTLKSFTVEKGIYQTSNFRVQPTESIVRFPNITNLCPFGEVFNATRFASVYAWNRKRISNCVADYSVLYNSASFSTFKCYGVSPTKLNDLCFTNVYADSFVIRGDEVRQIAPGQTGKIADYNYKLPDDFTGCVIAWNSNNLDSKVGGNYNYLYRLFRKSNLKPFERDISTEIYQAGSTPCNGVEGFNCYFPLQSYGFQPTNGVGYQPYRVVVLSFELLHAPATVCGPKKSTNLVKNKCVNFNFNGLTGTGVLTESNKKFLPFQQFGRDIADTTDAVRDPQTLEILDITPCSFGGVSVITPGTNTSNQVAVLYQDVNCTEVPVAIHADQLTPTWRVYSTGSNVFQTRAGCLIGAEHVNNSYECDIPIGAGICASYQTQTNSPRRARSVASQSIIAYTMSLGAENSVAYSNNSIAIPTNFTISVTTEILPVSMTKTSVDCTMYICGDSTECSNLLLQYGSFCTQLNRALTGIAVEQDKNTQEVFAQVKQIYKTPPIKDFGGFNFSQILPDPSKPSKRSFIEDLLFNKVTLADAGFIKQYGDCLGDIAARDLICAQKFNGLTVLPPLLTDEMIAQYTSALLAGTITSGWTFGAGAALQIPFAMQMAYRFNGIGVTQNVLYENQKLIANQFNSAIGKIQDSLSSTASALGKLQDVVNQNAQALNTLVKQLSSNFGAISSVLNDILSRLDPPEAEVQIDRLITGRLQSLQTYVTQQLIRAAEIRASANLAATKMSECVLGQSKRVDFCGKGYQLMSFPQSAPHGVVFLNVTYVPAQEKNFTTAPAICNDGKAHFPREGVFVSNGTNWFVTQRNFYEPQIITTDNTFLSGNCDVVIGIVNNTVYDPLQPELDS

SEQ ID NO: 2946 - protein, 1147 aa, Artificial Sequence
  SARS-CoV-2/USA/UT-00034/2020__EPI_ISL_417977 spike protein (1-1147)(K986P_V987P_ H1048Q_H1064N_ H1083N_H1101N)
MFVFLVLLPLVSSQCVNLTTRTQLPPAYTNSFTRGVYYPDKVFRSSVLHSTQDLFLPFFSNVTWFHAIHVSGTNGTKRFDNPVLPFNDGVYFASTEKSNIIRGWIFGTTLDSKTQSLLIVNNATNVVIKVCEFQFCNDPFLGVYYYKNNKSWMESEFRVYSSANNCTFEYVSQPFLMDLEGKQGNFKNLREFVFKNIDGYFKIYSKHTPINLVRDLPQGFSALEPLVDLPIGINITRFQTLLALHRSYLTPGDSSSGWTAGAAAYYVGYLQPRTFLLKYNENGTITDAVDCALDPLSETKCTLKSFTVEKGIYQTSNFRVQPTESIVRFPNITNLCPFGEVFNATRFASVYAWNRKRISNCVADYSVLYNSASFSTFKCYGVSPTKLNDLCFTNVYADSFVIRGDEVRQIAPGQTGKIADYNYKLPDDFTGCVIAWNSNNLDSKVGGNYNYLYRLFRKSNLKPFERDISTEIYQAGSTPCNGVEGFNCYFPLQSYGFQPTNGVGYQPYRVVVLSFELLHAPATVCGPKKSTNLVKNKCVNFNFNGLTGTGVLTESNKKFLPFQQFGRDIADTTDAVRDPQTLEILDITPCSFGGVSVITPGTNTSNQVAVLYQGVNCTEVPVAIHADQLTPTWRVYSTGSNVFQTRAGCLIGAEHVNNSYECDIPIGAGICASYQTQTNSPRRARSVASQSIIAYTMSLGAENSVAYSNNSIAIPTNFTISVTTEILPVSMTKTSVDCTMYICGDSTECSNLLLQYGSFCTQLNRALTGIAVEQDKNTQEVFAQVKQIYKTPPIKDFGGFNFSQILPDPSKPSKRSFIEDLLFNKVTLADAGFIKQYGDCLGDIAARDLICAQKFNGLTVLPPLLTDEMIAQYTSALLAGTITSGWTFGAGAALQIPFAMQMAYRFNGIGVTQNVLYENQKLIANQFNSAIGKIQDSLSSTASALGKLQDVVNQNAQALNTLVKQLSSNFGAISSVLNDILSRLDPPEAEVQIDRLITGRLQSLQTYVTQQLIRAAEIRASANLAATKMSECVLGQSKRVDFCGKGYQLMSFPQSAPHGVVFLNVTYVPAQEKNFTTAPAICNDGKAHFPREGVFVSNGTNWFVTQRNFYEPQIITTDNTFVSGNCDVVIGIVNNTVYDPLQPELDS

SEQ ID NO: 2947 - protein, 1147 aa, Artificial Sequence
  SARS-CoV-2/USA/UT-00033/2020__EPI_ISL_417976 spike protein (1-1147)(K986P_V987P_ H1048Q_H1064N_ H1083N_H1101N)
MFVFLVLLPLVSSQCVNLTTRTQLPPAYTNSFTRGVYYPDKVFRSSVLHSTQDLFLPFFSNVTWFHAIHVSGTNGTKRFDNPVLPFNDGVYFASTEKSNIIRGWIFGTTLDSKTQSLLIVNNATNVVIKVCEFQFCNDPFLGVYYHKNNKSWMESEFRVYSSANNCTFEYVSQPFLMDLEGKQGNFKNLREFVFKNIDGYFKIYSKHTPINLVRDLPQGFSALEPLVDLPIGINITRFQTLLALHRSYLTPGDSSSGLTAGAAAYYVGYLQPRTFLLKYNENGTITDAVDCALDPLSETKCTLKSFTVEKGIYQTSNFRVQPTESIVRFPNITNLCPFGEVFNATRFASVYAWNRKRISNCVADYSVLYNSASFSTFKCYGVSPTKLNDLCFTNVYADSFVIRGDEVRQIAPGQTGKIADYNYKLPDDFTGCVIAWNSNNLDSKVGGNYNYLYRLFRKSNLKPFERDISTEIYQAGSTPCNGVEGFNCYFPLQSYGFQPTNGVGYQPYRVVVLSFELLHAPATVCGPKKSTNLVKNKCVNFNFNGLTGTGVLTESNKKFLPFQQFGRDIADTTDAVRDPQTLEILDITPCSFGGVSVITPGTNTSNQVAVLYQGVNCTEVPVAIHADQLTPTWRVYSTGSNVFQTRAGCLIGAEHVNNSYECDIPIGAGICASYQTQTNSPRRARSVASQSIIAYTMSLGAENSVAYSNNSIAIPTNFTISVTTEILPVSMTKTSVDCTMYICGDSTECSNLLLQYGSFCTQLNRALTGIAVEQDKNTQEVFAQVKQIYKTPPIKDFGGFNFSQILPDPSKPSKRSFIEDLLFNKVTLADAGFIKQYGDCLGDIAARDLICAQKFNGLTVLPPLLTDEMIAQYTSALLAGTITSGWTFGAGAALQIPFAMQMAYRFNGIGVTQNVLYENQKLIANQFNSAIGKIQDSLSSTASALGKLQDVVNQNAQALNTLVKQLSSNFGAISSVLNDILSRLDPPEAEVQIDRLITGRLQSLQTYVTQQLIRAAEIRASANLAATKMSECVLGQSKRVDFCGKGYQLMSFPQSAPHGVVFLNVTYVPAQEKNFTTAPAICNDGKAHFPREGVFVSNGTNWFVTQRNFYEPQIITTDNTFVSGNCDVVIGIVNNTVYDPLQPELDS

SEQ ID NO: 2948 - protein, 1147 aa, Artificial Sequence
  SARS-CoV-2/USA/WI-13/2020__EPI_ISL_417516 spike protein (1-1147)(K986P_V987P_ H1048Q_H1064N_ H1083N_H1101N)
MFVFLVLLPLVSSQCVNLTTRTQLPPAYTNSFTRGVYYPDKVFRSSVLHSTQDLFLPFFSNVTWFHAIHVSGTNGTKRFDNPVLPFNDGVYFASTEKSNIIRGWIFGTTLDSKTQSLLIVNNATNVVIKVCEFQFCNDPFLGVYYHKNNKSWMESEFRVYSSANNCTFEYVSQPFLMDLEGKQGNFKNLREFVFKNIDGYFKIYSKHTPINLVRDLPQGFSALEPLVDLPIGINITRFQTLLALHRSYLTPGDSSSGWTAGAAAYYVGYLQPRTFLLKYNENGTITDAVDCALDPLSETKCTLKSFTVEKGIYQTSNFRVLPTESIVRFPNITNLCPFGEVFNATRFASVYAWNRKRISNCVADYSVLYNSASFSTFKCYGVSPTKLNDLCFTNVYADSFVIRGDEVRQIAPGQTGKIADYNYKLPDDFTGCVIAWNSNNLDSKVGGNYNYLYRLFRKSNLKPFERDISTEIYQAGSTPCNGVEGFNCYFPLQSYGFQPTNGVGYQPYRVVVLSFELLHAPATVCGPKKSTNLVKNKCVNFNFNGLTGTGVLTESNKKFLPFQQFGRDIADTTDAVRDPQTLEILDITPCSFGGVSVITPGTNTSNQVAVLYQGVNCTEVPVAIHADQLTPTWRVYSTGSNVFQTRAGCLIGAEHVNNSYECDIPIGAGICASYQTQTNSPRRARSVASQSIIAYTMSLGAENSVAYSNNSIAIPTNFTISVTTEILPVSMTKTSVDCTMYICGDSTECSNLLLQYGSFCTQLNRALTGIAVEQDKNTQEVFAQVKQIYKTPPIKDFGGFNFSQILPDPSKPSKRSFIEDLLFNKVTLADAGFIKQYGDCLGDIAARDLICAQKFNGLTVLPPLLTDEMIAQYTSALLAGTITSGWTFGAGAALQIPFAMQMAYRFNGIGVTQNVLYENQKLIANQFNSAIGKIQDSLSSTASALGKLQDVVNQNAQALNTLVKQLSSNFGAISSVLNDILSRLDPPEAEVQIDRLITGRLQSLQTYVTQQLIRAAEIRASANLAATKMSECVLGQSKRVDFCGKGYQLMSFPQSAPHGVVFLNVTYVPAQEKNFTTAPAICNDGKAHFPREGVFVSNGTNWFVTQRNFYEPQIITTDNTFVSGNCDVVIGIVNNTVYDPLQPELDS

SEQ ID NO: 2949 - protein, 1146 aa, Artificial Sequence
  SARS-CoV-2/India/1-27/2020__EPI_ISL_413522 spike protein (1-1146)(K985P_V986P_ H1047Q_H1063N_ H1082N_H1100N)
MFVFLVLLPLVSSQCVNLTTRTQLPPAYTNSFTRGVYYPDKVFRSSVLHSTQDLFLPFFSNVTWFHAIHVSGTNGTKRFDNPVLPFNDGVYFASTEKSNIIRGWIFGTTLDSKTQSLLIVNNATNVVIKVCEFQFCNDPFLGVYHKNNKSWMESEFRVYSSANNCTFEYVSQPFLMDLEGKQGNFKNLREFVFKNIDGYFKIYSKHTPINLVRDLPQGFSALEPLVDLPIGINITRFQTLLALHRSYLTPGDSSSGWTAGAAAYYVGYLQPRTFLLKYNENGTITDAVDCALDPLSETKCTLKSFTVEKGIYQTSNFRVQPTESIVRFPNITNLCPFGEVFNATRFASVYAWNRKRISNCVADYSVLYNSASFSTFKCYGVSPTKLNDLCFTNVYADSFVIRGDEVIQIAPGQTGKIADYNYKLPDDFTGCVIAWNSNNLDSKVGGNYNYLYRLFRKSNLKPFERDISTEIYQAGSTPCNGVEGFNCYFPLQSYGFQPTNGVGYQPYRVVVLSFELLHAPATVCGPKKSTNLVKNKCVNFNFNGLTGTGVLTESNKKFLPFQQFGRDIADTTDAVRDPQTLEILDITPCSFGGVSVITPGTNTSNQVAVLYQDVNCTEVPVAIHADQLTPTWRVYSTGSNVFQTRAGCLIGAEHVNNSYECDIPIGAGICASYQTQTNSPRRARSVASQSIIAYTMSLGAENSVAYSNNSIAIPTNFTISVTTEILPVSMTKTSVDCTMYICGDSTECSNLLLQYGSFCTQLNRALTGIAVEQDKNTQEVFAQVKQIYKTPPIKDFGGFNFSQILPDPSKPSKRSFIEDLLFNKVTLADAGFIKQYGDCLGDIAARDLICAQKFNGLTVLPPLLTDEMIAQYTSALLAGTITSGWTFGAGAALQIPFAMQMAYRFNGIGVTQNVLYENQKLIANQFNSAIGKIQDSLSSTASALGKLQDVVNQNAQALNTLVKQLSSNFGAISSVLNDILSRLDPPEAEVQIDRLITGRLQSLQTYVTQQLIRAAEIRASANLAATKMSECVLGQSKRVDFCGKGYQLMSFPQSAPHGVVFLNVTYVPAQEKNFTTAPAICNDGKAHFPREGVFVSNGTNWFVTQRNFYEPQIITTDNTFVSGNCDVVIGIVNNTVYDPLQPELDS

SEQ ID NO: 2950 - protein, 1141 aa, Artificial Sequence
  SARS-CoV-2/pangolin/Guangxi/P4L/2017__EPI_ISL_410538 spike protein (1-1141)(K980P_V981P_ H1042Q_H1058N_ H1077N_H1095N)
MFVFLFVLPLVSSQCVNLTTRTGIPPGYTNSSTRGVYYPDKVFRSSILHLTQDLFLPFFSNVTWFNTINYQGGFKKFDNPVLPFNDGVYFASTEKSNIIRGWIFGTTLDARTQSLLIVNNATNVVIKVCEFQFCTDPFLGVYYHNNNKTWVENEFRVYSSANNCTFEYISQPFLMDLEGKQGNFKNLREFVFKNVDGYFKIYSKHTPIDLVRDLPRGFAALEPLVDLPIGINITRFQTLLALHRSYLTPGNLESGWTTGAAAYYVGYLQQRTFLLSYNQNGTITDAVDCSLDPLSETKCTLKSLTVEKGIYQTSNFRVQPTISIVRFPNITNLCPFGEVFNASKFASVYAWNRKRISNCVADYSVLYNSTSFSTFKCYGVSPTKLNDLCFTNVYADSFVVKGDEVRQIAPGQTGVIADYNYKLPDDFTGCVIAWNSVKQDALTGGNYGYLYRLFRKSKLKPFERDISTEIYQAGSTPCNGQVGLNCYYPLERYGFHPTTGVNYQPFRVVVLSFELLNGPATVCGPKLSTTLVKDKCVNFNFNGLTGTGVLTTSKKQFLPFQQFGRDISDTTDAVRDPQTLEILDITPCSFGGVSVITPGTNTSNQVAVLYQDVNCTEVPMAIHAEQLTPAWRVYSAGANVFQTRAGCLVGAEHVNNSYECDIPVGAGICASYHSMSSLRSVNQRSIIAYTMSLGAENSVAYSNNSIAIPTNFTISVTTEILPVSMTKTSVDCTMYICGDSIECSNLLLQYGSFCTQLNRALTGIAVEQDKNTQEVFAQVKQIYKTPPIKDFGGFNFSQILPDPSKPSKRSFIEDLLFNKVTLADAGFIKQYGDCLGDIAARDLICAQKFNGLTVLPPLLTDEMIAQYTSALLAGTITSGWTFGAGAALQIPFAMQMAYRFNGIGVTQNVLYENQKLIANQFNSAIGKIQDSLSSTASALGKLQDVVNQNAQALNTLVKQLSSNFGAISSVLNDILSRLDPPEAEVQIDRLITGRLQSLQTYVTQQLIRAAEIRASANLAATKMSECVLGQSKRVDFCGKGYQLMSFPQSAPHGVVFLNVTYVPAQEKNFTTAPAICNEGKAHFPREGVFVSNGTNWFITQRNFYEPQIITTDNTFVSGSCDVVIGIVNNTVYDPLQPELDS

SEQ ID NO: 2951 - protein, 1141 aa, Artificial Sequence
  SARS-CoV-2/pangolin/Guangxi/P5L/2017__EPI_ISL_410540 spike protein (1-1141)(K980P_V981P_ H1042Q_H1058N_ H1077N_H1095N)
MFVFLFVLPLVSSQCVNLTTRTGIPPGYTNSSTRGVYYPDKVFRSSILHLTQDLFLPFFSNVTWFNTINYQGGFKKFDNPVLPFNDGVYFASTEKSNIIRGWIFGTTLDARTQSLLIVNNATNVVIKVCEFQFCTDPFLGVYYHNNNKTWVENEFRVYSSANNCTFEYISQPFLMDLEGKQGNFKNLREFVFKNVDGYFKIYSKHTPIDLVRDLPRGFAALEPLVDLPIGINITRFQTLLALHRSYLTPGKLESGWTTGAAAYYVGYLQQRTFLLSYNQNGTITDAVDCSLDPLSETKCTLKSLTVEKGIYQTSNFRVQPTISIVRFPNITNLCPFGEVFNASKFASVYAWNRKRISNCVADYSVLYNSTSFSTFKCYGVSPTKLNDLCFTNVYADSFVVKGDEVRQIAPGQTGVIADYNYKLPDDFTGCVIAWNSVKQDALTGGNYGYLYRLFRKSKLKPFERDISTEIYQAGSTPCNGQVGLNCYYPLERYGFHPTTGVNYQPFRVVVLSFELLNGPATVCGPKLSTTLVKDKCVNFNFNGLTGTGVLTTSKKQFLPFQQFGRDISDTTDAVRDPQTLEILDITPCSFGGVSVITPGTNTSNQVAVLYQDVNCTEVPMAIHAEQLTPAWRVYSAGANVFQTRAGCLVGAEHVNNSYECDIPVGAGICASYHSMSSFRSVNQRSIIAYTMSLGAENSVAYSNNSIAIPTNFTISVTTEILPVSMTKTSVDCTMYICGDSIECSNLLLQYGSFCTQLNRALTGIAVEQDKNTQEVFAQVKQIYKTPPIKDFGGFNFSQILPDPSKPSKRSFIEDLLFNKVTLADAGFIKQYGDCLGDIAARDLICAQKFNGLTVLPPLLTDEMIAQYTSALLAGTITSGWTFGAGAALQIPFAMQMAYRFNGIGVTQNVLYENQKLIANQFNSAIGKIQDSLSSTASALGKLQDVVNQNAQALNTLVKQLSSNFGAISSVLNDILSRLDPPEAEVQIDRLITGRLQSLQTYVTQQLIRAAEIRASANLAATKMSECVLGQSKRVDFCGKGYQLMSFPQSAPHGVVFLNVTYVPAQEKNFTTAPAICNEGKAHFPREGVFVSNGTNWFITQRNFYEPQIITTDNTFVSGSCDVVIGIVNNTVYDPLQPELDS

SEQ ID NO: 2952 - protein, 1141 aa, Artificial Sequence
  SARS-CoV-2/pangolin/Guangxi/P5E/2017__EPI_ISL_410541 spike protein (1-1141)(K980P_V981P_ H1042Q_H1058N_ H1077N_H1095N)
MFVFLFVLPLVSSQCVNLTTRTGIPPGYTNSSTRGVYYPDKVFRSSILHLTQDLFLPFFSNVTWFNTITYQGGSKKFDNPVLPFNDGVYFASTEKSNIIRGWIFGTTLDARTQSLLIVNNATNVVIKVCEFQFCTDPFLGVYYHNNNKTWVENEFRVYSSANNCTFEYISQPFLMDLEGKQGNFKNLREFVFKNVDGYFKIYSKHTPIDLVRDLPRGFAALEPLVDLPIGINITRFQTLLALHRSYLTPGKLESGWTTGAAAYYVGYLQQRTFLLSYNQNGTITDAVDCSLDPLSETKCTLKSLTVEKGIYQTSNFRVQPTISIVRFPNITNLCPFGEVFNASKFASVYAWNRKRISNCVADYSVLYNSTSFSTFKCYGVSPTKLNDLCFTNVYADSFVVKGDEVRQIAPGQTGVIADYNYKLPDDFTGCVIAWNSVKQDALTGDNYGYLYRLFRKSKLKPFERDISTEIYQAGSTPCNGQVGLNCYYPLERYGFHPTTGVNYQPFRVVVLSFELLNGPATVCGPKLSTTLVKDKCVNFNFNGLTGTGVLTTSKKQFLPFQQFGRDISDTTDAVRDPQTLEILDITPCSFGGVSVITPGTNTSNQVAVLYQDVNCTEVPMAIHAEQLTPAWRVYSAGANVFQTRAGCLVGAEHVNNSYECDIPVGAGICASYHSMSSFRSVNQRSIIAYTMSLGAENSVAYSNNSIAIPTNFTISVTTEILPVSMTKTSVDCTMYICGDSIECSNLLLQYGSFCTQLNRALTGIAVEQDKNTQEVFAQVKQIYKTPPIKDFGGFNFSQILPDPSKPSKRSFIEDLLFNKVTLADAGFIKQYGDCLGDIAARDLICAQKFNGLTVLPPLLTDEMIAQYTSALLAGTITSGWTFGAGAALQIPFAMQMAYRFNGIGVTQNVLYENQKLIANQFNSAIGKIQDSLSSTASALGKLQDVVNQNAQALNTLVKQLSSNFGAISSVLNDILSRLDPPEAEVQIDRLITGRLQSLQTYVTQQLIRAAEIRASANLAATKMSECVLGQSKRVDFCGKGYQLMSFPQSAPHGVVFLNVTYVPAQEKNFTTAPAICNEGKAHFPREGVFVSNGTNWFITQRNFYEPQIITTDNTFVSGSCDVVIGIVNNTVYDPLQPELDS

SEQ ID NO: 2953 - protein, 1139 aa, Artificial Sequence
  SARS-CoV-2/pangolin/Guangxi/P1E/2017__EPI_ISL_410539 spike protein (1-1139)(K978P_V979P_ H1040Q_H1056N_ H1075N_H1093N)
MFVFLFVLPLVSSQCVNLTTRTGIQPGYTNSSTRGVYYPDKVFRSSILHLTQDLFLPFFSNVTWFNTINYQGGFKKFDNPVLPFNDGVYFASTEKSNIIRGWIFGTTLDARTQSLLIVNNATNVVIKVCEFQFCTDPFLGVYYHNNNKTWVENEFRVYSSANNCTFEYISQPFLMDLEGKQGNFKNLREFVFKNVDGYFKIYSKHTPIDLVRDLPRGFAALEPLVDLPIGINITRFQTLLALHRSYLTPGKLESGWTTGAAAYYVGYLQQRTFLLSYNQNGTITDAVDCSLDPLSETKCTLKSLTVEKGIYQTSNFRVQPTISIVRFPNITNLCPFGEVFNASKFASVYAWNRKRISNCVADYSVLYNSTSFSTFKCYGVSPTKLNDLCFTNVYADSFVVKGDEVRQIAPGQTGVIADYNYKLPDDFTGCVIAWNSVKQDALTGGNYLYRLFRKSKLKPFERDISTEIYQAGSTPCNGQVGLNCYYPLERYGFHPTTGVNYQPFRVVVLSFELLNGPATVCGPKLSTTLVKDKCVNFNFNGLTGTGVLTTSKKQFLPFQQFGRDISDTTDAVRDPQTLEILDITPCSFGGVSVITPGTNTSNQVAVLYQDVNCTEVPMAIHAEQLTPAWRVYSAGANVFQTRAGCLVGAEHVNNSYECDIPVGAGICASYHSMSSLRSVNQRSIIAYTMSLGAENSVAYSNNSIAIPTNFTISVTTEILPVSMTKTSVDCTMYICGDSIECSNLLLQYGSFCTQLNRALTGIAVEQDKNTQEVFAQVKQIYKTPPIKDFGGFNFSQILPDPSKPSKRSFIEDLLFNKVTLADAGFIKQYGDCLGDIAARDLICAQKFNGLTVLPPLLTDEMIAQYTSALLAGTITSGWTFGAGAALQIPFAMQMAYRFNGIGVTQNVLYENQKLIANQFNSAIGKIQDSLSSTASALGKLQDVVNQNAQALNTLVKQLSSNFGAISSVLNDILSRLDPPEAEVQIDRLITGRLQSLQTYVTQQLIRAAEIRASANLAATKMSECVLGQSKRVDFCGKGYQLMSFPQSAPHGVVFLNVTYVPAQEKNFTTAPAICNEGKAHFPREGVFVSNGTNWFITQRNFYEPQIITTDNTFVSGSCDVVIGIVNNTVYDPLQPELDS

SEQ ID NO: 2954 - protein, 1147 aa, Artificial Sequence
  SARS-CoV-2/Wuhan/WIV05/2019__EPI_ISL_402128 spike protein (1-1147)(I712C_T1077C)
MFVFLVLLPLVSSQCVNLTTRTQLPPAYTNSFTRGVYYPDKVFRSSVLHSTQDLFLPFFSNVTWFHAIHVSGTNGTKRFDNPVLPFNDGVYFASTEKSNIIRGWIFGTTLDSKTQSLLIVNNATNVVIKVCEFQFCNDPFLGVYYHKNNKSWMESEFRVYSSANNCTFEYVSQPFLMDLEGKQGNFKNLREFVFKNIDGYFKIYSKHTPINLVRDLPQGFSALEPLVDLPIGINITRFQTLLALHRSYLTPGDSSSGWTAGAAAYYVGYLQPRTFLLKYNENGTITDAVDCALDPLSETKCTLKSFTVEKGIYQTSNFRVQPTESIVRFPNITNLCPFGEVFNATRFASVYAWNRKRISNCVADYSVLYNSASFSTFKCYGVSPTKLNDLCFTNVYADSFVIRGDEVRQIAPGQTGKIADYNYKLPDDFTGCVIAWNSNNLDSKVGGNYNYLYRLFRKSNLKPFERDISTEIYQAGSTPCNGVEGFNCYFPLQSYGFQPTNGVGYQPYRVVVLSFELLHAPATVCGPKKSTNLVKNKCVNFNFNGLTGTGVLTESNKKFLPFQQFGRDIADTTDAVRDPQTLEILDITPCSFGGVSVITPGTNTSNQVAVLYQDVNCTEVPVAIHADQLTPTWRVYSTGSNVFQTRAGCLIGAEHVNNSYECDIPIGAGICASYQTQTNSPRRARSVASQSIIAYTMSLGAENSVAYSNNSCAIPTNFTISVTTEILPVSMTKTSVDCTMYICGDSTECSNLLLQYGSFCTQLNRALTGIAVEQDKNTQEVFAQVKQIYKTPPIKDFGGFNFSQILPDPSKPSKRSFIEDLLFNKVTLADAGFIKQYGDCLGDIAARDLICAQKFNGLTVLPPLLTDEMIAQYTSALLAGTITSGWTFGAGAALQIPFAMQMAYRFNGIGVTQNVLYENQKLIANQFNSAIGKIQDSLSSTASALGKLQDVVNQNAQALNTLVKQLSSNFGAISSVLNDILSRLDKVEAEVQIDRLITGRLQSLQTYVTQQLIRAAEIRASANLAATKMSECVLGQSKRVDFCGKGYHLMSFPQSAPHGVVFLHVTYVPAQEKNFTCAPAICHDGKAHFPREGVFVSNGTHWFVTQRNFYEPQIITTDNTFVSGNCDVVIGIVNNTVYDPLQPELDS

SEQ ID NO: 2955 - protein, 1143 aa, Artificial Sequence
  SARS-CoV-2/bat/Yunnan/RaTG13/2013__EPI_ISL_402131 spike protein (1-1143)(I708C_T1073C)
MFVFLVLLPLVSSQCVNLTTRTQLPPAYTNSSTRGVYYPDKVFRSSVLHLTQDLFLPFFSNVTWFHAIHVSGTNGIKRFDNPVLPFNDGVYFASTEKSNIIRGWIFGTTLDSKTQSLLIVNNATNVVIKVCEFQFCNDPFLGVYYHKNNKSWMESEFRVYSSANNCTFEYVSQPFLMDLEGKQGNFKNLREFVFKNIDGYFKIYSKHTPINLVRDLPPGFSALEPLVDLPIGINITRFQTLLALHRSYLTPGDSSSGWTAGAAAYYVGYLQPRTFLLKYNENGTITDAVDCALDPLSETKCTLKSFTVEKGIYQTSNFRVQPTDSIVRFPNITNLCPFGEVFNATTFASVYAWNRKRISNCVADYSVLYNSTSFSTFKCYGVSPTKLNDLCFTNVYADSFVITGDEVRQIAPGQTGKIADYNYKLPDDFTGCVIAWNSKHIDAKEGGNFNYLYRLFRKANLKPFERDISTEIYQAGSKPCNGQTGLNCYYPLYRYGFYPTDGVGHQPYRVVVLSFELLNAPATVCGPKKSTNLVKNKCVNFNFNGLTGTGVLTESNKKFLPFQQFGRDIADTTDAVRDPQTLEILDITPCSFGGVSVITPGTNASNQVAVLYQDVNCTEVPVAIHADQLTPTWRVYSTGSNVFQTRAGCLIGAEHVNNSYECDIPIGAGICASYQTQTNSRSVASQSIIAYTMSLGAENSVAYSNNSCAIPTNFTISVTTEILPVSMTKTSVDCTMYICGDSTECSNLLLQYGSFCTQLNRALTGIAVEQDKNTQEVFAQVKQIYKTPPIKDFGGFNFSQILPDPSKPSKRSFIEDLLFNKVTLADAGFIKQYGDCLGDIAARDLICAQKFNGLTVLPPLLTDEMIAQYTSALLAGTITSGWTFGAGAALQIPFAMQMAYRFNGIGVTQNVLYENQKLIANQFNSAIGKIQDSLSSTASALGKLQDVVNQNAQALNTLVKQLSSNFGAISSVLNDILSRLDKVEAEVQIDRLITGRLQSLQTYVTQQLIRAAEIRASANLAATKMSECVLGQSKRVDFCGKGYHLMSFPQSAPHGVVFLHVTYVPAQEKNFTCAPAICHDGKAHFPREGVFVSNGTHWFVTQRNFYEPQIITTDNTFVSGSCDVVIGIVNNTVYDPLQPELDS

SEQ ID NO: 2956 - protein, 1147 aa, Artificial Sequence
  SARS-CoV-2/Wuhan/HBCDC-HB-01/2019__EPI_ISL_402132 spike protein (1-1147)(I712C_T1077C)
MFVFLVLLPLVSSQCVNLTTRTQLPPAYTNSITRGVYYPDKVFRSSVLHSTQDLFLPFFSNVTWFHAIHVSGTNGTKRFDNPVLPFNDGVYFASTEKSNIIRGWIFGTTLDSKTQSLLIVNNATNVVIKVCEFQFCNDPFLGVYYHKNNKSWMESEFRVYSSANNCTFEYVSQPFLMDLEGKQGNFKNLREFVFKNIDGYFKIYSKHTPINLVRDLPQGFSALEPLVDLPIGINITRFQTLLALHRSYLTPGDSSSGWTAGAAAYYVGYLQPRTFLLKYNENGTITDAVDCALDPLSETKCTLKSFTVEKGIYQTSNFRVQPTESIVRFPNITNLCPFGEVFNATRFASVYAWNRKRISNCVADYSVLYNSASFSTFKCYGVSPTKLNDLCFTNVYADSFVIRGDEVRQIAPGQTGKIADYNYKLPDDFTGCVIAWNSNNLDSKVGGNYNYLYRLFRKSNLKPFERDISTEIYQAGSTPCNGVEGFNCYFPLQSYGFQPTNGVGYQPYRVVVLSFELLHAPATVCGPKKSTNLVKNKCVNFNFNGLTGTGVLTESNKKFLPFQQFGRDIADTTDAVRDPQTLEILDITPCSFGGVSVITPGTNTSNQVAVLYQDVNCTEVPVAIHADQLTPTWRVYSTGSNVFQTRAGCLIGAEHVNNSYECDIPIGAGICASYQTQTNSPRRARSVASQSIIAYTMSLGAENSVAYSNNSCAIPTNFTISVTTEILPVSMTKTSVDCTMYICGDSTECSNLLLQYGSFCTQLNRALTGIAVEQDKNTQEVFAQVKQIYKTPPIKDFGGFNFSQILPDPSKPSKRSFIEDLLFNKVTLADAGFIKQYGDCLGDIAARDLICAQKFNGLTVLPPLLTDEMIAQYTSALLAGTITSGWTFGAGAALQIPFAMQMAYRFNGIGVTQNVLYENQKLIANQFNSAIGKIQDSLSSTASALGKLQDVVNQNAQALNTLVKQLSSNFGAISSVLNDILSRLDKVEAEVQIDRLITGRLQSLQTYVTQQLIRAAEIRASANLAATKMSECVLGQSKRVDFCGKGYHLMSFPQSAPHGVVFLHVTYVPAQEKNFTCAPAICHDGKAHFPREGVFVSNGTHWFVTQRNFYEPQIITTDNTFVSGNCDVVIGIVNNTVYDPLQPELDS

SEQ ID NO: 2957 - protein, 1147 aa, Artificial Sequence
  SARS-CoV-2/Guangdong/20SF028/2020__EPI_ISL_403936 spike protein (1-1147)(I712C_T1077C)
MFVFLVLLPLVSSQCVNLTTRTQLPPAYTNSFTRGVYYPDKVFRSSVLYSTQDLFLPFFSNVTWFHAIHVSGTNGTKRFDNPVLPFNDGVYFASTEKSNIIRGWIFGTTLDSKTQSLLIVNNATNVVIKVCEFQFCNDPFLGVYYHKNNKSWMESEFRVYSSANNCTFEYVSQPFLMDLEGKQGNFKNLREFVFKNIDGYFKIYSKHTPINLVRDLPQGFSALEPLVDLPIGINITRFQTLLALHRSYLTPGDSSSGWTAGAAAYYVGYLQPRTFLLKYNENGTITDAVDCALDPLSETKCTLKSFTVEKGIYQTSNFRVQPTESIVRFPNITNLCPFGEVFNATRFASVYAWNRKRISNCVADYSVLYNSASFSTFKCYGVSPTKLNDLCFTNVYADSFVIRGDEVRQIAPGQTGKIADYNYKLPDDFTGCVIAWNSNNLDSKVGGNYNYLYRLFRKSNLKPFERDISTEIYQAGSTPCNGVEGFNCYFPLQSYGFQPTNGVGYQPYRVVVLSFELLHAPATVCGPKKSTNLVKNKCVNFNFNGLTGTGVLTESNKKFLPFQQFGRDIADTTDAVRDPQTLEILDITPCSFGGVSVITPGTNTSNQVAVLYQDVNCTEVPVAIHADQLTPTWRVYSTGSNVFQTRAGCLIGAEHVNNSYECDIPIGAGICASYQTQTNSPRRARSVASQSIIAYTMSLGAENSVAYSNNSCAIPTNFTISVTTEILPVSMTKTSVDCTMYICGDSTECSNLLLQYGSFCTQLNRALTGIAVEQDKNTQEVFAQVKQIYKTPPIKDFGGFNFSQILPDPSKPSKRSFIEDLLFNKVTLADAGFIKQYGDCLGDIAARDLICAQKFNGLTVLPPLLTDEMIAQYTSALLAGTITSGWTFGAGAALQIPFAMQMAYRFNGIGVTQNVLYENQKLIANQFNSAIGKIQDSLSSTASALGKLQDVVNQNAQALNTLVKQLSSNFGAISSVLNDILSRLDKVEAEVQIDRLITGRLQSLQTYVTQQLIRAAEIRASANLAATKMSECVLGQSKRVDFCGKGYHLMSFPQSAPHGVVFLHVTYVPAQEKNFTCAPAICHDGKAHFPREGVFVSNGTHWFVTQRNFYEPQIITTDNTFVSGNCDVVIGIVNNTVYDPLQPELDS

SEQ ID NO: 2958 - protein, 1147 aa, Artificial Sequence
  SARS-CoV-2/Shenzhen/SZTH-001/2020__EPI_ISL_406592 spike protein (1-1147)(I712C_T1077C)
MFVFLVLLPLVSSQCVNLTTRTQLPPAYTNSFTRGVYYPDKVFRSSVLHSTQDLFLPFFSNVTWFHAIHVSGTNGTKRFDNPVLPFNDGVYFASTEKSNIIRGWIFGTTLDSKTQSLLIVNNATNVVIKVCEFQFCNDPFLGVYYHKNNKSWMESEFRVYSSANNCTFEYVSQPFLMDLEGKQGNFKNLREFVFKNIDGYFKIYSKHTPINLVRDLPQGFSALEPLVDLPIGINITRFQTLLALHRSYLTPGDSSSGWTAGAAAYYVGYLQPRTFLLKYNENGTITDAVDCALDPLSETKCTLKSFTVEKGIYQTSNFRVQPTESIVRFPNITNLCPFGEVFNATRFASVYAWNRKRISNCVADYSVLYNSASFSTFKCYGVSPTKLNDLCFTNVYADSFVIRGDEVRQIAPGQTGKIADYNYKLPDDFTGCVIAWNSNNLDSKVGGNYNYLYRLFRKSNLKPFERDISTEIYQAGSTPCNGVEGFNCYFPLQSYGFQPTNGVGYQPYRVVVLSFELLHAPATVCGPKKSTNLVKNKCVNFNFNGLTGTGVLTESNKKFLPFQQFGRDIADTTDAVRDPQTLEILDITPCSFGGVSVITPGTNTSNQVAVLYQDVNCTEVPVAIHADQLTPTWRVYSTGSNVFQTRAGCLIGAEHVNNSYECDIPIGAGICASYQTQTNSPRRARSVASQSIIAYTMSLGAENSVAYSNNSCAIPTNFTISVTTEILPVSMTKTSVDCTMYICGDSTECSNLLLQYGSFCTQLNRALTGIAVEQDKNTQEVFAQVKQIYKTPPIKDFGGFNFSQILPDPSKPSKRSFIEDLLFNKVTLADAGFIKQYGDCLGDIAARDLICAQKFNGLTVLPPLLTDEMIAQYTSALLAGTITSGWTFGAGAALQIPFAMQMAYRFNGIGVTQNVLYENQKLIANQFNSAIGKIQDSLSSTASALGKLQDVVNQNAQALNTLVKQLSSNFGAISSVLNDILSRLDKVEAEVQIDRLITGRLQSLQTYVTQQLIRAAEIRASANLAATKMSECVLGQSKRVDFCGKGYHLMSFPQSAPHGVVFLHVTYVPAQEKNFTCAPAICHDGKAHFPREGVFVSNGTHWFVTQRNFYEPQIITTDNTFVSGNCDVLIGIVNNTVYDPLQPELDS

SEQ ID NO: 2959 - protein, 1147 aa, Artificial Sequence
  SARS-CoV-2/Shenzhen/SZTH-004/2020__EPI_ISL_406595 spike protein (1-1147)(I712C_T1077C)
MFVFLVLLPLVSSQCVNLTTRTQLPPAYTNSFTRGVYYPDKVFRSSVLHSTQDLFLPFFSNVTWFHAIHVSGTNGTKRFDNPVLPFNDGVYFASTEKSNIIRGWIFGTTLDSKTQSLLIVNNATNVVIKVCEFQFCNDPFLGVYYHKNNKSWMESEFRVYSSANNCTFEYVSQPFLMDLEGKQGNFKNLREFVFKNIDGYFKIYSKHTPINLVRDLPQGFSALEPLVDLPIGINITRFQTLLALHRSYLTPGDSSSGWTAGAAAYYVGYLQPRTFLLKYNENGTITDAVDCALDPLSETKCTLKSFTVEKGIYQTSNFRVQPTESIVRFPNITNLCPFGEVFNATRFASVYAWDRKRISNCVAYYSVLYNSASFSTFKCYGVSPTKLNDLCFTNVYADSFVIRGDEVRQIAPGQTGKIADYNYKLPDDFTGCVIAWNSNNLDSKVGGNYNYLYRLFRKSNLKPFERDISTEIYQAGSTPCNGVEGFNCYFPLQSYGFQPTNGVGYQPYRVVVLSFELLHAPATVCGPKKSTNLVKNKCVNFNFNGLTGTGVLTESNKKFLPFQQFGRDIADTTDAVRDPQTLEILDITPCSFGGVSVITPGTNTSNQVAVLYQDVNCTEVPVAIHADQLTPTWRVYSTGSNVFQTRAGCLIGAEHVNNSYECDIPIGAGICASYQTQTNSPRRARSVASQSIIAYTMSLGAENSVAYSNNSCAIPTNFTISVTTEILPVSMTKTSVDCTMYICGDSTECSNLLLQYGSFCTQLNRALTGIAVEQDKNTQEVFAQVKQIYKTPPIKDFGGFNFSQILPDPSKPSKRSFIEDLLFNKVTLADAGFIKQYGDCLGDIAARDLICAQKFNGLTVLPPLLTDEMIAQYTSALLAGTITSGWTFGAGAALQIPFAMQMAYRFNGIGVTQNVLYENQKLIANQFNSAIGKIQDSLSSTASALGKLQDVVNQNAQALNTLVKQLSSNFGAISSVLNDILSRLDKVEAEVQIDRLITGRLQSLQTYVTQQLIRAAEIRASANLAATKMSECVLGQSKRVDFCGKGYHLMSFPQSAPHGVVFLHVTYVPAQEKNFTCAPAICHDGKAHFPREGVFVSNGTHWFVTQRNFYEPQIITTDNTFVSGNCDVVIGIVNNTVYDPLQPELDS

SEQ ID NO: 2960 - protein, 1147 aa, Artificial Sequence
  SARS-CoV-2/France/IDF0372/2020__EPI_ISL_406596 spike protein (1-1147)(I712C_T1077C)
MFVFLVLLPLVSSQCVNLTTRTQLPPAYTNSFTRGVYYPDKVFRSSVLHSTQDLFLPFFSNVTWFHAIHVSGTNGTKRFDNPVLPFNDGVYFASTEKSNIIRGWIFGTTLDSKTQSLLIVNNATNVVIKVCEFQFCNDPFLGVYYHKNNKSWMESEFRVYSSANNCTFEYVSQPFLMDLEGKQGNFKNLREFVFKNIDGYFKIYSKHTPINLVRDLPQGFSALEPLVDLPIGINITRFQTLLALHRSYLTPGDSSSGWTAGAAAYYVGYLQPRTFLLKYNENGTITDAVDCALDPLSETKCTLKSFTVEKGIYQTSNFRVQPTESIVRFPNITNLCPFGEVFNATRFASVYAWNRKRISNCVADYSFLYNSASFSTFKCYGVSPTKLNDLCFTNVYADSFVIRGDEVRQIAPGQTGKIADYNYKLPDDFTGCVIAWNSNNLDSKVGGNYNYLYRLFRKSNLKPFERDISTEIYQAGSTPCNGVEGFNCYFPLQSYGFQPTNGVGYQPYRVVVLSFELLHAPATVCGPKKSTNLVKNKCVNFNFNGLTGTGVLTESNKKFLPFQQFGRDIADTTDAVRDPQTLEILDITPCSFGGVSVITPGTNTSNQVAVLYQDVNCTEVPVAIHADQLTPTWRVYSTGSNVFQTRAGCLIGAEHVNNSYECDIPIGAGICASYQTQTNSPRRARSVASQSIIAYTMSLGAENSVAYSNNSCAIPTNFTISVTTEILPVSMTKTSVDCTMYICGDSTECSNLLLQYGSFCTQLNRALTGIAVEQDKNTQEVFAQVKQIYKTPPIKDFGGFNFSQILPDPSKPSKRSFIEDLLFNKVTLADAGFIKQYGDCLGDIAARDLICAQKFNGLTVLPPLLTDEMIAQYTSALLAGTITSGWTFGAGAALQIPFAMQMAYRFNGIGVTQNVLYENQKLIANQFNSAIGKIQDSLSSTASALGKLQDVVNQNAQALNTLVKQLSSNFGAISSVLNDILSRLDKVEAEVQIDRLITGRLQSLQTYVTQQLIRAAEIRASANLAATKMSECVLGQSKRVDFCGKGYHLMSFPQSAPHGVVFLHVTYVPAQEKNFTCAPAICHDGKAHFPREGVFVSNGTHWFVTQRNFYEPQIITTDNTFVSGNCDVVIGIVNNTVYDPLQPELDS

SEQ ID NO: 2961 - protein, 1147 aa, Artificial Sequence
  SARS-CoV-2/Australia/VIC01/2020__EPI_ISL_406844 spike protein (1-1147)(I712C_T1077C)
MFVFLVLLPLVSSQCVNLTTRTQLPPAYTNSFTRGVYYPDKVFRSSVLHSTQDLFLPFFSNVTWFHAIHVSGTNGTKRFDNPVLPFNDGVYFASTEKSNIIRGWIFGTTLDSKTQSLLIVNNATNVVIKVCEFQFCNDPFLGVYYHKNNKSWMESEFRVYSSANNCTFEYVSQPFLMDLEGKQGNFKNLREFVFKNIDGYFKIYSKHTPINLVRDLPQGFSALEPLVDLPIGINITRFQTLLALHRRYLTPGDSSSGWTAGAAAYYVGYLQPRTFLLKYNENGTITDAVDCALDPLSETKCTLKSFTVEKGIYQTSNFRVQPTESIVRFPNITNLCPFGEVFNATRFASVYAWNRKRISNCVADYSVLYNSASFSTFKCYGVSPTKLNDLCFTNVYADSFVIRGDEVRQIAPGQTGKIADYNYKLPDDFTGCVIAWNSNNLDSKVGGNYNYLYRLFRKSNLKPFERDISTEIYQAGSTPCNGVEGFNCYFPLQSYGFQPTNGVGYQPYRVVVLSFELLHAPATVCGPKKSTNLVKNKCVNFNFNGLTGTGVLTESNKKFLPFQQFGRDIADTTDAVRDPQTLEILDITPCSFGGVSVITPGTNTSNQVAVLYQDVNCTEVPVAIHADQLTPTWRVYSTGSNVFQTRAGCLIGAEHVNNSYECDIPIGAGICASYQTQTNSPRRARSVASQSIIAYTMSLGAENSVAYSNNSCAIPTNFTISVTTEILPVSMTKTSVDCTMYICGDSTECSNLLLQYGSFCTQLNRALTGIAVEQDKNTQEVFAQVKQIYKTPPIKDFGGFNFSQILPDPSKPSKRSFIEDLLFNKVTLADAGFIKQYGDCLGDIAARDLICAQKFNGLTVLPPLLTDEMIAQYTSALLAGTITSGWTFGAGAALQIPFAMQMAYRFNGIGVTQNVLYENQKLIANQFNSAIGKIQDSLSSTASALGKLQDVVNQNAQALNTLVKQLSSNFGAISSVLNDILSRLDKVEAEVQIDRLITGRLQSLQTYVTQQLIRAAEIRASANLAATKMSECVLGQSKRVDFCGKGYHLMSFPQSAPHGVVFLHVTYVPAQEKNFTCAPAICHDGKAHFPREGVFVSNGTHWFVTQRNFYEPQIITTDNTFVSGNCDVVIGIVNNTVYDPLQPELDS

SEQ ID NO: 2962 - protein, 1147 aa, Artificial Sequence
  SARS-CoV-2/Germany/BavPat1/2020__EPI_ISL_406862 spike protein (1-1147)(I712C_T1077C)
MFVFLVLLPLVSSQCVNLTTRTQLPPAYTNSFTRGVYYPDKVFRSSVLHSTQDLFLPFFSNVTWFHAIHVSGTNGTKRFDNPVLPFNDGVYFASTEKSNIIRGWIFGTTLDSKTQSLLIVNNATNVVIKVCEFQFCNDPFLGVYYHKNNKSWMESEFRVYSSANNCTFEYVSQPFLMDLEGKQGNFKNLREFVFKNIDGYFKIYSKHTPINLVRDLPQGFSALEPLVDLPIGINITRFQTLLALHRSYLTPGDSSSGWTAGAAAYYVGYLQPRTFLLKYNENGTITDAVDCALDPLSETKCTLKSFTVEKGIYQTSNFRVQPTESIVRFPNITNLCPFGEVFNATRFASVYAWNRKRISNCVADYSVLYNSASFSTFKCYGVSPTKLNDLCFTNVYADSFVIRGDEVRQIAPGQTGKIADYNYKLPDDFTGCVIAWNSNNLDSKVGGNYNYLYRLFRKSNLKPFERDISTEIYQAGSTPCNGVEGFNCYFPLQSYGFQPTNGVGYQPYRVVVLSFELLHAPATVCGPKKSTNLVKNKCVNFNFNGLTGTGVLTESNKKFLPFQQFGRDIADTTDAVRDPQTLEILDITPCSFGGVSVITPGTNTSNQVAVLYQGVNCTEVPVAIHADQLTPTWRVYSTGSNVFQTRAGCLIGAEHVNNSYECDIPIGAGICASYQTQTNSPRRARSVASQSIIAYTMSLGAENSVAYSNNSCAIPTNFTISVTTEILPVSMTKTSVDCTMYICGDSTECSNLLLQYGSFCTQLNRALTGIAVEQDKNTQEVFAQVKQIYKTPPIKDFGGFNFSQILPDPSKPSKRSFIEDLLFNKVTLADAGFIKQYGDCLGDIAARDLICAQKFNGLTVLPPLLTDEMIAQYTSALLAGTITSGWTFGAGAALQIPFAMQMAYRFNGIGVTQNVLYENQKLIANQFNSAIGKIQDSLSSTASALGKLQDVVNQNAQALNTLVKQLSSNFGAISSVLNDILSRLDKVEAEVQIDRLITGRLQSLQTYVTQQLIRAAEIRASANLAATKMSECVLGQSKRVDFCGKGYHLMSFPQSAPHGVVFLHVTYVPAQEKNFTCAPAICHDGKAHFPREGVFVSNGTHWFVTQRNFYEPQIITTDNTFVSGNCDVVIGIVNNTVYDPLQPELDS

SEQ ID NO: 2963 - protein, 1147 aa, Artificial Sequence
  SARS-CoV-2/Wuhan/HBCDC-HB-02/2020__EPI_ISL_412978 spike protein (1-1147)(I712C_T1077C)
MFVFLVLLPLVSSQCVNLTTRTQLPPAYTNSFTRGVYYPDKVFRSSVLHSTQDLFLPFFSNVTWFHAIHVSGTNGTKRFDNPVLPFNDGVYFASTEKSNIIRGWIFGTTLDSKTQSLLIVNNATNVVIKVCEFQFCNDPFLGVYYHKNNKSWMESEFRVYSSANNCTFEYVSQPFLMDLEGKQGNFKNLREFVFKNIDGYFKIYSKHTPINLVRDLPQGFSALEPLVDLPIGINITRFQTLLALHRSYLTPGDSSSGWTAGAAAYYVGYLQPRTFLLKYNENGTITDAVDCALDPLSETKCTLKSFTVEKGIYQTSNFRVQPTESIVRFPNITNLCPFGEVFNATRFASVYAWNRKRISNCVADYSVLYNSASFSTFKCYGVSPTKLNDLCFTNVYADSFVIRGDEVRQIAPGQTGKIADYNYKLPDDFTGCVIAWNSNNLDSKVGGNYNYLYRLFRKSNLKPFERDISTEIYQAGSTPCNGVEGFNCYFPLQSYGFQPTNGVGYQPYRVVVLSFELLHAPATVCGPKKSTNLVKNKCVNFNFNGLTGTGVLTESNKKFLPFQQFGRDIADTTDAVRDPQTLEILDITPCSFGGVSVITPGTNTSNQVAVLYQDVNCTEVPVAIHADQLTPTWRVYSTGSNVFQTRAGCLIGAEHVNNSYECDIPIGAGICASYQTQTNSPRRARSVASQSIIAYTMSLGAENSVAYSNNSCAIPTNFTISVTTEILPVSMTKTSVDCTMYICGDSTECSNFLLQYGSFCTQLNRALTGIAVEQDKNTQEVFAQVKQIYKTPPIKDFGGFNFSQILPDPSKPSKRSFIEDLLFNKVTLADAGFIKQYGDCLGDIAARDLICAQKFNGLTVLPPLLTDEMIAQYTSALLAGTITSGWTFGAGAALQIPFAMQMAYRFNGIGVTQNVLYENQKLIANQFNSAIGKIQDSLSSTASALGKLQDVVNQNAQALNTLVKQLSSNFGAISSVLNDILSRLDKVEAEVQIDRLITGRLQSLQTYVTQQLIRAAEIRASANLAATKMSECVLGQSKRVDFCGKGYHLMSFPQSAPHGVVFLHVTYVPAQEKNFTCAPAICHDGKAHFPREGVFVSNGTHWFVTQRNFYEPQIITTDNTFVSGNCDVVIGIVNNTVYDPLQPELDS

SEQ ID NO: 2964 - protein, 1147 aa, Artificial Sequence
  SARS-CoV-2/Australia/QLD02/2020__EPI_ISL_407896 spike protein (1-1147)(I712C_T1077C)
MFVFLVLLPLVSSQCVNLTTRTQLPPAYTNSFTRGVYYPDKVFRSSVLHSTQDLFLPFFSNVTWFHAIHVSGTNGTKRFDNPVLPFNDGVYFASTEKSNIIRGWIFGTTLDSKTQSLLIVNNATNVVIKVCEFQFCNDPFLGVYYHKNNKSWMESEFRVYSSANNCTFEYVSQPFLMDLEGKQGNFKNLREFVFKNIDGYFKIYSKHTPINLVRDLPQGFSALEPLVDLPIGINITRFQTLLALHRSYLTPGDSSSGWTAGAAAYYVGYLQPRTFLLKYNENGTITDAVDCALDPLSETKCTLKSFTVEKGIYQTSNFRVQPTESIVRFPNITNLCPFGEVFNATRFASVYAWNRKRISNCVADYSVLYNSASFSTFKCYGVSPTKLNDLCFTNVYADSFVIRGDEVRQIAPGQTGKIADYNYKLPDDFTGCVIAWNSNNLDSKVGGNYNYLYRLFRKSNLKPFERDISTEIYQAGSTPCNGVEGFNCYFPLQSYGFQPTNGVGYQPYRVVVLSFELLHAPATVCGPKKSTNLVKNKCVNFNFNGLTGTGVLTESNKKFLPFQQFGRDIADTTDAVRDPQTLEILDITPCSFGGVSVITPGTNTSNQVAVLYQDVNCTEVPVAIHADQLTPTWRVYSTGSNVFQTRAGCLIGAEHVNNSYECDIPIGAGICASYQTQTNSPRRARSVASQSIIAYTMSLGAENSVAYSNNSCAIPTNFTISVTTEILPVSMTKTSVDCTMYICGDSTECSNLLLQYGSFCTQLNRALTGIAVEQDKNTQEVFAQVKQIYKTPPIKDFGGFNFSQILPDPSKPSKRSFIEDLLFNKVTLADAGFIKQYGDCLGDIAARDLICAQKFNGLTVLPPLLTDEMIAQYTSALLAGTITSGWTFGAGAALQIPFAMQMAYRFNGIGVTQNVLYENQKLIANQFNSAIGKIQDSLSSTASALGKLQDVVNQNAQALNTLVKQLSSNFGAISSVLNDILSRLDKVEAEVQIDRLITGRLQSLQTYVTQQLIRAAEIRASANLAATKMSECVLGQSKRVDFCGKGYHLMSFPQSAPHGVVFLHVTYVPAQEKNFTCAPAICHDGKAHFPREGVFVSNGTHWFVTQRNFYEPQIITTDNTFVSGNCDVVIGIVNNTVYDPLQLELDS

SEQ ID NO: 2965 - protein, 1147 aa, Artificial Sequence
  SARS-CoV-2/India/1-31/2020__EPI_ISL_413523 spike protein (1-1147)(I712C_T1077C)
MFVFLVLLPLVSSQCVNLTTRTQLPPAYTNSFTRGVYYPDKVFRSSVLHSTQDLFLPFFSNVTWFHAIHVSGTNGTKRFDNPVLPFNDGVYFASTEKSNIIRGWIFGTTLDSKTQSLLIVNNATNVVIKVCEFQFCNDPFLGVYYHKNNKSWMESEFRVYSSANNCTFEYVSQPFLMDLEGKQGNFKNLREFVFKNIDGYFKIYSKHTPINLVRDLPQGFSALEPLVDLPIGINITRFQTLLALHRSYLTPGDSSSGWTAGAAAYYVGYLQPRTFLLKYNENGTITDAVDCALDPLSETKCTLKSFTVEKGIYQTSNFRVQPTESIVRFPNITNLCPFGEVFNATRFASVYAWNRKRISNCVADYSVLYNSASFSTFKCYGVSPTKLNDLCFTNVYADSFVIRGDEVRQIAPGQTGKIADYNYKLPDDFTGCVIAWNSNNLDSKVGGNYNYLYRLFRKSNLKPFERDISTEIYQAGSTPCNGVEGFNCYFPLQSYGFQPTNGVGYQPYRVVVLSFELLHAPATVCGPKKSTNLVKNKCVNFNFNGLTGTGVLTESNKKFLPFQQFGRDIADTTDAVRDPQTLEILDITPCSFGGVSVITPGTNTSNQVAVLYQDVNCTEVPVAIHADQLTPTWRVYSTGSNVFQTRAGCLIGAEHVNNSYECDIPIGAGICASYQTQTNSPRRARSVASQSIIAYTMSLGAENSVAYSNNSCAIPTNFTISVTTEILPVSMTKTSVDCTMYICGDSTECSNLLLQYGSFCTQLNRALTGIAVEQDKNTQEVFAQVKQIYKTPPIKDFGGFNFSQILPDPSKPSKRSFIEDLLFNKVTLADAGFIKQYGDCLGDIAARDLICAQKFNGLTVLPPLLTDEMIAQYTSALLAGTITSGWTFGAGAALQIPFAMQMAYRFNGIGVTQNVLYENQKLIANQFNSVIGKIQDSLSSTASALGKLQDVVNQNAQALNTLVKQLSSNFGAISSVLNDILSRLDKVEAEVQIDRLITGRLQSLQTYVTQQLIRAAEIRASANLAATKMSECVLGQSKRVDFCGKGYHLMSFPQSAPHGVVFLHVTYVPAQEKNFTCAPAICHDGKAHFPREGVFVSNGTHWFVTQRNFYEPQIITTDNTFVSGNCDVVIGIVNNTVYDPLQPELDS

SEQ ID NO: 2966 - protein, 1147 aa, Artificial Sequence
  SARS-CoV-2/Guangdong/GD2020087-P0008/2020__EPI_ISL_413863 spike protein (1-1147)(I712C_T1077C)
MFVFLVLLPLVSSQCVNLTTRTQLPPAYTNSFTRGVYYPDKVFRSSVLHSTQDLFLPFFSNVTWFHAIHVSGTNGTKRFDNPVLPFNDGVYFASTEKSNIIRGWIFGTTLDSKTQSLLIVNNATNVVIKVCEFQFCNDPFLGVYYHKNNKSWMESEFRVYSSANNCTFEYVSQPFLMDLEGKQGNFKNLREFVFKNIDGYFKIYSKHTPINLVRDLPQGFSALEPLVDLPIGINITRFQTLLALHRSYLTPGDSSSGWTAGAAAYYVGYLQPRTFLLKYNENGTITDAVDCALDPLSETKCTLKSFTVEKGIYQTSNFRVQPTESIVRFPNITNLCPFGEVFNATRFASVYAWNRKRISNCVADYSVLYNSASFSTFKCYGVSPTKLNDLCFTNVYADSFVIRGDEVREIAPGQTGKIADYNYKLPDDFTGCVIAWNSNNLDSKVGGNYNYLYRLFRKSNLKPFERDISTEIYQAGSTPCNGVEGFNCYFPLQSYGFQPTNGVGYQPYRVVVLSFELLHAPATVCGPKKSTNLVKNKCVNFNFNGLTGTGVLTESNKKFLPFQQFGRDIADTTDAVRDPQTLEILDITPCSFGGVSVITPGTNTSNQVAVLYQDVNCTEVPVAIHADQLTPTWRVYSTGSNVFQTRAGCLIGAEHVNNSYECDIPIGAGICASYQTQTNSPRRARSVASQSIIAYTMSLGAENSVAYSNNSCAIPTNFTISVTTEILPVSMTKTSVDCTMYICGDSTECSNLLLQYGSFCTQLNRALTGIAVEQDKNTQEVFAQVKQIYKTPPIKDFGGFNFSQILPDPSKPSKRSFIEDLLFNKVTLADAGFIKQYGDCLGDIAARDLICAQKFNGLTVLPPLLTDEMIAQYTSALLAGTITSGWTFGAGAALQIPFAMQMAYRFNGIGVTQNVLYENQKLIANQFNSAIGKIQDSLSSTASALGKLQDVVNQNAQALNTLVKQLSSNFGAISSVLNDILSRLDKVEAEVQIDRLITGRLQSLQTYVTQQLIRAAEIRASANLAATKMSECVLGQSKRVDFCGKGYHLMSFPQSAPHGVVFLHVTYVPAQEKNFTCAPAICHDGKAHFPREGVFVSNGTHWFVTQRNFYEPQIITTDNTFVSGNCDVVIGIVNNTVYDPLQPELDS

SEQ ID NO: 2967 - protein, 1147 aa, Artificial Sequence
  SARS-CoV-2/Sweden/01/2020__EPI_ISL_411951 spike protein (1-1147)(I712C_T1077C)
MFVFLVLLPLVSSQCVNLTTRTQLPPAYTNSFTRGVYYPDKVFRSSVLHSTQDLFLPFFSNVTWFHAIHVSGTNGTKRFDNPVLPFNDGVYFASTEKSNIIRGWIFGTTLDSKTQSLLIVNNATNVVIKVCEFQFCNDPFLGVYYHKNNKSWMESEFRVYSSANNCTFEYVSQPFLMDLEGKQGNFKNLREFVFKNIDGYFKIYSKHTPINLVRDLPQGFSALEPLVDLPIGINITRFQTLLALHRSYLTPGDSSSGWTAGAAAYYVGYLQPRTFLLKYNENGTITDAVDCALDPLSETKCTLKSFTVEKGIYQTSNFRVQPTESIVRFPNITNLCPFGEVFNATRFASVYAWNRKRISNCVADYSVLYNSASFSTFKCYGVSPTKLNDLCFTNVYADSFVIRGDEVRQIAPGQTGKIADYNYKLPDDFTGCVIAWNSNNLDSKVGGNYNYLYRLFRKSNLKPFERDISTEIYQAGSTPCNGVEGFNCYFPLQSYGFQPTNGVGYQPYRVVVLSFELLHAPATVCGPKKSTNLVKNKCVNFNFNGLTGTGVLTESNKKFLPFQQFGRDIADTTDAVRDPQTLEILDITPCSFGGVSVITPGTNTSNQVAVLYQDVNCTEVPVAIHADQLTPTWRVYSTGSNVFQTRAGCLIGAEHVNNSYECDIPIGAGICASYQTQTNSPRRARSVASQSIIAYTMSLGAENSVAYSNNSCAIPTNFTISVTTEILPVSMTKTSVDCTMYICGDSTECSNLLLQYGSFCTQLNRALTGIAVEQDKNTQEVFAQVKQIYKTPPIKDCGGFNFSQILPDPSKPSKRSFIEDLLFNKVTLADAGFIKQYGDCLGDIAARDLICAQKFNGLTVLPPLLTDEMIAQYTSALLAGTITSGWTFGAGAALQIPFAMQMAYRFNGIGVTQNVLYENQKLIANQFNSAIGKIQDSLSSTASALGKLQDVVNQNAQALNTLVKQLSSNFGAISSVLNDILSRLDKVEAEVQIDRLITGRLQSLQTYVTQQLIRAAEIRASANLAATKMSECVLGQSKRVDFCGKGYHLMSFPQSAPHGVVFLHVTYVPAQEKNFTCAPAICHDGKAHFPREGVFVSNGTHWFVTQRNFYEPQIITTDNTFVSGNCDVVIGIVNNTVYDPLQPELDS

SEQ ID NO: 2968 - protein, 1147 aa, Artificial Sequence
  SARS-CoV-2/Tianmen/HBCDC-HB-07/2020__EPI_ISL_412983 spike protein (1-1147)(I712C_T1077C)
MFVFLVLLPLVSSQCVNLTTRTQLPPAYTNSFTRGVYYPDKVFRSSVLHSTQDLFLPFFSNVTWFHAIHVSGTNGTKRFDNPVLPFNDGVYFASTEKSNIIRGWIFGTTLDSKTQSLLIVNNATNVVIKVCEFQFCNDPFLGVYYHKNNKSWMESEFRVYSSANNCTFEYVSQPFLMDLEGKQGNFKNLREFVFKNIDGYFKIYSKHTPINLVRDLPQGFSALEPLVDLPIGINITRFQTLLALHRSYLTPGDSSSGWTAGAAAYYVGYLQPRTFLLKYNENGTITDAVDCALDPLSETKCTLKSFTVEKGIYQTSNFRVQPTESIVRFPNITNLCPFGEVFNATRFASVYAWNRKRISNCVADYSVLYNSASFSTFKCYGVSPTKLNDLCFTNVYADSFVIRGDEVRQIAPGQTGKIADYNYKLPDDFTGCVIAWNSNNLDSKVGGNYNYLYRLFRKSNLKPFERDISTEIYQAGSTPCNGVEGFNCYFPLQSYGFQPTNGVGYQPYRVVVLSFELLHAPATVCGPKKSTNLVKNKCVNFNFNGLTGTGVLTESNKKFLPFQQFGRDIADTTDAVRDPQTLEILDITPCSFGGVSVITPGTNTSNQVAVLYQDLNCTEVPVAIHADQLTPTWRVYSTGSNVFQTRAGCLIGAEHVNNSYECDIPIGAGICASYQTQTNSPRRARSVASQSIIAYTMSLGAENSVAYSNNSCAIPTNFTISVTTEILPVSMTKTSVDCTMYICGDSTECSNLLLQYGSFCTQLNRALTGIAVEQDKNTQEVFAQVKQIYKTPPIKDFGGFNFSQILPDPSKPSKRSFIEDLLFNKVTLADAGFIKQYGDCLGDIAARDLICAQKFNGLTVLPPLLTDEMIAQYTSALLAGTITSGWTFGAGAALQIPFAMQMAYRFNGIGVTQNVLYENQKLIANQFNSAIGKIQDSLSSTASALGKLQDVVNQNAQALNTLVKQLSSNFGAISSVLNDILSRLDKVEAEVQIDRLITGRLQSLQTYVTQQLIRAAEIRASANLAATKMSECVLGQSKRVDFCGKGYHLMSFPQSAPHGVVFLHVTYVPAQEKNFTCAPAICHDGKAHFPREGVFVSNGTHWFVTQRNFYEPQIITTDNTFVSGNCDVVIGIVNNTVYDPLQPELDS

SEQ ID NO: 2969 - protein, 1147 aa, Artificial Sequence
  SARS-CoV-2/Hong Kong/case42_VM20002493/2020__EPI_ISL_414527 spike protein (1-1147)(I712C_T1077C)
MFVFLVLLPLVSSQCVNLTTRTQLPPAYTNSFTRGVYYPDKVFRSSVLHSTQDLFLPFFSNVTWFHAIHVSGTNGTKRFDNPVLPFNDGVYFASTEKSNIIRGWIFGTTLDSKTQSLLIVNNATNVVIKVCEFQFCNDPFLGVYYHKNNKSWMESEFRVYSSANNCTFEYVSQPFLMDLEGKQGNFKNLREFVFKNIDGYFKIYSKHTPINLVRDLPQGFSALEPLVDLPIGINITRFQTLLALHRSYLTPGDSSSGWTAGAAAYYVGYLQPRTFLLKYNENGTITDAVDCALDPLSETKCTLKSFTVEKGIYQTSNFRVQPTESIVRFPNITNLCPFGEVFNATRFASVYAWNRKRISNCVADYSVLYNSASFSTFKCYGVSPTKLNDLCFTNVYADSFVIRGDEVRQIAPGQTGKIADYNYKLPDDFTGCVIAWNSNNLDSKVGGNYNYLYRLFRKSNLKPFERDISTEIYQAGSTPCNGVEGFNCYFPLQSYGFQPTNGVGYQPYRVVVLSFELLHAPATVCGPKKSTNLVKNKCVNFNFNGLTGTGVLTESNKKFLPFQQFGRDIADTTDAVRDPQTLEILDITPCSFGGVSVITPGTNTSNQVAVLYQDVNCTEVPVAIHADQLTPTWRVYSTGSNVFQTRAGCLIGAEHVNNSYECDIPIGAGICASYQTQTNSPRRARSVASQSIIAYTMSLGAENSVAYSNNSCAIPTNFAISVTTEILPVSMTKTSVDCTMYICGDSTECSNLLLQYGSFCTQLNRALTGIAVEQDKNTQEVFAQVKQIYKTPPIKDFGGFNFSQILPDPSKPSKRSFIEDLLFNKVTLADAGFIKQYGDCLGDIAARDLICAQKFNGLTVLPPLLTDEMIAQYTSALLAGTITSGWTFGAGAALQIPFAMQMAYRFNGIGVTQNVLYENQKLIANQFNSAIGKIQDSLSSTASALGKLQDVVNQNAQALNTLVKQLSSNFGAISSVLNDILSRLDKVEAEVQIDRLITGRLQSLQTYVTQQLIRAAEIRASANLAATKMSECVLGQSKRVDFCGKGYHLMSFPQSAPHGVVFLHVTYVPAQEKNFTCAPAICHDGKAHFPREGVFVSNGTHWFVTQRNFYEPQIITTDNTFVSGNCDVVIGIVNNTVYDPLQPELDS

SEQ ID NO: 2970 - protein, 1147 aa, Artificial Sequence
  SARS-CoV-2/USA/CruiseA-23/2020__EPI_ISL_414482 spike protein (1-1147)(I712C_T1077C)
MFVFLVLLPLVSSQCVNLTTRTQLPPAYTNSFTRGVYYPDKVFRSSVLHSTQDLFLPFFSNVTWFHAIHVSGTNGTKRFDNPVLPFNDGVYFASTEKSNIIRGWIFGTTLDSKTQSLLIVNNATNVVIKVCEFQFCNDPFLGVYYHKNNKSWMESEFRVYSSANNCTFEYVSQPFLMDLEVKQGNFKNLREFVFKNIDGYFKIYSKHTPINLVRDLPQGFSALEPLVDLPIGINITRFQTLLALHRSYLTPGDSSSGWTAGAAAYYVGYLQPRTFLLKYNENGTITDAVDCALDPLSETKCTLKSFTVEKGIYQTSNFRVQPTESIVRFPNITNLCPFGEVFNATRFASVYAWNRKRISNCVADYSVLYNSASFSTFKCYGVSPTKLNDLCFTNVYADSFVIRGDEVRQIAPGQTGKIADYNYKLPDDFTGCVIAWNSNNLDSKVGGNYNYLYRLFRKSNLKPFERDISTEIYQAGSTPCNGVEGFNCYFPLQSYGFQPTNGVGYQPYRVVVLSFELLHAPATVCGPKKSTNLVKNKCVNFNFNGLTGTGVLTESNKKFLPFQQFGRDIADTTDAVRDPQTLEILDITPCSFGGVSVITPGTNTSNQVAVLYQDVNCTEVPVAIHADQLTPTWRVYSTGSNVFQTRAGCLIGAEHVNNSYECDIPIGAGICASYQTQTNSPRRARSVASQSIIAYTMSLGAENSVAYSNNSCAIPTNFTISVTTEILPVSMTKTSVDCTMYICGDSTECSNLLLQYGSFCTQLNRALTGIAVEQDKNTQEVFAQVKQIYKTPPIKDFGGFNFSQILPDPSKPSKRSFIEDLLFNKVTLADAGFIKQYGDCLGDIAARDLICAQKFNGLTVLPPLLTDEMIAQYTSALLAGTITSGWTFGAGAALQIPFAMQMAYRFNGIGVTQNVLYENQKLIANQFNSAIGKIQDSLSSTASALGKLQDVVNQNAQALNTLVKQLSSNFGAISSVLNDILSRLDKVEAEVQIDRLITGRLQSLQTYVTQQLIRAAEIRASANLAATKMSECVLGQSKRVDFCGKGYHLMSFPQSAPHGVVFLHVTYVPAQEKNFTCAPAICHDGKAHFPREGVFVSNGTHWFVTQRNFYEPQIITTDNTFVSGNCDVVIGIVNNTVYDPLQPELDS

SEQ ID NO: 2971 - protein, 1147 aa, Artificial Sequence
  SARS-CoV-2/Hong Kong/case85_VM20002868/2020__EPI_ISL_414519 spike protein (1-1147)(I712C_T1077C)
MFVFLVLVPLVSSQCVNLTTRTQLPPAYTNSFTRGVYYPDKVFRSSVLHSTQDLFLPFFSNVTWFHAIHVSGTNGTKRFDNPVLPFNDGVYFASTEKSNIIRGWIFGTTLDSKTQSLLIVNNATNVVIKVCEFQFCNDPFLGVYYHKNNKSWMESEFRVYSSANNCTFEYVSQPFLMDLEGKQGNFKNLREFVFKNIDGYFKIYSKHTPINLVRDLPQGFSALEPLVDLPIGINITRFQTLLALHRSYLTPGDSSSGWTAGAAAYYVGYLQPRTFLLKYNENGTITDAVDCALDPLSETKCTLKSFTVEKGIYQTSNFRVQPTESIVRFPNITNLCPFGEVFNATRFASVYAWNRKRISNCVADYSVLYNSASFSTFKCYGVSPTKLNDLCFTNVYADSFVIRGDEVRQIAPGQTGKIADYNYKLPDDFTGCVIAWNSNNLDSKVGGNYNYLYRLFRKSNLKPFERDISTEIYQAGSTPCNGVEGFNCYFPLQSYGFQPTNGVGYQPYRVVVLSFELLHAPATVCGPKKSTNLVKNKCVNFNFNGLTGTGVLTESNKKFLPFQQFGRDIADTTDAVRDPQTLEILDITPCSFGGVSVITPGTNTSNQVAVLYQDVNCTEVPVAIHADQLTPTWRVYSTGSNVFQTRAGCLIGAEHVNNSYECDIPIGAGICASYQTQTNSPRRARSVASQSIIAYTMSLGAENSVAYSNNSCAIPTNFTISVTTEILPVSMTKTSVDCTMYICGDSTECSNLLLQYGSFCTQLNRALTGIAVEQDKNTQEVFAQVKQIYKTPPIKDFGGFNFSQILPDPSKPSKRSFIEDLLFNKVTLADAGFIKQYGDCLGDIAARDLICAQKFNGLTVLPPLLTDEMIAQYTSALLAGTITSGWTFGAGAALQIPFAMQMAYRFNGIGVTQNVLYENQKLIANQFNSAIGKIQDSLSSTASALGKLQDVVNQNAQALNTLVKQLSSNFGAISSVLNDILSRLDKVEAEVQIDRLITGRLQSLQTYVTQQLIRAAEIRASANLAATKMSECVLGQSKRVDFCGKGYHLMSFPQSAPHGVVFLHVTYVPAQEKNFTCAPAICHDGKAHFPREGVFVSNGTHWFVTQRNFYEPQIITTDNTFVSGNCDVVIGIVNNTVYDPLQPELDS

SEQ ID NO: 2972 - protein, 1147 aa, Artificial Sequence; identical to SEQ ID NO: 2962
  SARS-CoV-2/England/200990660/2020__EPI_ISL_414523 spike protein (1-1147)(I712C_T1077C)

SEQ ID NO: 2973 - protein, 1147 aa, Artificial Sequence
  SARS-CoV-2/Australia/NSW09/2020__EPI_ISL_413595 spike protein (1-1147)(I712C_T1077C)
MFVFLVLLPLVSSQCVNLTTRTQLPPAYTNSFTRGVYYPDKVFRSSVLHSTQDLFLPFFSNVTWFHAIHVSGTNGTKRFDNPVLPFNDGVYFASTEKSNIIRGWIFGTTLDSKTQSLLIVNNATNVVIKVCEFQFCNDPFLGVYYHKNNKSWMESEFRVYSSANNCTFEYVSQPFLMDLEGKQGNFKNLREFVFKNIDGYFKIYSKHTPINLVRDLPQGFSALEPLVDLPIGINITRFQTLLALHRSYLTPGDSSSGWTAGAAAYYVGYLQPRTFLLKYNENGTITDAVDCALDPLSETKCTLKSFTVEKGIYQTSNFRVQPTESIVRFPNITNLCPFGEVFNATRFASVYAWNRKRISNCVADYSVLYNSASFSTFKCYGVSPTKLNDLCFTNVYADSFVIRGDEVRQIAPGQTGKIADYNYKLPDDFTGCVIAWNSNNLDSKVGGNYNYLYRLFRKSNLKPFERDISTEIYQAGSTPCNGVEGFNCYFPLQSYGFQPTNGVGYQPYRVVVLSFELLHAPATVCGPKKSTNLVKNKCVNFNFNGLTGTGVLTESNKKFLPFQQFGRDIADTTDAVRDPQTLEILDITPCSFGGVSVITPGTNTSNQVAVLYQDVNCTEVPVAIHADQLTPTWRVYSTGSNVFQTRAGCLIGAEHVNNSYECDIPIGAGICASYQTQTNSPRRARSVASQSIIAYTMSLGAENSVAYSNNSCAIPTNFTISVTTEILPVSMTKTSVDCTMYICGDSTECSNLLLQYGSFCTQLNRALTGIAVEQDKNTQEVFAQVKQIYKTPPIKDFGGFNFSQILPDPSKPSKRSFIEDLLFNKVTLADAGFIKQYGDCLGDIAARDLICAQKFNGLTVLPPLLTDEMIAQYTSALLAGTITSGWTFGAGAALQIPFAMQMAYRFNGIGVTQNVLYENQKLIANQFNSAIGKIQDSLSFTASALGKLQDVVNQNAQALNTLVKQLSSNFGAISSVLNDILSRLDKVEAEVQIDRLITGRLQSLQTYVTQQLIRAAEIRASANLAATKMSECVLGQSKRVDFCGKGYHLMSFPQSAPHGVVFLHVTYVPAQEKNFTCAPAICHDGKAHFPREGVFVSNGTHWFVTQRNFYEPQIITTDNTFVSGNCDVVIGIVNNTVYDPLQPELDS

SEQ ID NO: 2974 - protein, 1147 aa, Artificial Sequence; identical to SEQ ID NO: 2954
  SARS-CoV-2/Australia/NSW10/2020__EPI_ISL_413596 spike protein (1-1147)(I712C_T1077C)

SEQ ID NO: 2975 - protein, 1147 aa, Artificial Sequence
  SARS-CoV-2/Switzerland/1000477797/2020__EPI_ISL_413023 spike protein (1-1147)(I712C_T1077C)
MFVFLVLLPLVSSQCVNLTTRTQLPPAYTNSFTRGVYYPDKVFRSSVLHSTQDLFLPFFSNVTWFHAIHVSGTNGTKRFDNPVLPFNDGVYFASTEKSNIIRGWIFGTTLDSKTQSLLIVNNATNVVIKVCEFQFCNDPFLGVYYHKNNKSWMESEFRVYSSANNCTFEYVSQPFLMDLEGKQGNFKNLREFVFKNIDGYFNIYSKHTPINLVRDLPQGFSALEPLVDLPIGINITRFQTLLALHRSYLTPGDSSSGWTAGAAAYYVGYLQPRTFLLKYNENGTITDAVDCALDPLSETKCTLKSFTVEKGIYQTSNFRVQPTESIVRFPNITNLCPFGEVFNATRFASVYAWNRKRISNCVADYSVLYNSASFSTFKCYGVSPTKLNDLCFTNVYADSFVIRGDEVRQIAPGQTGKIADYNYKLPDDFTGCVIAWNSNNLDSKVGGNYNYLYRLFRKSNLKPFERDISTEIYQAGSTPCNGVEGFNCYFPLQSYGFQPTNGVGYQPYRVVVLSFELLHAPATVCGPKKSTNLVKNKCVNFNFNGLTGTGVLTESNKKFLPFQQFGRDIADTTDAVRDPQTLEILDITPCSFGGVSVITPGTNTSNQVAVLYQGVNCTEVPVAIHADQLTPTWRVYSTGSNVFQTRAGCLIGAEHVNNSYECDIPIGAGICASYQTQTNSPRRARSVASQSIIAYTMSLGAENSVAYSNNSCAIPTNFTISVTTEILPVSMTKTSVDCTMYICGDSTECSNLLLQYGSFCTQLNRALTGIAVEQDKNTQEVFAQVKQIYKTPPIKDFGGFNFSQILPDPSKPSKRSFIEDLLFNKVTLADAGFIKQYGDCLGDIAARDLICAQKFNGLTVLPPLLTDEMIAQYTSALLAGTITSGWTFGAGAALQIPFAMQMAYRFNGIGVTQNVLYENQKLIANQFNSAIGKIQDSLSSTASALGKLQDVVNQNAQALNTLVKQLSSNFGAISSVLNDILSRLDKVEAEVQIDRLITGRLQSLQTYVTQQLIRAAEIRASANLAATKMSECVLGQSKRVDFCGKGYHLMSFPQSAPHGVVFLHVTYVPAQEKNFTCAPAICHDGKAHFPREGVFVSNGTHWFVTQRNFYEPQIITTDNTFVSGNCDVVIGIVNNTVYDPLQPELDS

SEQ ID NO: 2976 - protein, 1147 aa, Artificial Sequence
  SARS-CoV-2/Belgium/BA-02291/2020__EPI_ISL_415159 spike protein (1-1147)(I712C_T1077C)
MFVFLVLLPLVSSQCVNLTTRTQLPPAYTNSFTRGVYYPDKVFRSSVLHSTQDLFLPFFSNVTWFHAIHVSGTNGTKRFDNPVLPFNDGVYFASTEKSNIIRGWIFGTTLDSKTQSLLIVNNATNVVIKVCEFQFCNDPFLGVYYHKNNKSWMESEFRVYSSANNCTFEYVSQPFLMDLEGKQGNFKNLREFVFKNIDGYFKIYSKHTPINLVRDLPQGFSALEPLVDLPIGINITRFQTLLALHRSYLTPGDSSSGWTAGAAAYYVGYLQPRTFLLKYNENGTITDAVDCALDPLSETKCTLKSFTVEKGIYQTSNFRVQPTESIVRFPNITNLCPFGEVFNATRFASVYAWNRKRISNCVADYSVLYNSASFSTFKCYGVSPTKLNDLCFTNVYADSFVIRGDEVRQIAPGQTGKIADYNYKLPDDFTGCVIAWNSNNLDSKVGGNYNYLYRLFRRSNLKPFERDISTEIYQAGSTPCNGVEGFNCYFPLQSYGFQPTNGVGYQPYRVVVLSFELLPAPATVCGPKKSTNLVKNKCVNFNFNGLTGTGVLTESNKKFLPFQQFGRDIADTTDAVRDPQTLEILDITPCSFGGVSVITPGTNTSNQVAVLYQGVNCTEVPVAIHADQLTPTWRVYSTGSNVFQTRAGCLIGAEHVNNSYECDIPIGAGICASYQTQTNSPRRARSVASQSIIAYTMSLGAENSVAYSNNSCAIPTNFTISVTTEILPVSMTKTSVDCTMYICGDSTECSNLLLQYGSFCTQLNRALTGIAVEQDKNTQEVFAQVKQIYKTPPIKDFGGFNFSQILPDPSKPSKRSFIEDLLFNKVTLADAGFIKQYGDCLGDIAARDLICAQKFNGLTVLPPLLTDEMIAQYTSALLAGTITSGWTFGAGAALQIPFAMQMAYRFNGIGVTQNVLYENQKLIANQFNSAIGKIQDSLSSAAPALGKLQDVVNQNAQALNTLVKQLSSNFGAISSVLNDILSRLDKVEAEVQIDRLITGRLQSLQTYVTQQLIRAAEIRASANLAATKMSECVLGQSKRVDFCGKGYHLMSFPQSAPHGVVFLHVTYVPAQEKNFTCAPAICHDGKAHFPREGVFVSNGTHWFVTQRNFYEPQIITTDNTFVSGNCDVVIGIVNNTVYDPLQPELDS

SEQ ID NO: 2977 - protein, 1147 aa, Artificial Sequence
  SARS-CoV-2/USA/WA8-UW5/2020__EPI_ISL_413486 spike protein (1-1147)(I712C_T1077C)
MFVFLVLLPLVSSQCVNLTTRTQLPPAYTNSFTRGVYYPDKVFRSSVLHSTQDLFLPFFSNVTWFHAIHVSGTNGTKRFDNPVLPFNDGVYFASTEKSNIIRGWIFGTTLDSKTQSLLIVNNATNVVIKVCEFQFCNDPFLGVYYHKNNKSWMESEFRVYSSANNCTFEYVSQPFLMDLEGKQGNFKNLREFVFKNIDGYFKIYSKHTPINLVRDLPQGFSALEPLVDLPIGINITRFQTLLALHRSYLTPGDSSSGWTAGAAAYYVGYLQPRTFLLKYNENGTITDAVDCALDPLSETKCTLKSFTVEKGIYQTSNFRVQPTESIVRFPNITNLCPFGEVFNATRFASVYAWNRKRISNCVADYSVLYNSASFSTFKCYGVSPTKLNDLCFTNVYADSFVIRGDEVRQIAPGQTGKIADYNYKLPDDFTGCVIAWNSNNLDSKVGGNYNYLYRLFRKSNLKPFERDISTEIYQAGSTPCNGVEGFNCYFPLQSYGFQPTNGVGYQPYRVVVLSFELLHAPATVCGPKKSTNLVKNKCVNFNFNGLTGTGVLTESNKKFLPFQQFGRDIADTTDAVRDPQTLEILDITPCSFGGVSVITPGTNTSNQVAVLYQDVNCTEVPVAIHADQLTPTWRVYSTGSNVFQTRAGCLIGAEYVNNSYECDIPIGAGICASYQTQTNSPRRARSVASQSIIAYTMSLGAENSVAYSNNSCAIPTNFTISVTTEILPVSMTKTSVDCTMYICGDSTECSNLLLQYGSFCTQLNRALTGIAVEQDKNTQEVFAQVKQIYKTPPIKDFGGFNFSQILPDPSKPSKRSFIEDLLFNKVTLADAGFIKQYGDCLGDIAARDLICAQKFNGLTVLPPLLTDEMIAQYTSALLAGTITSGWTFGAGAALQIPFAMQMAYRFNGIGVTQNVLYENQKLIANQFNSAIGKIQDSLSSTASALGKLQDVVNQNAQALNTLVKQLSSNFGAISSVLNDILSRLDKVEAEVQIDRLITGRLQSLQTYVTQQLIRAAEIRASANLAATKMSECVLGQSKRVDFCGKGYHLMSFPQSAPHGVVFLHVTYVPAQEKNFTCAPAICHDGKAHFPREGVFVSNGTHWFVTQRNFYEPQIITTDNTFVSGNCDVVIGIVNNTVYDPLQPELDS

SEQ ID NO: 2978 - protein, 1147 aa, Artificial Sequence
  SARS-CoV-2/England/20102000506/2020__EPI_ISL_415147 spike protein (1-1147)(I712C_T1077C)
MFVFLVLLPLVSSQCVNLTTRTQLPPAYTNSFTRGVYYPDKVFRSSVLHSTQDLFLPFFSNVTWFHAIHVSGTNGTKRFDNPVLPFNDGVYFASTEKSNIIRGWIFGTTLDSKTQSLLIVNNATNVVIKVCEFQFCNDPFLGVYYHKNNKSWMESEFRVYSSANNCTFEYVSQPFLMDLEGKQGNFKNLREFVFKNIDGYFKIYSKHTPINLVRDLPQGFSALEPLVDLPIGINITRFQTLLALHRSYLTPGDSSSGWTAGAAAYYVGYLQPRTFLLKYNENGTITDAVDCALDPLSETKCTLKSFTVEKGIYQTSNFRVQPTESIVRFPNITNLCPFGEVFNATRFASVYAWNRKRISNCVADYSVLYNSASFSTFKCYGVSPTKLNDLCFTNVYADSFVIRGDEVRQIAPGQTGKIADYNYKLPDDFTGCVIAWNSNNLDSKVGGNYNYLYRLFRKSNLKPFERDISTEIYQAGSTPCNGVEGFNCYFPLQSYGFQPTNGVGYQPYRVVVLSFELLHAPATVCGPKKSTNLVKNKCVNFNFNGLTGTGVLTESNKKFLPFQQFGRDIADTTDAVRDPQTLEILDITPCSFGGVSVITPGTNTSNQVAVLYQGVNCTEVPVAIHADQLTPTWRVYSTGSNVFQTRAGCLIGAEHVNNSYECDIPIGAGICASYQTQTNSPRRARSVASQSIIAYTMSLGAENSVAYSNNSCAIPTNFTISVTTEILPVSMTKTSVDCTMYICGDSTECSNLLLQYGSFCTQLNRALTGIAVEQDKNTQEVFAQVKQIYKTPPIKDFGGFNFSQILPDPSKPSKRSFIEDLLFNKVTLADAGFIKQYGYCLGDIAARDLICAQKFNGLTVLPPLLTDEMIAQYTSALLAGTITSGWTFGAGAALQIPFAMQMAYRFNGIGVTQNVLYENQKLIANQFNSAIGKIQDSLSSTASALGKLQDVVNQNAQALNTLVKQLSSNFGAISSVLNDILSRLDKVEAEVQIDRLITGRLQSLQTYVTQQLIRAAEIRASANLAATKMSECVLGQSKRVDFCGKGYHLMSFPQSAPHGVVFLHVTYVPAQEKNFTCAPAICHDGKAHFPREGVFVSNGTHWFVTQRNFYEPQIITTDNTFVSGNCDVVIGIVNNTVYDPLQPELDS

SEQ ID NO: 2979 - protein, 1147 aa, Artificial Sequence
  SARS-CoV-2/Belgium/VAG-03013/2020__EPI_ISL_415155 spike protein (1-1147)(I712C_T1077C)
MFVFLVLLPLVSSQCVNLTTRTQLPPAYTNSFTRGVYYPDKVFRSSVLHSTQDLFLPFFSNVTWFHAIHVSGTNGTKRFDNPVLPFNDGVYFASTEKSNIIRGWIFGTTLDSKTQSLLIVNNATNVVIKVCEFQFCNDPFLGVYYHKNNKSWMESEFRVYSSANNCTFEYVSQPFLMDLEGKQGNFKNLREFVFKNIDGYFKIYSKHTPINLVRDLPQGFSALEPLVDLPIGINITRFQTLLALHRSYLTPGDSSSGWTAGAAAYYVGYLQPRTFLLKYNENGTITDAVDCALDPLSETKCTLKSFTVEKGIYQTSNFRVQPTESIVRFPNITNLCPFGEVFNATRFASVYAWNRKRISNCVADYSVLYNSASFSTFKCYGVSPTKLNDLCFTNVYADSFVIRGDEVRQIAPGQTGKIADYNYKLPDDFTGCVIAWNSNNLDSKVGGNYNYLYRLFRKSNLKPFERDISTEIYQAGSTPCNGVEGFNCYFPLQSYGFQPTNGVGYQPYRVVVLSFELLHAPATVCGPKKSTNLVKNKCVNFNFNGLTGTGVLTESNKKFLPFQQFGRDIADTTDAVRDPQTLEILDITPCSFGGVSVITPGTNTSNQVAVLYQGVNCTEVPVAIHADQLTPTWRVYSTGSNVFQTRAGCLIGAEHVNNSYECDIPIGAGICASYQTQTNSPRRARSVASQSIIAYTMSLGAENSVAYSNNSCAIPTNFTISVTTEILPVSMTKTSVDCTMYICGDSTECSNLLLQYGSFCTQLNRALTGIAVEQDKNTQEVFAQVKQIYKTPPIKDFGGFNFSQILPDPSKPSKRSFIEDLLFNKVTLADAGFIKQYGDCLGDIAARDLICAQKFNGLTVLPPLLTDEMIAQYTSALLAGTITSGWTFGAGAALQIPFAMQMAYRFNGIGVTQNVLYENQKLIANQFNSAIGKIQDSLSSTATALGKLQDVVNQNAQALNTLVKQLSSNFGAISSVLNDILSRLDKVEAEVQIDRLITGRLQSLQTYVTQQLIRAAEIRASANLAATKMSECVLGQSKRVDFCGKGYHLMSFPQSAPHGVVFLHVTYVPAQEKNFTCAPAICHDGKAHFPREGVFVSNGTHWFVTQRNFYEPQIITTDNTFVSGNCDVVIGIVNNTVYDPLQPELDS

SEQ ID NO: 2980 - protein, 1147 aa, Artificial Sequence
  SARS-CoV-2/Belgium/BC-03016/2020__EPI_ISL_415157 spike protein (1-1147)(I712C_T1077C)
MFVFLVLLPLVSSQCVNLTTRTQLPPAYTNSFTRGVYYPDKVFRSSVLHSTQDLFLPFFSNVTWFHAIHVSGTNGTKRFDNPVLPFNDGVYFASTEKSNIIRGWIFGTTLDSKTQSLLIVNNATNVVIKVCEFQFCNDPFLGVYYHKNNKSWMESEFRVYSSANNCTFEYVSQPFLMDLEGKQGNFKNLREFVFKNIDGYFKIYSKHTPINLVRDLPQGFSALEPLVDLPIGINITRFQTLLALHRSYLTPGDSSSGWTAGAAAYYVGYLQPRTFLLKYNENGTITDAVDCALDPLSETKCTLKSFTVEKGIYQTSNFRVQPTESIVRFPNITNLCPFGEVFNATRFASVYAWNRKRISNCVADYSVLYNSASFSTFKCYGVSPTKLNDLCFTNVYADSFVIRGDEVRQIAPGQTGKIADYNYKLPDDFTGCVIAWNSNNLDSKVGGNYNYLYRLFRKSNLKPFERDISTEIYQAGSTPCNGVEGFNCYFPLQSYGFQPTNGVGYQPYRVVVLSFELLHAPATVCGPKKSTNLVKNKCVNFNFNGLTGTGVLTESNKKFLPFQQFGRDIADTTDAVRDPQTLEILDITPCSFGGVSVITPGTNTSNQVAVLYQGVNCTEVPVAIHADQLTPTWRVYSTGSNVFQTRAGCLIGAEHVNNSYECDIPIGAGICASYQTQTNSPRRARSVASQSIIAYTMSLGAENSVAYSNNSCAIPTNFTISVTTEILPVSMTKTSVDCTMYICGDSTECSNLLLQYGSFCTQLNRALTGIAVEQDKNTQEVFAQVKQIYKTPPIKDFGGFNFSQILPDPSKPSKRSFIEDLLFNKVTLADAGFIKQYGDCLGDIAARDLICAQKFNGLTVLPPLLTDEMIAQYTSALLAGTITSGWTFGAGAALQIPFAMQMAYRFNGIGVTQNVLYENQKLIANQFNSAIGKIQDSLSSTAPALGKLQDVVNQNAQALNTLVKQLSSNFGAISSVLNDILSRLDKVEAEVQIDRLITGRLQSLQTYVTQQLIRAAEIRASANLAATKMSECVLGQSKRVDFCGKGYHLMSFPQSAPHGVVFLHVTYVPAQEKNFTCAPAICHDGKAHFPREGVFVSNGTHWFVTQRNFYEPQIITTDNTFVSGNCDVVIGIVNNTVYDPLQPELDS

SEQ ID NO: 2981 - protein, 1147 aa, Artificial Sequence
  SARS-CoV-2/Germany/BavPat3/2020__EPI_ISL_414521 spike protein (1-1147)(I712C_T1077C)
MFVFLVLLPLVSSQCVNLTTRTQLPPAYTNSFTRGVYYPDKVFRSSVLHSTQDLFLPFFSNVTWFHAIHVSGTNGTKRFDNPVLPFNDGVYFASTEKSNIIRGWIFGTTLDSKTQSLLIVNNATNVVIKVCEFQFCNDPFLGVYYHKNNKSWMESEFRVYSSANNCTFEYVSQPFLMDLEGKQGNFKNLREFVFKNIDGYFKIYSKHTPINLVRDLPQGFSALEPLVDLPIGINITRFQTLLALHRSYLTPGDSSSGWTAGAAAYYVGYLQPRTFLLKYNENGTITDAVDCALDPLSETKCTLKSFTVEKGIYQTSNFRVQPTESIVRFPNITNLCPFGEVFNATRFASVYAWNRKRISNCVADYSVLYNSASFSTFKCYGVSPTKLNDLCFTNVYADSFVIRGDEVRQIAPGQTGKIADYNYKLPDDFTGCVIAWNSNNLDSKVGGNYNYLYRLFRKSNLKPFERDISTEIYQAGSTPCNGVEGFNCYFPLQSYGFQPTNGVGYQPYRVVVLSFELLHAPATVCGPKKSTNLVKNKCVNFNFNGLTGTGVLTESNKKFLPFQQFGRDIADTTDAVRDPQTLEILDITPCSFGGVSVITPGTNTSNQVAVLYQDVNCTEVPVAIHADQLTPTWRVYSTGSNVFQTRAGCLIGAEHVNNSYECDIPIGAGICASYQTQTNSPRRARSVASQSIIAYTMSLGAENSVAYSNNSCAIPTNFTISVTTEILPVSMTKTSVDCTMYICGDSTECSNLLLQYGSFCTQLNRALTGIAVEQDKNTQQVFAQVKQIYKTPPIKDFGGFNFSQILPDPSKPSKRSFIEDLLFNKVTLADAGFIKQYGDCLGDIAARDLICAQKFNGLTVLPPLLTDEMIAQYTSALLAGTITSGWTFGAGAALQIPFAMQMAYRFNGIGVTQNVLYENQKLIANQFNSAIGKIQDSLSSTASALGKLQDVVNQNAQALNTLVKQLSSNFGAISSVLNDILSRLDKVEAEVQIDRLITGRLQSLQTYVTQQLIRAAEIRASANLAATKMSECVLGQSKRVDFCGKGYHLMSFPQSAPHGVVFLHVTYVPAQEKNFTCAPAICHDGKAHFPREGVFVSNGTHWFVTQRNFYEPQIITTDNTFVSGNCDVVIGIVNNTVYDPLQPELDS

SEQ ID NO: 2982 - protein, 1147 aa, Artificial Sequence
  SARS-CoV-2/France/HF1805/2020__EPI_ISL_414628 spike protein (1-1147)(I712C_T1077C)
MFVFLVLLPLVSSQCVNLTTRTQLPPAYTNSFTRGVYYPDKVFRSSVLHSTQDLFLPFFSNVTWFHAIHVSGTNGTKRFDNPVLPFNDGVYFASTEKSNIIRGWIFGTTLDSKTQSLLIVNNATNVVIKVCEFQFCNDPFLGVYYHKNNKSWMESEFRVYSSANNCTFEYVSQPFLMDLEGKQGNFKNLREFVFKNIDGYFKIYSKHTPINLVRDLPQGFSALEPLVDLPIGINITRFQTLLALHRSYLTPGDSSSGWTAGAAAYYVGYLQPRTFLLKYNENGTITDAVDCALDPLSETKCTLKSFTVEKGIYQTSNFRVQPTESIVRFPNITNLCPFGEVFNATRFASVYAWNRKRISNCVADYSVLYNSASFSTFKCYGVSPTKLNDLCFTNVYADSFVIRGDEVRQIAPGQTGKIADYNYKLPDDFTGCVIAWNSNNLDSKVGGNYNYLYRLFRKSNLKPFERDISTEIYQAGSTPCNGVEGFNCYFPLQSYGFQPTNGVGYQPYRVVVLSFELLHAPATVCGPKKSTNLVKNKCVNFNFNGLTGTGVLTESNKKFLPFQQFGRDIADTTDAVRDPQTLEILDITPCSFGGVSVITPGTNTSNQVAVLYQGVNCTEVPVAIHADQLTPTWRVYSTGSNVFQTRAGCLIGAEHVNNSYECDIPIGAGICASYQTQTNSPRRARSVASQSIIAYTMSLGAENSVAYSNNSCAIPTNFTISVTTEILPVSMTKTSVDCTMYICGDSTECSNLLLQYGSFCTQLNRALTGIAVEQDKNTQEVFAQVKQIYKTPPIKDFGGFNFSQILPDPSKPSKRSFIEDLLFNKVTLADAGFIKQYGDCLGDIAARDLICAQKFNGLTVLPPLLTDEMIAQYTSALLAGTITSGWTFGAGAALQIPFAMQMAYRFNGIGVTQNVLYENQKLIANQFNSAIGKIQDSLSSTASALGKLQDVVNQNAQALNTLVKQLSSNFGAISSVLNDILSRLDKVEAEVQIDRLITGRLQSLQTYVTQQLIRAAEIRASANLAATKMSECVLGQSKRVDFCGKGYHLMSFPQSAPHGVVFLHVTYVPAQEKNFTCAPAICHDGKAHFPREGVFVSNGTHWFVTQRNFYEPQIITTDNTFVSGNCDVVIGVVNNTVYDPLQPELDS

SEQ ID NO: 2983 - protein, 1147 aa, Artificial Sequence
  SARS-CoV-2/Netherlands/ZuidHolland_9/2020__EPI_ISL_414445 spike protein (1-1147)(I712C_T1077C)
MFVFLVLLPLVSSQCVNLTTRTQLPPAYTNSFTRGVYYPDKVFRSSVLHSTQDLFLPFFSNVTWFHAIHVSGTNGTKRFDNPVLPFNDGVYFASTEKSNIIRGWIFGTTLDSKTQSLLIVNNATNVVIKVCEFQFCNDPFLGVYYHKNNKSWMESEFRVYSSANNCTFEYVSQPFLMDLEGKQGNFKNLREFVFKNIDGYFKIYSKHTPINLVRDLPQGFSALEPLVDLPIGINITRFQTLLALHRSYLTPGDSSSGWTAGAAAYYVGYLQPRTFLLKYNENGTITDAVDCALDPLSETKCTLKSFTVEKGIYQTSNFRVQPTESIVRFPNITNLCPFGEVFNATRFASVYAWNRKRISNCVADYSVLYNSASFSTFKCYGVSPTKLNDLCFTNVYADSFVIRGDEVRQIAPGQTGKIADYNYKLPDDFTGCVIAWNSNNLDSKVGGNYNYLYRLFRKSNLKPFERDISTEIYQAGSTPCNGVEGFNCYFPLQSYGFQPTNGVGYQPYRVVVLSFELLHAPATVCGPKKSTNLVKNKCVNFNFNGLTGTGVLTESNKKFLPFQQFGRDIADTTDAVRDPQTLEILDITPCSFGGVSVITPGTNTSNQVAVLYQGVNCTEVPVAIHADQLTPTWRVYSTGSNVFQTRAGCLIGAEHVNNSYECDIPIGAGICASYQTQTNSPRRARSVASQSIIAYTMSLGAENSVAYSNNSCAIPTNFTISVTTEILPVSMTKTSVDCTMYICGDSTECSNLLLQYGSFCTQLNRALTGIAVEQDKNTQEVFAQVKQIYKTPPIKDFGGFNFSQILPDPSKPSKRSFIEDLLFNKVTLADAGFIKQYGDCLGDIAARDLICVQKFNGLTVLPPLLTDEMIAQYTSALLAGTITSGWTFGAGAALQIPFAMQMAYRFNGIGVTQNVLYENQKLIANQFNSAIGKIQDSLSSTASALGKLQDVVNQNAQALNTLVKQLSSNFGAISSVLNDILSRLDKVEAEVQIDRLITGRLQSLQTYVTQQLIRAAEIRASANLAATKMSECVLGQSKRVDFCGKGYHLMSFPQSAPHGVVFLHVTYVPAQEKNFTCAPAICHDGKAHFPREGVFVSNGTHWFVTQRNFYEPQIITTDNTFVSGNCDVVIGIVNNTVYDPLQPELDS

SEQ ID NO: 2984 - protein, 1147 aa, Artificial Sequence
  SARS-CoV-2/Finland/FIN03032020A/2020__EPI_ISL_413602 spike protein (1-1147)(I712C_T1077C)
MFVFLVLLPLVSSQCVNLTTRTQLPPAYTNSFTRGVYYPDKVFRSSVLHSTQDLFLPFFSNVTWFHAIHVSGTNGTKRFDNPVLPFNDGVYFASTEKSNIIRGWIFGTTLDSKTQSLLIVNNATNVVIKVCEFQFCNDPFLGVYYHKNNKSWMESEFRVYSSANNCTFEYVSQPFLMDLEGKQGNFKNLREFVFKNIDGYFKIYSKHTPINLVRDLPQGFSALEPLVDLPIGINITRFQTLLALHRSYLTPGDSSSGWTAGAAAYYVGYLQPRTFLLKYNENGTITDAVDCALDPLSETKCTLKSFTVEKGIYQTSNFRVQPTESIVRFPNITNLCPFGEVFNATRFASVYAWNRKRISNCVADYSVLYNSASFSTFKCYGVSPTKLNDLCFTNVYADSFVIRGDEVRQIAPGQTGKIADYNYKLPDDFTGCVISWNSNNLDSKVGGNYNYLYRLFRKSNLKPFERDISTEIYQAGSTPCNGVEGFNCYFPLQSYGFQPTNGVGYQPYRVVVLSFELLHAPATVCGPKKSTNLVKNKCVNFNFNGLTGTGVLTESNKKFLPFQQFGRDIADTTDAVRDPQTLEILDITPCSFGGVSVITPGTNTSNQVAVLYQGVNCTEVPVAIHADQLTPTWRVYSTGSNVFQTRAGCLIGAEHVNNSYECDIPIGAGICASYQTQTNSPRRARSVASQSIIAYTMSLGAENSVAYSNNSCAIPTNFTISVTTEILPVSMTKTSVDCTMYICGDSTECSNLLLQYGSFCTQLNRALTGIAVEQDKNTQEVFAQVKQIYKTPPIKDFGGFNFSQILPDPSKPSKRSFIEDLLFNKVTLADAGFIKQYGDCLGDIAARDLICAQKFNGLTVLPPLLTDEMIAQYTSALLAGTITSGWTFGAGAALQIPFAMQMAYRFNGIGVTQNVLYENQKLIANQFNSAIGKIQDSLSSTASALGKLQDVVNQNAQALNTLVKQLSSNFGAISSVLNDILSRLDKVEAEVQIDRLITGRLQSLQTYVTQQLIRAAEIRASANLAATKMSECVLGQSKRVDFCGKGYHLMSFPQSAPHGVVFLHVTYVPAQEKNFTCAPAICHDGKAHFPREGVFVSNGTHWFVTQRNFYEPQIITTDNTFVSGNCDVVIGIVNNTVYDPLQPELDS

SEQ ID NO: 2985 - protein, 1147 aa, Artificial Sequence
  SARS-CoV-2/France/GE1977/2020__EPI_ISL_414632 spike protein (1-1147)(I712C_T1077C)
MFVFLVLLPLVSSQCVNLTTRTQLPPAYTNSFTRGVYYPDKVFRSSVLHSTQDLFLPFFSNVTWFHAIHVSGTNGTKRFDNPVLPFNDGVYFASTEKSNIIRGWIFGTTLDSKTQSLLIVNNATNVVIKVCEFQFCNDPFLGVYYHKNNKSWMESEFRVYSSANNCTFEYVSQPFLMDLEGKQGNFKNLREFVFKNIDGYFKIYSKHTPINLVRDLPQGFSALEPLVDLPIGINITRFQTLLALHRSYLTPGDSSSGWTAGAAAYYVGYLQPRTFLLKYNENGTITDAVDCALDPLSETKCTLKSFTVEKGIYQTSNFRVQPTESIVRFPNITNLCPFGEVFNATRFASVYAWNRKRISNCVADYSVLYNSASFSTFKCYGVSPTKLNDLCFTNVYADSFVIRGDEVRQIAPGQTGKIADYNYKLPDDFTGCVIAWNSNNLDSKVGGNYNYLYRLFRKSNLKPFERDISTEIYQAGSTPCNGVEGFNCYFPLQSYGFQPTNGVGYQPYRVVVLSFELLHAPATVCGPKKSTNLVKNKCVNFNFNGLTGTGVLTESNKKFLPFQQFGRDIADTTDAVRDPQTLEILDITPCSFGGVSVITPGTNTSNQVAVLYQGVNCTEVPVAIHADQLTPTWRVYSTGSNVFQTRAGCLIGAEHVNNSYECDIPIGAGICASYQTQTNSPRRARSVASQSIIAYTMSLGAENSVAYSNNSCAIPTNFTISVTTEILPVSMTKTSVDCTMYICGDSTECSNLLLQYGSFCTQLNRALTGIAVEQDKNTQEVFAQVKQIYKTPPIKDFGGFNFSQILPDPSKPSKRSFIEDLLFNKVTLADAGFIKQYGDCLGDIAARDLICAQKFNGLTVLPPLLTDEMIAQYTSALLAGTITSGWTFGAGAALQIPFAMQMAYRFNGIGVTQNVLYENQKLIANQFNSAIGKIQDSLFSTASALGKLQDVVNQNAQALNTLVKQLSSNFGAISSVLNDILSRLDKVEAEVQIDRLITGRLQSLQTYVTQQLIRAAEIRASANLAATKMSECVLGQSKRVDFCGKGYHLMSFPQSAPHGVVFLHVTYVPAQEKNFTCAPAICHDGKAHFPREGVFVSNGTHWFVTQRNFYEPQIITTDNTFVSGNCDVVIGIVNNTVYDPLQPELDS

SEQ ID NO: 2986 - protein, 1147 aa, Artificial Sequence
  SARS-CoV-2/Finland/FIN-313/2020__EPI_ISL_414641 spike protein (1-1147)(I712C_T1077C)
MFVFLVLLPLVSSQCVNLTTRTQLPPAYTNSFTRGVYYPDKVFRSSVLHSTQDLFLPFFSNVTWFHAIHVSGTNGTKRFDNPVLPFNDGVYFASTEKSNIIRGWIFGTTLDSKTQSLLIVNNATNVVIKVCEFQFCNDPFLGVYYHKNNKSWMESEFRVYSSANNCTFEYVSQPFLMDLEGKQGNFKNLREFVFKNIDGYFKIYSKHTPINLVRDLPQGFSALEPLVDLPIGINITRFKTLLALHRSYLTPGDSSSGWTAGAAAYYVGYLQPRTFLLKYNENGTITDAVDCALDPLSETKCTLKSFTVEKGIYQTSNFRVQPTESIVRFPNITNLCPFGEVFNATRFASVYAWNRKRISNCVADYSVLYNSASFSTFKCYGVSPTKLNDLCFTNVYADSFVIRGDEVRQIAPGQTGKIADYNYKLPDDFTGCVIAWNSNNLDSKVGGNYNYLYRLFRKSNLKPFERDISTEIYQAGSTPCNGVEGFNCYFPLQSYGFQPTNGVGYQPYRVVVLSFELLHAPATVCGPKKSTNLVKNKCVNFNFNGLTGTGVLTESNKKFLPFQQFGRDIADTTDAVRDPQTLEILDITPCSFGGVSVITPGTNTSNQVAVLYQGVNCTEVPVAIHADQLTPTWRVYSTGSNVFQTRAGCLIGAEHVNNSYECDIPIGAGICASYQTQTNSPRRARSVASQSIIAYTMSLGAENSVAYSNNSCAIPTNFTISVTTEILPVSMTKTSVDCTMYICGDSTECSNLLLQYGSFCTQLNRALTGIAVEQDKNTQEVFAQVKQIYKTPPIKDFGGFNFSQILPDPSKPSKRSFIEDLLFNKVTLADAGFIKQYGDCLGDIAARDLICAQKFNGLTVLPPLLTDEMIAQYTSALLAGTITSGWTFGAGAALQIPFAMQMAYRFNGIGVTQNVLYENQKLIANQFNSAIGKIQDSLSSTASALGKLQDVVNQNAQALNTLVKQLSSNFGAISSVLNDILSRLDKVEAEVQIDRLITGRLQSLQTYVTQQLIRAAEIRASANLAATKMSECVLGQSKRVDFCGKGYHLMSFPQSAPHGVVFLHVTYVPAQEKNFTCAPAICHDGKAHFPREGVFVSNGTHWFVTQRNFYEPQIITTDNTFVSGNCDVVIGIVNNTVYDPLQPELDS

SEQ ID NO: 2987 - protein, 1147 aa, Artificial Sequence
  SARS-CoV-2/Netherlands/ZuidHolland_2/2020__EPI_ISL_414556 spike protein (1-1147)(I712C_T1077C)
MFVFLVLLPLVSSQCVNLTTRTQLPPAYTNSFTRGVYYPDKVFRSSVLHSTQDLFLPFFSNVTWFHAIHVSGTNGTKRFDNPVLPFNDGVYFASTEKSNIIRGWIFGTTLDSKTQSLLIVNNATNVVIKVCEFQFCNDPFLGVYYHKNNKSWMESEFRVYSSANNCTFEYVSQPFLMDLEGKQGNFKNLREFVFKNIDGYFKIYSKHTPINLVRDLPQGFSALEPLVDLPIGINITRFQTLLALHRSYLTPGDSSSGWTAGAAAYYVGYLQPRTFLLKYNENGTITDAVDCALDPLSETKCTLKSFTVEKGIYQTSNFRVQPTESIVRFPNITNLCPFGEVFNATRFASVYAWNRKRISNCVADYSVLYNSASFSTFKCYGVSPTKLNDLCFTNVYADSFVIRGDEVRQIAPGQTGKIADYNYKLPDDFTGCVIAWNSNNLDSKVGGNYNYLYRLFRKSNLKPFERDISTEIYQAGSTPCNGVEGFNCYFPLQSYGFQPTNGVGYQPYRVVVLSFELLHAPATVCGPKKSTNLVKNKCVNFNFNGLTGTGVLTESNKKFLPFQQFGRDIADTTDAVRDPQTLEILDITPCSFGGVSVITPGTNTSNQVAVLYQGVNCTEVPVAIHADQLTPTWRVYSTGSNVFQTRAGCLIGAEHVNNSYECDIPIGAGICASYQTQTNSPRRARSVASQSIIAYTMSLGAENSVAYSNNSCAIPTNFTISVTTEILPVSMTKTSVDCTMYICGDSTECSNLLLQYGSFCTQLNRALTGIALEQDKNTQEVFAQVKQIYKTPPIKDFGGFNFSQILPDPSKPSKRSFIEDLLFNKVTLADAGFIKQYGDCLGDIAARDLICAQKFNGLTVLPPLLTDEMIAQYTSALLAGTITSGWTFGAGAALQIPFAMQMAYRFNGIGVTQNVLYENQKLIANQFNSAIGKIQDSLSSTASALGKLQDVVNQNAQALNTLVKQLSSNFGAISSVLNDILSRLDKVEAEVQIDRLITGRLQSLQTYVTQQLIRAAEIRASANLAATKMSECVLGQSKRVDFCGKGYHLMSFPQSAPHGVVFLHVTYVPAQEKNFTCAPAICHDGKAHFPREGVFVSNGTHWFVTQRNFYEPQIITTDNTFVSGNCDVVIGIVNNTVYDPLQPELDS

SEQ ID NO: 2988 - protein, 1147 aa, Artificial Sequence
  SARS-CoV-2/USA/WA-UW31/2020__EPI_ISL_414618 spike protein (1-1147)(I712C_T1077C)
MFVFLVLLPLVSSQCVNLTTRTQLPPAYTNSFTRGVYYPDKVFRSSVLHSTQDLFLPFFSNVTWFHAIHVSGTNGTKRFDNPVLPFNDGVYFASTEKSNIIRGWIFGTTLDSKTQSLLIVNNATNVVIKVCEFQFCNDPFLGVYYHKNNKSWMESEFRVYSSANNCTFEYVSQPFLMDLEGKQGNFKNLREFVFKNIDGYFKIYSKHTPINLVRDLPQGFSALEPLVDLPIGINITRFQTLLALHRSYLTPGDSSSGWTAGAAAYYVGYLQPRTFLLKYNENGTITDAVDCALDPLSETKCTLKSFTVEKGIYQTSNFRVQPTESIVRFPNITNLCPFGEVFNATRFASVYAWNRKRISNCVADYSVLYNSASFSTFKCYGVSPTKLNDLCFTNVYADSFVIRGDEVRQIAPGQTGKIADYNYKLPDDFTGCVIAWNSNNLDSKVGGNYNYLYRLFRKSNLKPFERDISTEIYQAGSTPCNGAEGFNCYFPLQSYGFQPTNGVGYQPYRVVVLSFELLHAPATVCGPKKSTNLVKNKCVNFNFNGLTGTGVLTESNKKFLPFQQFGRDIADTTDAVRDPQTLEILDITPCSFGGVSVITPGTNTSNQVAVLYQDVNCTEVPVAIHADQLTPTWRVYSTGSNVFQTRAGCLIGAEHVNNSYECDIPIGAGICASYQTQTNSPRRARSVASQSIIAYTMSLGAENSVAYSNNSCAIPTNFTISVTTEILPVSMTKTSVDCTMYICGDSTECSNLLLQYGSFCTQLNRALTGIAVEQDKNTQEVFAQVKQIYKTPPIKDFGGFNFSQILPDPSKPSKRSFIEDLLFNKVTLADAGFIKQYGDCLGDIAARDLICAQKFNGLTVLPPLLTDEMIAQYTSALLAGTITSGWTFGAGAALQIPFAMQMAYRFNGIGVTQNVLYENQKLIANQFNSAIGKIQDSLSSTASALGKLQDVVNQNAQALNTLVKQLSSNFGAISSVLNDILSRLDKVEAEVQIDRLITGRLQSLQTYVTQQLIRAAEIRASANLAATKMSECVLGQSKRVDFCGKGYHLMSFPQSAPHGVVFLHVTYVPAQEKNFTCAPAICHDGKAHFPREGVFVSNGTHWFVTQRNFYEPQIITTDNTFVSGNCDVVIGIVNNTVYDPLQPELDS

SEQ ID NO: 2989 - protein, 1147 aa, Artificial Sequence
  SARS-CoV-2/South Korea/SNU01/2020__EPI_ISL_411929 spike protein (1-1147)(I712C_T1077C)
MFVFLVLLPLVSSQCVNLTTRTQLPPAYTNSFTRGVYYPDKVFRSSVLHSTQDLFLPFFSNVTWFHAIHVSGTNGTKRFDNPVLPFNDGVYFASTEKSNIIRGWIFGTTLDSKTQSLLIVNNATNVVIKVCEFQFCNDPFLGVYYHKNNKSWMESEFRVYSSANNCTFEYVSQPFLMDLEGKQGNFKNLREFVFKNIDGYFKIYSKHTPINLVRDLPQGFWALEPLVDLPIGINITRFQTLLALHRSYLTPGDSSSGWTAGAAAYYVGYLQPRTFLLKYNENGTITDAVDCALDPLSETKCTLKSFTVEKGIYQTSNFRVQPTESIVRFPNITNLCPFGEVFNATRFASVYAWNRKRISNCVADYSVLYNSASFSTFKCYGVSPTKLNDLCFTNVYADSFVIRGDEVRQIAPGQTGKIADYNYKLPDDFTGCVIAWNSNNLDSKVGGNYNYLYRLFRKSNLKPFERDISTEIYQAGSTPCNGVEGFNCYFPLQSYGFQPTNGVGYQPYRVVVLSFELLHAPATVCGPKKSTNLVKNKCVNFNFNGLTGTGVLTESNKKFLPFQQFGRDIADTTDAVRDPQTLEILDITPCSFGGVSVITPGTNTSNQVAVLYQDVNCTEVPVAIHADQLTPTWRVYSTGSNVFQTRAGCLIGAEHVNNSYECDIPIGAGICASYQTQTNSPRRARSVASQSIIAYTMSLGAENSVAYSNNSCAIPTNFTISVTTEILPVSMTKTSVDCTMYICGDSTECSNLLLQYGSFCTQLNRALTGIAVEQDKNTQEVFAQVKQIYKTPPIKDFGGFNFSQILPDPSKPSKRSFIEDLLFNKVTLADAGFIKQYGDCLGDIAARDLICAQKFNGLTVLPPLLTDEMIAQYTSALLAGTITSGWTFGAGAALQIPFAMQMAYRFNGIGVTQNVLYENQKLIANQFNSAIGKIQDSLSSTASALGKLQDVVNQNAQALNTLVKQLSSNFGAISSVLNDILSRLDKVEAEVQIDRLITGRLQSLQTYVTQQLIRAAEIRASANLAATKMSECVLGQSKRVDFCGKGYHLMSFPQSAPHGVVFLHVTYVPAQEKNFTCAPAICHDGKAHFPREGVFVSNGTHWFVTQRNFYEPQIITTDNTFVSGNCDVVIGIVNNTVYDPLQPELDS

SEQ ID NO: 2990 - protein, 1147 aa, Artificial Sequence
  SARS-CoV-2/China/WF0004/2020__EPI_ISL_413694 spike protein (1-1147)(I712C_T1077C)
MFVFLVLLPLVSSQCVNLTTRTQLPPAYTNSFTRGVYYPDKVFRSSVLHSTQDLFLPFFSNVTWFHAIHVSGTNGTKRFDNPVLPFNDGVYFASTEKSNIIRGWIFGTTLDSKTQSLLIVNNATNVVIKVCEFQFCNDPFLGVYYHKNNKSWTESEFRVYSSANNCTFEYVSQPFLMDLEGKQGNFKNLREFVFKNIDGYFKIYSKHTPINLVRDLPQGFSALEPLVDLPIGINITRFQTLLALHRSYLTPGDSSSGWTAGAAAYYVGYLQPRTFLLKYNENGTITDAVDCALDPLSETKCTLKSFTVEKGIYQTSNFRVQPTESIVRFPNITNLCPFGEVFNATRFASVYAWNRKRISNCVADYSVLYNSASFSTFKCYGVSPTKLNDLCFTNVYADSFVIRGDEVRQIAPGQTGKIADYNYKLPDDFTGCVIAWNSNNLDSKVGGNYNYLYRLFRKSNLKPFERDISTEIYQAGSTPCNGVEGFNCYFPLQSYGFQPTNGVGYQPYRVVVLSFELLHAPATVCGPKKSTNLVKNKCVNFNFNGLTGTGVLTESNKKFLPFQQFGRDIADTTDAVRDPQTLEILDITPCSFGGVSVITPGTNTSNQVAVLYQDVNCTEVPVAIHADQLTPTWRVYSTGSNVFQTRAGCLIGAEHVNNSYECDIPIGAGICASYQTQTNSPRRARSVASQSIIAYTMSLGAENSVAYSNNSCAIPTNFTISVTTEILPVSMTKTSVDCTMYICGDSTECSNLLLQYGSFCTQLNRALTGIAVEQDKNTQEVFAQVKQIYKTPPIKDFGGFNFSQILPDPSKPSKRSFIEDLLFNKVTLADAGFIKQYGDCLGDIAARDLICAQKFNGLTVLPPLLTDEMIAQYTSALLAGTITSGWTFGAGAALQIPFAMQMAYRFNGIGVTQNVLYENQKLIANQFNSAIGKIQDSLSSTASALGKLQDVVNQNAQALNTLVKQLSSNFGAISSVLNDILSRLDKVEAEVQIDRLITGRLQSLQTYVTQQLIRAAEIRASANLAATKMSECVLGQSKRFDFCGKGYHLMSFPQSAPHGVVFLHVTYVPAQEKNFTCAPAICHDGKAHFPREGVFVSNGTHWFVTQRNFYEPQIITTDNTFVSGNCDVVIGIVNNTVYDPLQPELDS

SEQ ID NO: 2991 - protein, 1147 aa, Artificial Sequence
  SARS-CoV-2/China/WF0028/2020__EPI_ISL_413791 spike protein (1-1147)(I712C_T1077C)
MFVFLVLLPLVSSQCVNLTTRTQLPPAYTNSFTRGVYYPDKVFRSSVLHSTQDLFLPFFSNVTWFHAIHVSGTNGTKRFDNPVLPFNDGVYFASTEKSNIIRGWIFGTTLDSKTQSLLIVNNATNVVIKVCEFQFCNDPFLGVYYHKNNKSWMESEFRVYSSANNCTFEYVSQPFLMDLEGKQGNFKNLREFVFKNIDGYFKIYSKHTPINLVRDLPQGFSALEPLVDLPIGINITRFQTLLALHRSYLTPGDSSSGWTAGAAAYYVGYLQPRTFLLKYNENGTITDAVDCALDPLSETKCTLKSFTVEKGIYQTSNFRVQPTESIVRFPNITNLCPFGEVFNATRFASVYAWNRKRISNCVADYSVLYNSASFSTFKCYGVSPTKLNDLCFTNVYADSFVIRGDEVRQIAPGQTGKIADYNYKLPDDFTGCVIAWNSNNLDSKVGGNYNYLYRLFRKSNLKPFERDISTEIYQAGSTPCNGVEGFNCYFPLQSYGFQPTNGVGYQPYRVVVLSFELLHAPATVCGPKKSTNLVKNKCVNFNFNGLTGTGVLTESNKKFLPFQQFGRDIADTTDAVRDPQTLEILDITPCSFGGVSVITPGTNTSNQVAVLYQDVNCTEVPVAIHADQLTPTWRVYSTGSNVFQTRAGCLIGAEHVNNSYECDIPIGAGICASYQTQTNSPRRARSVASQSIIAYTMSLGAENSVAYSNNSCAIPTNFTISVTTEILPVSMTKTSVDCTMYICGDSTECSNLLLQYGSFCTQLNRALTGIAVEQDKNTQEVFAQVKQIYKTPPIKDFGGFNFSQILPDPSKPSKRSFIEDLLFNKVTLADAGFIKQYGDCLGDIAARDLICAQKFNGLTVLPPLLTDEMIAQYTSALLAGTITSGWTFGAGAALQIPFAMQMAYRFNGIGVTQNVLYENQKLIANQFNSAIGKIQDSLSSTASALGKLQDVVNQNAQALNTLVKQLSSNFGAISSVLNDILSRLDKVEAEVQIDRLITGRLQSLQTYVTQQLIRAAEIRASANLAATKMSECVLGQSKRVDFCGKGYHLMSFPQSAPHGVVFLHVTYVPAQEKNFTCAPAICHDGKAHFPREGVFVSNGTHWFVTQRNFYEPQIITTDNTFVSGNCDVVIGIVNNTVYDPLQPELES

SEQ ID NO: 2992 - protein, 1147 aa, Artificial Sequence
  SARS-CoV-2/2019-nCoV/USA-CruiseA-18/2020__MT159716.1 spike protein (1-1147)(I712C_T1077C)
MFVFLVLLPLVSSQCVNLTTRTQLPPAYTNSFTRGVYYPDKVFRSSVLHSTQDLFLPFFSNVTWFHAIHVSGTNGTKRFDNPVLPFNDGVYFASTEKSNIIRGWIFGTTLDSKTQSLLIVNNATNVVIKVCEFQFCNDPFLGVYYHKNNKSWMESELRVYSSANNCTFEYVSQPFLMDLEGKQGNFKNLREFVFKNIDGYFKIYSKHTPINLVRDLPQGFSALEPLVDLPIGINITRFQTLLALHRSYLTPGDSSSGWTAGAAAYYVGYLQPRTFLLKYNENGTITDAVDCALDPLSETKCTLKSFTVEKGIYQTSNFRVQPTESIVRFPNITNLCPFGEVFNATRFASVYAWNRKRISNCVADYSVLYNSASFSTFKCYGVSPTKLNDLCFTNVYADSFVIRGDEVRQIAPGQTGKIADYNYKLPDDFTGCVIAWNSNNLDSKVGGNYNYLYRLFRKSNLKPFERDISTEIYQAGSTPCNGVEGFNCYFPLQSYGFQPTNGVGYQPYRVVVLSFELLHAPATVCGPKKSTNLVKNKCVNFNFNGLTGTGVLTESNKKFLPFQQFGRDIADTTDAVRDPQTLEILDITPCSFGGVSVITPGTNTSNQVAVLYQDVNCTEVPVAIHADQLTPTWRVYSTGSNVFQTRAGCLIGAEHVNNSYECDIPIGAGICASYQTQTNSPRRARSVASQSIIAYTMSLGAENSVAYSNNSCAIPTNFTISVTTEILPVSMTKTSVDCTMYICGDSTECSNLLLQYGSFCTQLNRALTGIAVEQDKNTQEVFAQVKQIYKTPPIKDFGGFNFSQILPDPSKPSKRSFIEDLLFNKVTLADAGFIKQYGDCLGDIAARDLICAQKFNGLTVLPPLLTDEMIAQYTSALLAGTITSGWTFGAGAALQIPFAMQMAYRFNGIGVTQNVLYENQKLIANQFNSAIGKIQDSLSSTASALGKLQDVVNQNAQALNTLVKQLSSNFGAISSVLNDILSRLDKVEAEVQIDRLITGRLQSLQTYVTQQLIRAAEIRASANLAATKMSECVLGQSKRVDFCGKGYHLMSFPQSAPHGVVFLHVTYVPAQEKNFTCAPAICHDGKAHFPREGVFVSNGTHWFVTQRNFYEPQIITTDNTFVSGNCDVVIGIVNNTVYDPLQPELDS

SEQ ID NO: 2993 - protein, 1147 aa, Artificial Sequence
  SARS-CoV-2/SARS-CoV-2/Yunnan-01/human/2020/CHN__MT049951.1 spike protein (1-1147)(I712C_T1077C)
MFVFLVLLPLVSSQCVNLTTRTQLPPANTNSFTRGVYYPDKVFRSSVLHSTQDLFLPFFSNVTWFHAIHVSGTNGTKRFDNPVLPFNDGVYFASTEKSNIIRGWIFGTTLDSKTQSLLIVNNATNVVIKVCEFQFCNDPFLGVYYHKNNKSWMESEFRVYSSANNCTFEYVSQPFLMDLEGKQGNFKNLREFVFKNIDGYFKIYSKHTPINLVRDLPQGFSALEPLVDLPIGINITRFQTLLALHRSYLTPGDSSSGWTAGAAAYYVGYLQPRTFLLKYNENGTITDAVDCALDPLSETKCTLKSFTVEKGIYQTSNFRVQPTESIVRFPNITNLCPFGEVFNATRFASVYAWNRKRISNCVADYSVLYNSASFSTFKCYGVSPTKLNDLCFTNVYADSFVIRGDEVRQIAPGQTGKIADYNYKLPDDFTGCVIAWNSNNLDSKVGGNYNYLYRLFRKSNLKPFERDISTEIYQAGSTPCNGVEGFNCYFPLQSYGFQPTNGVGYQPYRVVVLSFELLHAPATVCGPKKSTNLVKNKCVNFNFNGLTGTGVLTESNKKFLPFQQFGRDIADTTDAVRDPQTLEILDITPCSFGGVSVITPGTNTSNQVAVLYQDVNCTEVPVAIHADQLTPTWRVYSTGSNVFQTRAGCLIGAEHVNNSYECDIPIGAGICASYQTQTNSPRRARSVASQSIIAYTMSLGAENSVAYSNNSCAIPTNFTISVTTEILPVSMTKTSVDCTMYICGDSTECSNLLLQYGSFCTQLNRALTGIAVEQDKNTQEVFAQVKQIYKTPPIKDFGGFNFSQILPDPSKPSKRSFIEDLLFNKVTLADAGFIKQYGDCLGDIAARDLICAQKFNGLTVLPPLLTDEMIAQYTSALLAGTITSGWTFGAGAALQIPFAMQMAYRFNGIGVTQNVLYENQKLIANQFNSAIGKIQDSLSSTASALGKLQDVVNQNAQALNTLVKQLSSNFGAISSVLNDILSRLDKVEAEVQIDRLITGRLQSLQTYVTQQLIRAAEIRASANLAATKMSECVLGQSKRVDFCGKGYHLMSFPQSAPHGVVFLHVTYVPAQEKNFTCAPAICHDGKAHFPREGVFVSNGTHWFVTQRNFYEPQIITTDNTFVSGNCDVVIGIVNNTVYDPLQPELDS

SEQ ID NO: 2994 - protein, 1147 aa, Artificial Sequence
  SARS-CoV-2/USA/WA-UW292/2020__EPI_ISL_418077 spike protein (1-1147)(I712C_T1077C)
MFVFLVLLPLVSSQCVNLTTRTQLPPAYTNSFTRGVYYPDKVFRSSVLHSTQDLFLPFFSNVTWFHAIHVSGTNGTKRFDNPVLPFNDGVYFASTEKSNIIRGWIFGTTLDSKTQSLLIVNNATNVVIKVCEFQFCNDPFLGVYYHKNNKSWMESEFRVYSSANNCTFEYVSQPFLMDLEGKQGNFKNLREFVFKNIDGYFKIYSKHTPINLVRDLPQGFSALEPLVDLPIGINITRFQTLLALHRSYLTPGDSSSGWTAGAAAYYVGYLQPRTFLLKYNENGTITDAVDCALDPLSETKCTLKSFTVEKGIYQTSNFRVQPTESIVRFPNITNLCPFGEVFNATRFASVYAWNRKRISNCVADYSVLYNSASFSTFKCYGVSPTKLNDLCFTNVYADSFVIRGDEVRQIAPGQTGKIADYNYKLPDDFTGCVIAWNSNNLDSKVGGNYNYLYRLFRKSNLKPFERDISTEIYQASSTPCNGVEGFNCYFPLQSYGFQPTNGVGYQPYRVVVLSFELLHAPATVCGPKKSTNLVKNKCVNFNFNGLTGTGVLTESNKKFLPFQQFGRDIADTTDAVRDPQTLEILDITPCSFGGVSVITPGTNTSNQVAVLYQDVNCTEVPVAIHADQLTPTWRVYSTGSNVFQTRAGCLIGAEHVNNSYECDIPIGAGICASYQTQTNSPRRARSVASQSIIAYTMSLGAENSVAYSNNSCAIPTNFTISVTTEILPVSMTKTSVDCTMYICGDSTECSNLLLQYGSFCTQLNRALTGIAVEQDKNTQEVFAQVKQIYKTPPIKDFGGFNFSQILPDPSKPSKRSFIEDLLFNKVTLADAGFIKQYGDCLGDIAARDLICAQKFNGLTVLPPLLTDEMIAQYTSALLAGTITSGWTFGAGAALQIPFAMQMAYRFNGIGVTQNVLYENQKLIANQFNSAIGKIQDSLSSTASALGKLQDVVNQNAQALNTLVKQLSSNFGAISSVLNDILSRLDKVEAEVQIDRLITGRLQSLQTYVTQQLIRAAEIRASANLAATKMSECVLGQSKRVDFCGKGYHLMSFPQSAPHGVVFLHVTYVPAQEKNFTCAPAICHDGKAHFPREGVFVSNGTHWFVTQRNFYEPQIITTDNTFVSGNCDVVIGIVNNTVYDPLQPELDS

SEQ ID NO: 2995 - protein, 1147 aa, Artificial Sequence
  SARS-CoV-2/Iceland/192/2020__EPI_ISL_417819 spike protein (1-1147)(I712C_T1077C)
MFVFFVLLPLVSSQCVNLTTRTQLPPAYTNSFTRGVYYPDKVFRSSVLHSTQDLFLPFFSNVTWFHAIHVSGTNGTKRFDNPVLPFNDGVYFASTEKSNIIRGWIFGTTLDSKTQSLLIVNNATNVVIKVCEFQFCNDPFLGVYYHKNNKSWMESEFRVYSSANNCTFEYVSQPFLMDLEGKQGNFKNLREFVFKNIDGYFKIYSKHTPINLVRDLPQGFSALEPLVDLPIGINITRFQTLLALHRSYLTPGDSSSGWTAGAAAYYVGYLQPRTFLLKYNENGTITDAVDCALDPLSETKCTLKSFTVEKGIYQTSNFRVQPTESIVRFPNITNLCPFGEVFNATRFASVYAWNRKRISNCVADYSVLYNSASFSTFKCYGVSPTKLNDLCFTNVYADSFVIRGDEVRQIAPGQTGKIADYNYKLPDDFTGCVIAWNSNNLDSKVGGNYNYLYRLFRKSNLKPFERDISTEIYQAGSTPCNGVEGFNCYFPLQSYGFQPTNGVGYQPYRVVVLSFELLHAPATVCGPKKSTNLVKNKCVNFNFNGLTGTGVLTESNKKFLPFQQFGRDIADTTDAVRDPQTLEILDITPCSFGGVSVITPGTNTSNQVAVLYQGVNCTEVPVAIHADQLTPTWRVYSTGSNVFQTRAGCLIGAEHVNNSYECDIPIGAGICASYQTQTNSPRRARSVASQSIIAYTMSLGAENSVAYSNNSCAIPTNFTISVTTEILPVSMTKTSVDCTMYICGDSTECSNLLLQYGSFCTQLNRALTGIAVEQDKNTQEVFAQVKQIYKTPPIKDFGGFNFSQILPDPSKPSKRSFIEDLLFNKVTLADAGFIKQYGDCLGDIAARDLICAQKFNGLTVLPPLLTDEMIAQYTSALLAGTITSGWTFGAGAALQIPFAMQMAYRFNGIGVTQNVLYENQKLIANQFNSAIGKIQDSLSSTASALGKLQDVVNQNAQALNTLVKQLSSNFGAISSVLNDILSRLDKVEAEVQIDRLITGRLQSLQTYVTQQLIRAAEIRASANLAATKMSECVLGQSKRVDFCGKGYHLMSFPQSAPHGVVFLHVTYVPAQEKNFTCAPAICHDGKAHFPREGVFVSNGTHWFVTQRNFYEPQIITTDNTFVSGNCDVVIGIVNNTVYDPLQPELDS

SEQ ID NO: 2996 - protein, 1147 aa, Artificial Sequence
  SARS-CoV-2/Belgium/ULG-6939/2020__EPI_ISL_417020 spike protein (1-1147)(I712C_T1077C)
MFVFLVLLPLVSSQCVNLTTRTQLPPAYTNSFTRGVYYPDKVFRSSVLHSTQDLFLPFFSNVTWFHAIHVSGTNGTKRFDNPVLPFNDGVYFASTEKSNIIRGWIFGTTLDSKTQSLLIVNNATNVVIKVCEFQFCNDPFLGVYYHKNNKSWMESEFRVYSSANNCTFEYVSQPFLMDLEGKQGNFKNLREFVFKNIDGYFKIYSKHTPINLVRDLPQGFSALEPLVDLPIGINITRFQTLLALHRSYLTPGDSSSGWTAGAAAYYVGYLQPRTFLLKYNENGTITDAVDCALDPLSETKCTLKSFTVEKGIYQTSNFRVQPTESIVRFPNITNLCPFGEVFNATRFASVYAWNRKRISNCVADYSVLYNSASFSTFKCYGVSPTKLNDLCFTNVYADSFVIRGDEVRQIAPGQTGKIADYNYKLPDDFTGCVIAWNSNNLDSKVGGNYNYLYRLFRKSNLKPFERDISTEIYQAGSTPCNGVEGFNCYFPLQSYGFQPTNGVGYQPYRVVVLSFELLHAPATVCGPKKSTNLVKNKCVNFNFNGLTGTGVLTESNKKFLPFQQFGRDIADTTDAVRDPQTLEILDITPCSFGGVSVITPGTNTSNQVAVLYQGVNCTEVPVAIHADQLTPTWRVYSTGSNVFQTRAGCLIGAEHVNNSYECDIPIGAGICASYQTQTNSPRRARSVASQSIIAYTMSLGAENSVVYSNNSCAIPTNFTISVTTEILPVSMTKTSVDCTMYICGDSTECSNLLLQYGSFCTQLNRALTGIAVEQDKNTQEVFAQVKQIYKTPPIKDFGGFNFSQILPDPSKPSKRSFIEDLLFNKVTLADAGFIKQYGDCLGDIAARDLICAQKFNGLTVLPPLLTDEMIAQYTSALLAGTITSGWTFGAGAALQIPFAMQMAYRFNGIGVTQNVLYENQKLIANQFNSAIGKIQDSLSSTASALGKLQDVVNQNAQALNTLVKQLSSNFGAISSVLNDILSRLDKVEAEVQIDRLITGRLQSLQTYVTQQLIRAAEIRASANLAATKMSECVLGQSKRVDFCGKGYHLMSFPQSAPHGVVFLHVTYVPAQEKNFTCAPAICHDGKAHFPREGVFVSNGTHWFVTQRNFYEPQIITTDNTFVSGNCDVVIGIVNNTVYDPLQPELDS

SEQ ID NO: 2997 - protein, 1147 aa, Artificial Sequence
  SARS-CoV-2/France/HF2496/2020__EPI_ISL_418231 spike protein (1-1147)(I712C_T1077C)
MFVFLVLLPLVSSQCVNLTTRTQLPPAYTNSFTRGVYYPDKVFRSSVLHSTQDLFLPFFSNVTWFHAIHVSGTNGTKRFDNPVLPFNDGVYFASTEKSNIIRGWIFGTTLDSKTQSLLIVNNATNVVIKVCEFQFCNDPFLGVYYHKNNKSWMESEFRVYSSANNCTFEYVSQPFLMDLEGKQGNFKNLREFVFKNIDGYFKIYSKHTPINLVRDLPQGFSALEPLVDLPIGINITRFQTLLALHRSYLTPGDSSSGWTAGAAAYYVGYLQPRTFLLKYNENGTITDAVDCALDPLSETKCTLKSFTVEKGIYQTSNFRVQPTESIVRFPNITNLCPFGEVFNATRFASVYAWNRKRISNCVADYSVLYNSASFSTFKCYGVSPTKLNDLCFTNVYADSFVIRGDEVRQIAPGQTGKIADYNYKLPDDFTGCVIAWNSNNLDSKVGGNYNYLYRLFRKSNLKPFERDISTEIYQAGSTPCNGVEGFNCYFPLQSYGFQPTNGVGYQPYRVVVLSFELLHAPATVCGPKKSTNLVKNKCVNFNFNGLTGTGVLTESNKKFLPFQQFGRDIADTTDAVRDPQTLEILDITPCSFGGVSVITPGTNTSNQVAVLYQGVNCTEVPVAIHADQLTPTWRVYSTGSNVFQTRAGCLIGAEHVNNSYECDIPIGAGICASYQTQTNSPRRARSVASQSIIAYTMSLGAENSVAYSNNSCAIPTNFTISVTTEILPVSMTKTSVDCTMYICGDSTECSNLLLQYGSFCTQLNRALTGIAVEQDKNTQEVFAQVKQIYKTPPIKDFGGFNFSQILPDPSKPSKRSFIEDLLFNKVTLADAGFIKQYGDCLGDIVARDLICAQKFNGLTVLPPLLTDEMIAQYTSALLAGTITSGWTFGAGAALQIPFAMQMAYRFNGIGVTQNVLYENQKLIANQFNSAIGKIQDSLSSTASALGKLQDVVNQNAQALNTLVKQLSSNFGAISSVLNDILSRLDKVEAEVQIDRLITGRLQSLQTYVTQQLIRAAEIRASANLAATKMSECVLGQSKRVDFCGKGYHLMSFPQSAPHGVVFLHVTYVPAQEKNFTCAPAICHDGKAHFPREGVFVSNGTHWFVTQRNFYEPQIITTDNTFVSGNCDVVIGIVNNTVYDPLQPELDS

SEQ ID NO: 2998 - protein, 1147 aa, Artificial Sequence
  SARS-CoV-2/USA/WA-UW291/2020__EPI_ISL_418076 spike protein (1-1147)(I712C_T1077C)
MFVFLVLLPLVSSQCVNLTTRTQLPPAYTNSFTRGVYYPDKVFRSSVLHSTQDLFLPFFSNVTWFHAIHVSGTNGTKRFDNPVLPFNDGVYFASTEKSNIIRGWIFGTTLDSKTQSLLIVNNATNVVIKVCEFQFCNDPFLGVYYHKNNKSWMESEFRVYSSANNCTFEYVSQPFLMDLEGKQGNFKNLREFVFKNIDGYFKIYSKHTPINLVRDLPQGFSALEPLVDLPIGINITRFQTLLALHRSYLTPGDSSSGWTAGAAAYYVGYLQPRTFLLKYNENGTITDAVDCALDPLSETKCTLKSFTVEKGIYQTSNFRVQPTESIVRFPNITNLCPFGEVFNATRFASVYAWNRKRISNCVADYSVLYNSASFSTFKCYGVSPTKLNDLCFTNVYADSFVIRGDEVRQIAPGQTGKIADYNYKLPDDFTGCVIAWNSNNLDSKVGGNYNYLYRLFRKSNLKPFERDISTEIYQAGSTPCNGVEGFNCYFPLQSYGFQPTNGVGYQPYRVVVLSFELLHAPATVCGPKKSTNLVKNKCVNFNFNGLTGTGVLTESNKKFLPFQQFGRDIADTTDAVRDPQTLEILDITPCSFGGVSVITPGTNTSNQVAVLYQGVNCTEVPVAIHADQLTPTWRVYSTGSNVFQTRAGCLIGAEHVNNSYECDIPIGAGICASYQTQTNSPRRARSVASQSIIAYTMSLGAENSVAYSNNSCAIPTNFTISVTTEILPVSMTKTSVDCTMYICGDSTECSNLLLQYGSFCTQLNRALTGIAVEQDKNTQEVFAQVKQIYKTPPIKDFGGFNFSQILPDPSKPSKRSFIEDLLFNKVTLADAGFIKQYGDCLGDIAARDLICAQKFNGLTVLPPLLTDEMIAQYTSALLAGTITSGWTFGAGAALQIPFAMQMAYRFNGIGVTQNVLYENQKLIANQFNSAIGKIQYSLSSTASALGKLQDVVNQNAQALNTLVKQLSSNFGAISSVLNDILSRLDKVEAEVQIDRLITGRLQSLQTYVTQQLIRAAEIRASANLAATKMSECVLGQSKRVDFCGKGYHLMSFPQSAPHGVVFLHVTYVPAQEKNFTCAPAICHDGKAHFPREGVFVSNGTHWFVTQRNFYEPQIITTDNTFVSGNCDVVIGIVNNTVYDPLQPELDS

SEQ ID NO: 2999 - protein, 1147 aa, Artificial Sequence; identical to SEQ ID NO: 2962
  SARS-CoV-2/Portugal/PT0034/2020__EPI_ISL_418019 spike protein (1-1147)(I712C_T1077C)

SEQ ID NO: 3000 - protein, 1147 aa, Artificial Sequence; identical to SEQ ID NO: 2954
  SARS-CoV-2/Iceland/202/2020__EPI_ISL_417750 spike protein (1-1147)(I712C_T1077C)

SEQ ID NO: 3001 - protein, 1147 aa, Artificial Sequence
  SARS-CoV-2/USA/WA-UW261/2020__EPI_ISL_418046 spike protein (1-1147)(I712C_T1077C)
MFVFLVLLPLVSSQCVNLTTRTQLPPAYTNSFTRGVYYPDKVFRSSVLHSTQDLFLPFFSNVTWFHAIHVSGTNGTKRFDNPVLPFNDGVYFASTEKSNIIRGWIFGTTLDSKTQSLLIVNNATNVVIKVCEFQFCNDPFLGVYYHKNNKSWMESEFRVYSSANNCTFEYVSQPFLMDLEGKQGNFKNLREFVFKNIDGYFKIYSKHTPINLVRDLPQGFSALEPLVDLPIGINITRFQTLLALHRSYLTPGDSSSGWTAGAAAYYVGYLQPRTFLLKYNENGTITDAVDCALDPLSETKCTLKSFTVEKGIYQTSNFRVQPTESIVRFPNITNLCPFGEVFNATRFTSVYAWNRKRISNCVADYSVLYNSASFSTFKCYGVSPTKLNDLCFTNVYADSFVIRGDEVRQIAPGQTGKIADYNYKLPDDFTGCVIAWNSNNLDSKVGGNYNYLYRLFRKSNLKPFERDISTEIYQAGSTPCNGVEGFNCYFPLQSYGFQPTNGVGYQPYRVVVLSFELLHAPATVCGPKKSTNLVKNKCVNFNFNGLTGTGVLTESNKKFLPFQQFGRDIADTTDAVRDPQTLEILDITPCSFGGVSVITPGTNTSNQVAVLYQDVNCTEVPVAIHADQLTPTWRVYSTGSNVFQTRAGCLIGAEHVNNSYECDIPIGAGICASYQTQTNSPRRARSVASQSIIAYTMSLGAENSVAYSNNSCAIPTNFTISVTTEILPVSMTKTSVDCTMYICGDSTECSNLLLQYGSFCTQLNRALTGIAVEQDKNTQEVFAQVKQIYKTPPIKDFGGFNFSQILPDPSKPSKRSFIEDLLFNKVTLADAGFIKQYGDCLGDIAARDLICAQKFNGLTVLPPLLTDEMIAQYTSALLAGTITSGWTFGAGAALQIPFAMQMAYRFNGIGVTQNVLYENQKLIANQFNSAIGKIQDSLSSTASALGKLQDVVNQNAQALNTLVKQLSSNFGAISSVLNDILSRLDKVEAEVQIDRLITGRLQSLQTYVTQQLIRAAEIRASANLAATKMSECVLGQSKRVDFCGKGYHLMSFPQSAPHGVVFLHVTYVPAQEKNFTCAPAICHDGKAHFPREGVFVSNGTHWFVTQRNFYEPQIITTDNTFVSGNCDVVIGIVNNTVYDPLQPELDS

SEQ ID NO: 3002 - protein, 1147 aa, Artificial Sequence
  SARS-CoV-2/Portugal/PT0035/2020__EPI_ISL_418020 spike protein (1-1147)(I712C_T1077C)
MFVFLVLLPLVSSQCVNLTTRTQLPPAYTNSFTRGVYYPDKVFRSSVLHSTQDLFLPFFSNVTWFHAIHVSGTNGTKRFDNPVLPFNDGVYFASTEKSNIIRGWIFGTTLDSKTQSLLIVNNATNVVIKVCEFQFCNDPFLGVYYHKNNKSWMESEFRVYSSANNCTFEYVSQPFLMDLEGKQGNFKNLREFVFKNIDGYFKIYSKHTPINLVRDLPQGFSALEPLVDLPIGINITRFQTLLALHRSYLTPGDSSSGWTAGAAAYYVGYLQPRTFLLKYNENGTITDAVDCALDPLSETKCTLKSFTVEKGIYQTSNFRVQPTESIVRFPNITNLCPFGEVFNATRFASVYAWNRKRISNCVADYSVLYNSASFSTFKCYGVSPTKLNDLCFTNVYADSFVIRGDEVRQIAPGQTGKIADYNYKLPDDFTGCVIAWNSNNLDSKVGGNYNYLYRLFRKSNLKPFERDISTEIYQAGSTPCNGVEGFNCYFPLQSYGFQPTNGVGYQPYRVVVLSFELLHAPATVCGPKKSTNLVKNKCVNFNFNGLTGTGVLTESNKKFLPFQQFGRDIADTTDAVRDPQTLEILDITPCSFGGVSVITPGTNTSNQVAVLYQDVNCTEVPVAIHADQLTPTWRVYSTGSNVFQTRAGCLIGAEHVNNSYECDIPIGAGICASYQTQTNSPRRARSVASQSIIAYTMSLGAENSVAYSNNSCAIPTNFTISVTTEILPVSMTKTSVDCTMYICGDSTECSNLLLQYGSFCTQLNRALTGIAVEQDKNTQEVFAQVKQIYKTPPIKDFGGFNFSQILPDPSKPSKRSFIEDLLFNKVTLADAGFIKQYGDCLGDISARDLICAQKFNGLTVLPPLLTDEMIAQYTSALLAGTITSGWTFGAGAALQIPFAMQMAYRFNGIGVTQNVLYENQKLIANQFNSAIGKIQDSLSSTASALGKLQDVVNQNAQALNTLVKQLSSNFGAISSVLNDILSRLDKVEAEVQIDRLITGRLQSLQTYVTQQLIRAAEIRASANLAATKMSECVLGQSKRVDFCGKGYHLMSFPQSAPHGVVFLHVTYVPAQEKNFTCAPAICHDGKAHFPREGVFVSNGTHWFVTQRNFYEPQIITTDNTFVSGNCDVVIGIVNNTVYDPLQPELDS

SEQ ID NO: 3003 - protein, 1147 aa, Artificial Sequence
  SARS-CoV-2/USA/NY-NYUMC7/2020__EPI_ISL_418192 spike protein (1-1147)(I712C_T1077C)
MFVFLVLLPLVSSQCVNLTTRTQLPPAYTNSFTRGVYYPDKVFRSSVLHSTQDLFLPFFSNVTWFHAIHVSGTNGTKRFDNPVLPFNDGVYFASTEKSNIIRGWIFGTTLDSKTQSLLIVNNATNVVIKVCEFQFCNDPFLGVYHHKNNKSWMESEFRVYSSANNCTFEYVSQPFLMDLEGKQGNFKNLREFVFKNIDGYFKIYSKHTPINLVRDLPQGFSALEPLVDLPIGINITRFQTLLALHRSYLTPGDSSSGWTAGAAAYYVGYLQPRTFLLKYNENGTITDAVDCALDPLSETKCTLKSFTVEKGIYQTSNFRVQPTESIVRFPNITNLCPFGEVFNATRFASVYAWNRKRISNCVADYSVLYNSASFSTFKCYGVSPTKLNDLCFTNVYADSFVIRGDEVRQIAPGQTGKIADYNYKLPDDFTGCVIAWNSNNLDSKVGGNYNYLYRLFRKSNLKPFERDISTEIYQAGSTPCNGVEGFNCYFPLQSYGFQPTNGVGYQPYRVVVLSFELLHAPATVCGPKKSTNLVKNKCVNFNFNGLTGTGVLTESNKKFLPFQQFGRDIADTTDAVRDPQTLEILDITPCSFGGVSVITPGTNTSNQVAVLYQGVNCTEVPVAIHADQLTPTWRVYSTGSNVFQTRAGCLIGAEHVNNSYECDIPIGAGICASYQTQTNSPRRARSVASQSIIAYTMSLGAENSVAYSNNSCAIPTNFTISVTTEILPVSMTKTSVDCTMYICGDSTECSNLLLQYGSFCTQLNRALTGIAVEQDKNTQEVFAQVKQIYKTPPIKDFGGFNFSQILPDPSKPSKRSFIEDLLFNKVTLADAGFIKQYGDCLGDIAARDLICAQKFNGLTVLPPLLTDEMIAQYTSALLAGTITSGWTFGAGAALQIPFAMQMAYRFNGIGVTQNVLYENQKLIANQFNSAIGKIQDSLSSTASALGKLQDVVNQNAQALNTLVKQLSSNFGAISSVLNDILSRLDKVEAEVQIDRLITGRLQSLQTYVTQQLIRAAEIRASANLAATKMSECVLGQSKRVDFCGKGYHLMSFPQSAPHGVVFLHVTYVPAQEKNFTCAPAICHDGKAHFPREGVFVSNGTHWFVTQRNFYEPQIITTDNTFVSGNCDVVIGIVNNTVYDPLQPELDS

SEQ ID NO: 3004 - protein, 1147 aa, Artificial Sequence
  SARS-CoV-2/Iceland/189/2020__EPI_ISL_417709 spike protein (1-1147)(I712C_T1077C)
MFVFLVLLPLVSSQCVNLTTRTQLPPAYTNSFTRGVYYPDKVFRSSVLHSTQDLFLPFFSNVTWFHAIHVSGTNGTKRFDNPVLPFNDGVYFASTEKSNIIRGWIFGTTLDSKTQSLLIVNNATNVVIKVCEFQFCNDPFLGVYYHKNNKSWMESEFRVYSSANNCTFEYVSQPFLMDLEGKQGNFKNLREFVFKNIDGYFKIYSKHTPINLVRDLPQGFSALEPLVDLPIGINITRFQTLLALHRSYLTPGDSSSGWTAGAAAYYVGYLQPRTFLLKYNENGTITDAVDCALDPLSETKCTLKSFTVEKGIYQTSNFRVQPTESIVRFPNITNLCPFGEVFNATRFASVYAWNRKRISNCVADYSVLYNSASFSTFKCYGVSPTKLNDLCFTNVYADSFVIRGDEVRQIAPGQTGKIADYNYKLPDDFTGCVIAWNSNNLDSKVGGNYNYLYRLFRKSNLKPFERDISTEIYQAGSTPCNGVEGFNCYFPLQSYGFQPTNGVGYQPYRVVVLSFELLHAPATVCGPKKSTNLVKNKCVNFNFNGLTGTGVLTESNKKFLPFQQFGRDIADTTDAVRDPQTLEILDITPCSFGGVSVITPGTNTSNQVAVLYQGVNCTEVPVAIHADQLTPTWRVYSTGSNVFQTRAGCLIGAEHVNNSYECDIPIGAGICASYQTQTNSPRRARSVASQSIIAYTMSLGAENSVAYSNNSCAIPTNFTISVTTEILPVSMTKTSVDCTMYICGDSTECSNLLLQYGSFCTQLNRALTGIAVEQDKNTQEVFAQVKQIYKTPPIKDFGGFNFSQILPDPSKPSKRSFIEDLLFNKVTLADAGFTKQYGDCLGDIAARDLICAQKFNGLTVLPPLLTDEMIAQYTSALLAGTITSGWTFGAGAALQIPFAMQMAYRFNGIGVTQNVLYENQKLIANQFNSAIGKIQDSLSSTASALGKLQDVVNQNAQALNTLVKQLSSNFGAISSVLNDILSRLDKVEAEVQIDRLITGRLQSLQTYVTQQLIRAAEIRASANLAATKMSECVLGQSKRVDFCGKGYHLMSFPQSAPHGVVFLHVTYVPAQEKNFTCAPAICHDGKAHFPREGVFVSNGTHWFVTQRNFYEPQIITTDNTFVSGNCDVVIGIVNNTVYDPLQPELDS

SEQ ID NO: 3005 - protein, 1147 aa, Artificial Sequence
  SARS-CoV-2/Australia/NSW56/2020__EPI_ISL_417408 spike protein (1-1147)(I712C_T1077C)
MFVFLVLLPLVSSQCVNLTTRTQLPPAYTNSFTRGVYYPDKVFRSSVLHSTQDLFLPFFSNVTWFHAIHVSGTNGTKRFDNPVLPFNDGVYFASTEKSNIIRGWIFGTTLDSKTQSLLIVNNATNVVIKVCEFQFCNDPFLGVYYHKNNKSWMESEFRVYSSANNCTFEYVSQPFLMDLEGKQGNFKNLREFVFKNIDGYFKIYSKHTPINLVRDLPQGFSALEPLVDLPIGINITRFQTLLALHRSYLTPGDSSSGWTAGAAAYYVGYLQPRTFLLKYNENGTITDAVDCALDPLSETKCTLKSFTVEKGIYQTSNFRVQPTESIVRFPNITNLCPFGEVFNATRFASVYAWNRKRISNCVADYSVLYNSASFSTFKCYGVSPTKLNDLCFTNVYADSFVIRGDEVRQIAPGQTGKIADYNYKLPDDFTGCVIAWNSNNLDSKVGGNYNYLYRLFRKSNLKPFERDISTEIYQAGSTPCNGVEGFNCYFPLQSYGFQPTNGVGYQPYRVVVLSFELLHAPATVCGPKKSTNLVKNKCVNFNFNGLTGTGVLTESNKKFLPFQQFGRDIADTTDAVRDPQTLEILDITPCSFGGVSVITPGTNTSNQVAVLYQDVNCTEVPVAIHADQLTPTWRVYSTGSNVFQTRAGCLIGAEHVNNSYECDIPIGAGICASYQTQTNSPRRARSVASQSIIAYTMSLGAENSVAYSNNSCAIPTNFTISVTTEILPVSMTKTSVDCTMYICGDSTECSNLLLQYGSFCTQLNRALTGIAVEQDKNTQEVFAQVKQIYKTPPIKDFGGFNFSQILPDSSKPSKRSFIEDLLFNKVTLADAGFIKQYGDCLGDIAARDLICAQKFNGLTVLPPLLTDEMIAQYTSALLAGTITSGWTFGAGAALQIPFAMQMAYRFNGIGVTQNVLYENQKLIANQFNSAIGKIQDSLSSTASALGKLQDVVNQNAQALNTLVKQLSSNFGAISSVLNDILSRLDKVEAEVQIDRLITGRLQSLQTYVTQQLIRAAEIRASANLAATKMSECVLGQSKRVDFCGKGYHLMSFPQSAPHGVVFLHVTYVPAQEKNFTCAPAICHDGKAHFPREGVFVSNGTHWFVTQRNFYEPQIITTDNTFVSGNCDVVIGIVNNTVYDPLQPELDS

SEQ ID NO: 3006 - protein, 1147 aa, Artificial Sequence
  SARS-CoV-2/Iceland/280/2020__EPI_ISL_417608 spike protein (1-1147)(I712C_T1077C)
MFVFLVLLPLVSSQCVNLTTRTQLPPAYTNSFTRGVYYPDKVFRSSVLHSTQDLFLPFFSNVTWFHAIHVSGTNGTKRFDNPVLPFNDGVYFASTEKSNIIRGWIFGTTLDSKTQSLLIVNNATNVVIKVCEFQFCNDPFLGVYYHKNNKSWMESEFRVYSSANNCTFEYVSQPFLMDLEGKQGNFKNLREFVFKNIDGYFKIYSKHTPINLVRDLPQGFSALEPLVDLPIGINITRFQTLLALHRSYLTPGDSSSGWTAGAAAYYVGYLQPRTFLLKYNENGTITDAVDCALDPLSETKCTLKSFTVEKGIYQTSNFRVQPTESIVRFPNITNLCPFGEVFNATRFASVYAWNRKRISNCVADYSVLYNSASFSTFKCYGVSPTKLNDLCFTNVYADSFVIRGDEVRQIAPGQTGKIADYNYKLPDDFTGCVIAWNSNNLDSKVGGNYNYLYRLFRKSNLKPFERDISTEIYQAGSTPCNGVEGFNCYFPLQSYGFQPTNGVGYQPYRVVVLSFELLHAPATVCGPKKSTNLVKNKCVNFNFNGLTGTGVLTESNKKFLPFQQFGRDIADTTDAVRDPQTLEILDITPCSFGGVSVITPGTNTSNQVAVLYQGVNCTEVPVAIHADQLTPTWRVYSTGSNVFQTRAGCLIGAEHVNNSYECDIPIGAGICASYHTQTNSPRRARSVASQSIIAYTMSLGAENSVAYSNNSCAIPTNFTISVTTEILPVSMTKTSVDCTMYICGDSTECSNLLLQYGSFCTQLNRALTGIAVEQDKNTQEVFAQVKQIYKTPPIKDFGGFNFSQILPDPSKPSKRSFIEDLLFNKVTLADAGFIKQYGDCLGDIAARDLICAQKFNGLTVLPPLLTDEMIAQYTSALLAGTITSGWTFGAGAALQIPFAMQMAYRFNGIGVTQNVLYENQKLIANQFNSAIGKIQDSLSSTASALGKLQDVVNQNAQALNTLVKQLSSNFGAISSVLNDILSRLDKVEAEVQIDRLITGRLQSLQTYVTQQLIRAAEIRASANLAATKMSECVLGQSKRVDFCGKGYHLMSFPQSAPHGVVFLHVTYVPAQEKNFTCAPAICHDGKAHFPREGVFVSNGTHWFVTQRNFYEPQIITTDNTFVSGNCDVVIGIVNNTVYDPLQPELDS

SEQ ID NO: 3007 - protein, 1147 aa, Artificial Sequence; identical to SEQ ID NO: 2962
  SARS-CoV-2/Iceland/247/2020__EPI_ISL_417575 spike protein (1-1147)(I712C_T1077C)

SEQ ID NO: 3008 - protein, 1147 aa, Artificial Sequence
  SARS-CoV-2/Iceland/238/2020__EPI_ISL_417566 spike protein (1-1147)(I712C_T1077C)
MFVFLVLLPLVSSQCVNLTTRTQLPPAYTNSFTRGVYYPDKVFRSSVLHSTQDLFLPFFSNVTWFHAIHVSGTNGTKRFDNPVLPFNDGVYFASTEKSNIIRGWIFGTTLDSKTQSLLIVNNATNVVIKVCEFQFCNDPFLGVYYHKNNKSWMESEFRVYSSANNCTFEYVSQPFLMDLEGKQGNFKNLREFVFKNIDGYFKIYSKHTPINLVRDLPQGFSALEPLVDLPIGINITRFQTLLALHRSYLTPGDSSSGWTAGAAAYYVGYLQPRTFLLKYNENGTITDAVDCALDPLSETKCTLKSFTVEKGIYQTSNFRVQPTESIVRFPNITNLCPFGEVFNATRFASVYAWNRKRISNCVADYSVLYNSASFSTFKCYGVSPTKLNDLCFTNVYADSFVIRGDEVRQIAPGQTGKIADYNYKLPDDFTGCVIAWNSNNLDSKVGGNYNYLYRLFRKSNLKPFERDISTEIYQAGSTPCNGVEGFNCYFPLQSYGFQPTNGVGYQPYRVVVLSFELLHAPATVCGPKKSTNLVKNKCVNFNFNGLTGTGVLTESNKKFLPFQQFGRDIADTTDAVRDPQTLEILDITPCSFGGVSVITPGTNTSNQVAVLYQGVNCTEVPVAIHADQLTPTWRVYSTGSNVFQTRAGCLIGAEHVNNSYECDIPIGAGICASYQTQTNSPRRARSVASQSIIAYTMSLGAENSVAYSNNSCAIPTNFTISVTTEILPVSMTKTSVDCTMYICGDSTECSNLLLQYGSFCTQLNRALTGIAVEQDKNTQEVFAQVKQIYKTPPIKDFGGFNFSQILPDPSKPSKRSFIEDLLFNKVTLADVGFIKQYGDCLGDIAARDLICAQKFNGLTVLPPLLTDEMIAQYTSALLAGTITSGWTFGAGAALQIPFAMQMAYRFNGIGVTQNVLYENQKLIANQFNSAIGKIQDSLSSTASALGKLQDVVNQNAQALNTLVKQLSSNFGAISSVLNDILSRLDKVEAEVQIDRLITGRLQSLQTYVTQQLIRAAEIRASANLAATKMSECVLGQSKRVDFCGKGYHLMSFPQSAPHGVVFLHVTYVPAQEKNFTCAPAICHDGKAHFPREGVFVSNGTHWFVTQRNFYEPQIITTDNTFVSGNCDVVIGIVNNTVYDPLQPELDS

SEQ ID NO: 3009 - protein, 1147 aa, Artificial Sequence
  SARS-CoV-2/Greece/16/2020__EPI_ISL_418265 spike protein (1-1147)(I712C_T1077C)
MFVFLVLLPLVSSQCVNLTTRTQLPPAYTNSFTRGVYYPDKVFRSSVLHSTQDLFLPFFSNVTWFHAIHVSGTNGTKRFDNPVLPFNDGVYFASTEKSNIIRGWIFGTTLDSKTQSLLIVNNATNVVIKVCEFQFCNDPFLGVYYHKNNKSWMESEFRVYSSANNCTFEYVSQPFLMDLEGKQGNFKNLREFVFKNVDGYFKIYSKHTPINLVRDLPQGFSALEPLVDLPIGINITRFQTLLALHRSYLTPGDSSSGWTAGAAAYYVGYLQPRTFLLKYNENGTITDAVDCALDPLSETKCTLKSFTVEKGIYQTSNFRVQPTESIVRFPNITNLCPFGEVFNATRFASVYAWNRKRISNCVADYSVLYNSASFSTFKCYGVSPTKLNDLCFTNVYADSFVIRGDEVRQIAPGQTGKIADYNYKLPDDFTGCVIAWNSNNLDSKVGGNYNYLYRLFRKSNLKPFERDISTEIYQAGSTPCNGVEGFNCYFPLQSYGFQPTNGVGYQPYRVVVLSFELLHAPATVCGPKKSTNLVKNKCVNFNFNGLTGTGVLTESNKKFLPFQQFGRDIADTTDAVRDPQTLEILDITPCSFGGVSVITPGTNTSNQVAVLYQDVNCTEVPVAIHADQLTPTWRVYSTGSNVFQTRAGCLIGAEHVNNSYECDIPIGAGICASYQTQTNSPRRARSVASQSIIAYTMSLGAENSVAYSNNSCAIPTNFTISVTTEILPVSMTKTSVDCTMYICGDSTECSNLLLQYGSFCTQLNRALTGIAVEQDKNTQEVFAQVKQIYKTPPIKDFGGFNFSQILPDPSKPSKRSFIEDLLFNKVTLADAGFIKQYGDCLGDIAARDLICAQKFNGLTVLPPLLTDEMIAQYTSALLAGTITSGWTFGAGAALQIPFAMQMAYRFNGIGVTQNVLYENQKLIANQFNSAIGKIQDSLSSTASALGKLQDVVNQNAQALNTLVKQLSSNFGAISSVLNDILSRLDKVEAEVQIDRLITGRLQSLQTYVTQQLIRAAEIRASANLAATKMSECVLGQSKRVDFCGKGYHLMSFPQSAPHGVVFLHVTYVPAQEKNFTCAPAICHDGKAHFPREGVFVSNGTHWFVTQRNFYEPQIITTDNTFVSGNCDVVIGIVNNTVYDPLQPELDS

SEQ ID NO: 3010 - protein, 1147 aa, Artificial Sequence
  SARS-CoV-2/Iceland/319/2020__EPI_ISL_417648 spike protein (1-1147)(I712C_T1077C)
MFVFLVLLPLVSSQCVNLTTRTQLPPAYTNSFTRGVYYPDKVFRSSVLHSTQDLFLPFFSNVTWFHAIHVSGTNGTKRFDNPVLPFNDGVYFASTEKSNIIRGWIFGTTLDSKTQSLLIVNNATNVVIKVCEFQFCNDPFLGVYYHKNNKSWMESEFRVYSSANNCTFEYVSQPFLIDLEGKQGNFKNLREFVFKNIDGYFKIYSKHTPINLVRDLPQGFSALEPLVDLPIGINITRFQTLLALHRSYLTPGDSSSGWTAGAAAYYVGYLQPRTFLLKYNENGTITDAVDCALDPLSETKCTLKSFTVEKGIYQTSNFRVQPTESIVRFPNITNLCPFGEVFNATRFASVYAWNRKRISNCVADYSVLYNSASFSTFKCYGVSPTKLNDLCFTNVYADSFVIRGDEVRQIAPGQTGKIADYNYKLPDDFTGCVIAWNSNNLDSKVGGNYNYLYRLFRKSNLKPFERDISTEIYQAGSTPCNGVEGFNCYFPLQSYGFQPTNGVGYQPYRVVVLSFELLHAPATVCGPKKSTNLVKNKCVNFNFNGLTGTGVLTESNKKFLPFQQFGRDIADTTDAVRDPQTLEILDITPCSFGGVSVITPGTNTSNQVAVLYQGVNCTEVPVAIHADQLTPTWRVYSTGSNVFQTRAGCLIGAEHVNNSYECDIPIGAGICASYQTQTNSPRRARSVASQSIIAYTMSLGAENSVAYSNNSCAIPTNFTISVTTEILPVSMTKTSVDCTMYICGDSTECSNLLLQYGSFCTQLNRALTGIAVEQDKNTQEVFAQVKQIYKTPPIKDFGGFNFSQILPDPSKPSKRSFIEDLLFNKVTLADAGFIKQYGDCLGDIAARDLICAQKFNGLTVLPPLLTDEMIAQYTSALLAGTITSGWTFGAGAALQIPFAMQMAYRFNGIGVTQNVLYENQKLIANQFNSAIGKIQDSLSSTASALGKLQDVVNQNAQALNTLVKQLSSNFGAISSVLNDILSRLDKVEAEVQIDRLITGRLQSLQTYVTQQLIRAAEIRASANLAATKMSECVLGQSKRVDFCGKGYHLMSFPQSAPHGVVFLHVTYVPAQEKNFTCAPAICHDGKAHFPREGVFVSNGTHWFVTQRNFYEPQIITTDNTFVSGNCDVVIGIVNNTVYDPLQPELDS

SEQ ID NO: 3011 - protein, 1147 aa, Artificial Sequence
  SARS-CoV-2/Congo/94/2020__EPI_ISL_417947 spike protein (1-1147)(I712C_T1077C)
MFVFLVLLPLVSSQCVNLTTRTQLPPAYTNSFTRGVYYPDKVFRSSVLHSTQDLFLPFFSNVTWFHAIHVSGTNGTKRFDNPVLPFNDGVYFASTEKSNIIRGWIFGTTLDSKTQSLLIVNNATNVVIKVCEFQFCNDPFLGVYYHKNNKSWMESEFRVYSSANNCTFEYVSQPFLMDLEGKQGNFKNLREFVFKNIDGYFKIYSKHTPINLVRDLPQGFSALEPLVDLPIGINITRFQTLLALHRSYLTPGDSSSGWTAGAAAYYVGYLQPRTFLLKYNENGTITDAVDCALDPLSETKCTLKSFTVEKGIYQTSNFRVQPTESIVRFPNITNLCPFGEVFNATRFASVYAWNRKRISNCVADYSVLYNSASFSTFKCYGVSPTKLNDLCFTNVYADSFVIRGDEVRQIAPGQTGKIADYNYKLPDDFTGCVIAWNSNNLDSKVGGNYNYLYRLFRKSNLKPFERDISTEIYQAGSTPCNGVEGFNCYFPLQSYGFQPTNGVGYQPYRVVVLSFELLHAPATVCGPKKSTNLVKNKCVNFNFNGLTGTGVLTESNKKFLPFQQFGRDIADTTDAVRDPQTLEILDITPCSFGGVSVITPGTNTSNQVAVLYQGVNCTEVPVAIHADQLTPTWRVYSTGSNVFQTRAGCLIGAEHVNNSYECDIPIGAGICASYQTQTNSPRRARSVASQSIIAYTMSLGAENSVAYSNNSCAIPTNFTISVTTEILPVSMTKTSVDCTMYICGDSTECSNLLLQYGSFCTQLNRALTGIAVEQDKNTQEVFAQVKQIYKTPPIKDFGGFNFSQILPDPSKPSKRSFIEDILFNKVTLADAGFIKQYGDCLGDIAARDLICAQKFNGLTVLPPLLTDEMIAQYTSALLAGTITSGWTFGAGAALQIPFAMQMAYRFNGIGVTQNVLYENQKLIANQFNSAIGKIQDSLSSTASALGKLQDVVNQNAQALNTLVKQLSSNFGAISSVLNDILSRLDKVEAEVQIDRLITGRLQSLQTYVTQQLIRAAEIRASANLAATKMSECVLGQSKRVDFCGKGYHLMSFPQSAPHGVVFLHVTYVPAQEKNFTCAPAICHDGKAHFPREGVFVSNGTHWFVTQRNFYEPQIITTDNTFVSGNCDVVIGIVNNTVYDPLQPELDS

SEQ ID NO: 3012 - protein, 1147 aa, Artificial Sequence
  SARS-CoV-2/Congo/158/2020__EPI_ISL_417950 spike protein (1-1147)(I712C_T1077C)
MFVFLVLLPLVSSQCVNLTTRTQLPPAYTNSFTRGVYYPDKVFRSSVLHSTQDLFLPFFSNVTWFHAIHVSGTNGTKRFDNPVLPFNDGVYFASTEKSNIIRGWIFGTTLDSKTQSLLIVNNATNVVIKVCEFQFCNDPFLGVYYHKNNKSWMESEFRVYSSANNCTFEYVSQPFLMDLEGKQGNFKNLREFVFKNIDGYFKIYSKHTPINLVRDLPQGFSALEPLVDLPIGINITRFQTLLALHRSYLTPGDSSSGWTAGAAAYYVGYLQPRTFLLKYNENGTITDAVDCALDPLSETKCTLKSFTVEKGIYQTSNFRVQPTESIVRFPNITNLCPFGEVFNATRFASVYAWNRKRISNCVADYSVLYNSASFSTFKCYGVSPTKLNDLCFTNVYADSFVIRGDEVRQIAPGQTGKIADYNYKLPDDFTGCVIAWNSNNLDSKVGGNYNYLYRLFRKSNLKPFERDISTEIYQAGSTPCNGVEGFNCYFPLQSYGFQPTNGVGYQPYRVVVLSFELLHAPATVCGPKKSTNLVKNKCVNFNFNGLTGTGVLTESNKKFLPFQQFGRDIADTTDAVRDPQTLEILDITPCSFGGVSVITPGTNTSNQVAVLYQDVNCTEVPVAIHADQLTPTWRVYSTGSNVFQTRAGCLIGAEHVNNSYECDIPIGAGICASYQTQTNSPRRARSVASQSIIAYTMSLGAENSVAYSNNSCAIPTNFTISVTTEILPVSMTKTSVDCTMYICGDSTECSNLLLQYGSFCTQLNRALTGIAVEQDKNTQEVFAQVKQIYKTPPIKDFGGFNFSQILPDPSKPSKRSFIEDLLFNKVTLADAGFIKQYGDCLGDIAARDLICAQKFNGLTVLPPLLTDEMIAQYTSALLAGTITSGWTFGAGAALQIPFAMQMAYRFNGIGVTQNVLYENQKLIANQFNSAIGKIQDSLSSTASALGKLQDVVNQNAQALNTLVKQLSSNFGAISSVLNDILSRLDKVEAEVQIDRLITGRLQSLQTYVTQQLIRAAEIRASANLAATKMSECVLGQSKRVDFCGKGYHLMSFPQSAPHGVVFLHVTYVPAQEKNFTCAPAICHDGKAHFPREGVFVSNGTHWFVTQRNFYEPQIITTDNTFLSGNCDVVIGIVNNTVYDPLQPELDS

SEQ ID NO: 3013 - protein, 1147 aa, Artificial Sequence
  SARS-CoV-2/USA/UT-00034/2020__EPI_ISL_417977 spike protein (1-1147)(I712C_T1077C)
MFVFLVLLPLVSSQCVNLTTRTQLPPAYTNSFTRGVYYPDKVFRSSVLHSTQDLFLPFFSNVTWFHAIHVSGTNGTKRFDNPVLPFNDGVYFASTEKSNIIRGWIFGTTLDSKTQSLLIVNNATNVVIKVCEFQFCNDPFLGVYYYKNNKSWMESEFRVYSSANNCTFEYVSQPFLMDLEGKQGNFKNLREFVFKNIDGYFKIYSKHTPINLVRDLPQGFSALEPLVDLPIGINITRFQTLLALHRSYLTPGDSSSGWTAGAAAYYVGYLQPRTFLLKYNENGTITDAVDCALDPLSETKCTLKSFTVEKGIYQTSNFRVQPTESIVRFPNITNLCPFGEVFNATRFASVYAWNRKRISNCVADYSVLYNSASFSTFKCYGVSPTKLNDLCFTNVYADSFVIRGDEVRQIAPGQTGKIADYNYKLPDDFTGCVIAWNSNNLDSKVGGNYNYLYRLFRKSNLKPFERDISTEIYQAGSTPCNGVEGFNCYFPLQSYGFQPTNGVGYQPYRVVVLSFELLHAPATVCGPKKSTNLVKNKCVNFNFNGLTGTGVLTESNKKFLPFQQFGRDIADTTDAVRDPQTLEILDITPCSFGGVSVITPGTNTSNQVAVLYQGVNCTEVPVAIHADQLTPTWRVYSTGSNVFQTRAGCLIGAEHVNNSYECDIPIGAGICASYQTQTNSPRRARSVASQSIIAYTMSLGAENSVAYSNNSCAIPTNFTISVTTEILPVSMTKTSVDCTMYICGDSTECSNLLLQYGSFCTQLNRALTGIAVEQDKNTQEVFAQVKQIYKTPPIKDFGGFNFSQILPDPSKPSKRSFIEDLLFNKVTLADAGFIKQYGDCLGDIAARDLICAQKFNGLTVLPPLLTDEMIAQYTSALLAGTITSGWTFGAGAALQIPFAMQMAYRFNGIGVTQNVLYENQKLIANQFNSAIGKIQDSLSSTASALGKLQDVVNQNAQALNTLVKQLSSNFGAISSVLNDILSRLDKVEAEVQIDRLITGRLQSLQTYVTQQLIRAAEIRASANLAATKMSECVLGQSKRVDFCGKGYHLMSFPQSAPHGVVFLHVTYVPAQEKNFTCAPAICHDGKAHFPREGVFVSNGTHWFVTQRNFYEPQIITTDNTFVSGNCDVVIGIVNNTVYDPLQPELDS

SEQ ID NO: 3014 - protein, 1147 aa, Artificial Sequence
  SARS-CoV-2/USA/UT-00033/2020__EPI_ISL_417976 spike protein (1-1147)(I712C_T1077C)
MFVFLVLLPLVSSQCVNLTTRTQLPPAYTNSFTRGVYYPDKVFRSSVLHSTQDLFLPFFSNVTWFHAIHVSGTNGTKRFDNPVLPFNDGVYFASTEKSNIIRGWIFGTTLDSKTQSLLIVNNATNVVIKVCEFQFCNDPFLGVYYHKNNKSWMESEFRVYSSANNCTFEYVSQPFLMDLEGKQGNFKNLREFVFKNIDGYFKIYSKHTPINLVRDLPQGFSALEPLVDLPIGINITRFQTLLALHRSYLTPGDSSSGLTAGAAAYYVGYLQPRTFLLKYNENGTITDAVDCALDPLSETKCTLKSFTVEKGIYQTSNFRVQPTESIVRFPNITNLCPFGEVFNATRFASVYAWNRKRISNCVADYSVLYNSASFSTFKCYGVSPTKLNDLCFTNVYADSFVIRGDEVRQIAPGQTGKIADYNYKLPDDFTGCVIAWNSNNLDSKVGGNYNYLYRLFRKSNLKPFERDISTEIYQAGSTPCNGVEGFNCYFPLQSYGFQPTNGVGYQPYRVVVLSFELLHAPATVCGPKKSTNLVKNKCVNFNFNGLTGTGVLTESNKKFLPFQQFGRDIADTTDAVRDPQTLEILDITPCSFGGVSVITPGTNTSNQVAVLYQGVNCTEVPVAIHADQLTPTWRVYSTGSNVFQTRAGCLIGAEHVNNSYECDIPIGAGICASYQTQTNSPRRARSVASQSIIAYTMSLGAENSVAYSNNSCAIPTNFTISVTTEILPVSMTKTSVDCTMYICGDSTECSNLLLQYGSFCTQLNRALTGIAVEQDKNTQEVFAQVKQIYKTPPIKDFGGFNFSQILPDPSKPSKRSFIEDLLFNKVTLADAGFIKQYGDCLGDIAARDLICAQKFNGLTVLPPLLTDEMIAQYTSALLAGTITSGWTFGAGAALQIPFAMQMAYRFNGIGVTQNVLYENQKLIANQFNSAIGKIQDSLSSTASALGKLQDVVNQNAQALNTLVKQLSSNFGAISSVLNDILSRLDKVEAEVQIDRLITGRLQSLQTYVTQQLIRAAEIRASANLAATKMSECVLGQSKRVDFCGKGYHLMSFPQSAPHGVVFLHVTYVPAQEKNFTCAPAICHDGKAHFPREGVFVSNGTHWFVTQRNFYEPQIITTDNTFVSGNCDVVIGIVNNTVYDPLQPELDS

SEQ ID NO: 3015 - protein, 1147 aa, Artificial Sequence
  SARS-CoV-2/USA/WI-13/2020__EPI_ISL_417516 spike protein (1-1147)(I712C_T1077C)
MFVFLVLLPLVSSQCVNLTTRTQLPPAYTNSFTRGVYYPDKVFRSSVLHSTQDLFLPFFSNVTWFHAIHVSGTNGTKRFDNPVLPFNDGVYFASTEKSNIIRGWIFGTTLDSKTQSLLIVNNATNVVIKVCEFQFCNDPFLGVYYHKNNKSWMESEFRVYSSANNCTFEYVSQPFLMDLEGKQGNFKNLREFVFKNIDGYFKIYSKHTPINLVRDLPQGFSALEPLVDLPIGINITRFQTLLALHRSYLTPGDSSSGWTAGAAAYYVGYLQPRTFLLKYNENGTITDAVDCALDPLSETKCTLKSFTVEKGIYQTSNFRVLPTESIVRFPNITNLCPFGEVFNATRFASVYAWNRKRISNCVADYSVLYNSASFSTFKCYGVSPTKLNDLCFTNVYADSFVIRGDEVRQIAPGQTGKIADYNYKLPDDFTGCVIAWNSNNLDSKVGGNYNYLYRLFRKSNLKPFERDISTEIYQAGSTPCNGVEGFNCYFPLQSYGFQPTNGVGYQPYRVVVLSFELLHAPATVCGPKKSTNLVKNKCVNFNFNGLTGTGVLTESNKKFLPFQQFGRDIADTTDAVRDPQTLEILDITPCSFGGVSVITPGTNTSNQVAVLYQGVNCTEVPVAIHADQLTPTWRVYSTGSNVFQTRAGCLIGAEHVNNSYECDIPIGAGICASYQTQTNSPRRARSVASQSIIAYTMSLGAENSVAYSNNSCAIPTNFTISVTTEILPVSMTKTSVDCTMYICGDSTECSNLLLQYGSFCTQLNRALTGIAVEQDKNTQEVFAQVKQIYKTPPIKDFGGFNFSQILPDPSKPSKRSFIEDLLFNKVTLADAGFIKQYGDCLGDIAARDLICAQKFNGLTVLPPLLTDEMIAQYTSALLAGTITSGWTFGAGAALQIPFAMQMAYRFNGIGVTQNVLYENQKLIANQFNSAIGKIQDSLSSTASALGKLQDVVNQNAQALNTLVKQLSSNFGAISSVLNDILSRLDKVEAEVQIDRLITGRLQSLQTYVTQQLIRAAEIRASANLAATKMSECVLGQSKRVDFCGKGYHLMSFPQSAPHGVVFLHVTYVPAQEKNFTCAPAICHDGKAHFPREGVFVSNGTHWFVTQRNFYEPQIITTDNTFVSGNCDVVIGIVNNTVYDPLQPELDS

SEQ ID NO: 3016 - protein, 1146 aa, Artificial Sequence
  SARS-CoV-2/India/1-27/2020__EPI_ISL_413522 spike protein (1-1146)(I711C_T1076C)
MFVFLVLLPLVSSQCVNLTTRTQLPPAYTNSFTRGVYYPDKVFRSSVLHSTQDLFLPFFSNVTWFHAIHVSGTNGTKRFDNPVLPFNDGVYFASTEKSNIIRGWIFGTTLDSKTQSLLIVNNATNVVIKVCEFQFCNDPFLGVYHKNNKSWMESEFRVYSSANNCTFEYVSQPFLMDLEGKQGNFKNLREFVFKNIDGYFKIYSKHTPINLVRDLPQGFSALEPLVDLPIGINITRFQTLLALHRSYLTPGDSSSGWTAGAAAYYVGYLQPRTFLLKYNENGTITDAVDCALDPLSETKCTLKSFTVEKGIYQTSNFRVQPTESIVRFPNITNLCPFGEVFNATRFASVYAWNRKRISNCVADYSVLYNSASFSTFKCYGVSPTKLNDLCFTNVYADSFVIRGDEVIQIAPGQTGKIADYNYKLPDDFTGCVIAWNSNNLDSKVGGNYNYLYRLFRKSNLKPFERDISTEIYQAGSTPCNGVEGFNCYFPLQSYGFQPTNGVGYQPYRVVVLSFELLHAPATVCGPKKSTNLVKNKCVNFNFNGLTGTGVLTESNKKFLPFQQFGRDIADTTDAVRDPQTLEILDITPCSFGGVSVITPGTNTSNQVAVLYQDVNCTEVPVAIHADQLTPTWRVYSTGSNVFQTRAGCLIGAEHVNNSYECDIPIGAGICASYQTQTNSPRRARSVASQSIIAYTMSLGAENSVAYSNNSCAIPTNFTISVTTEILPVSMTKTSVDCTMYICGDSTECSNLLLQYGSFCTQLNRALTGIAVEQDKNTQEVFAQVKQIYKTPPIKDFGGFNFSQILPDPSKPSKRSFIEDLLFNKVTLADAGFIKQYGDCLGDIAARDLICAQKFNGLTVLPPLLTDEMIAQYTSALLAGTITSGWTFGAGAALQIPFAMQMAYRFNGIGVTQNVLYENQKLIANQFNSAIGKIQDSLSSTASALGKLQDVVNQNAQALNTLVKQLSSNFGAISSVLNDILSRLDKVEAEVQIDRLITGRLQSLQTYVTQQLIRAAEIRASANLAATKMSECVLGQSKRVDFCGKGYHLMSFPQSAPHGVVFLHVTYVPAQEKNFTCAPAICHDGKAHFPREGVFVSNGTHWFVTQRNFYEPQIITTDNTFVSGNCDVVIGIVNNTVYDPLQPELDS

SEQ ID NO: 3017 - protein, 1141 aa, Artificial Sequence
  SARS-CoV-2/pangolin/Guangxi/P4L/2017__EPI_ISL_410538 spike protein (1-1141)(I706C_T1071C)
MFVFLFVLPLVSSQCVNLTTRTGIPPGYTNSSTRGVYYPDKVFRSSILHLTQDLFLPFFSNVTWFNTINYQGGFKKFDNPVLPFNDGVYFASTEKSNIIRGWIFGTTLDARTQSLLIVNNATNVVIKVCEFQFCTDPFLGVYYHNNNKTWVENEFRVYSSANNCTFEYISQPFLMDLEGKQGNFKNLREFVFKNVDGYFKIYSKHTPIDLVRDLPRGFAALEPLVDLPIGINITRFQTLLALHRSYLTPGNLESGWTTGAAAYYVGYLQQRTFLLSYNQNGTITDAVDCSLDPLSETKCTLKSLTVEKGIYQTSNFRVQPTISIVRFPNITNLCPFGEVFNASKFASVYAWNRKRISNCVADYSVLYNSTSFSTFKCYGVSPTKLNDLCFTNVYADSFVVKGDEVRQIAPGQTGVIADYNYKLPDDFTGCVIAWNSVKQDALTGGNYGYLYRLFRKSKLKPFERDISTEIYQAGSTPCNGQVGLNCYYPLERYGFHPTTGVNYQPFRVVVLSFELLNGPATVCGPKLSTTLVKDKCVNFNFNGLTGTGVLTTSKKQFLPFQQFGRDISDTTDAVRDPQTLEILDITPCSFGGVSVITPGTNTSNQVAVLYQDVNCTEVPMAIHAEQLTPAWRVYSAGANVFQTRAGCLVGAEHVNNSYECDIPVGAGICASYHSMSSLRSVNQRSIIAYTMSLGAENSVAYSNNSCAIPTNFTISVTTEILPVSMTKTSVDCTMYICGDSIECSNLLLQYGSFCTQLNRALTGIAVEQDKNTQEVFAQVKQIYKTPPIKDFGGFNFSQILPDPSKPSKRSFIEDLLFNKVTLADAGFIKQYGDCLGDIAARDLICAQKFNGLTVLPPLLTDEMIAQYTSALLAGTITSGWTFGAGAALQIPFAMQMAYRFNGIGVTQNVLYENQKLIANQFNSAIGKIQDSLSSTASALGKLQDVVNQNAQALNTLVKQLSSNFGAISSVLNDILSRLDKVEAEVQIDRLITGRLQSLQTYVTQQLIRAAEIRASANLAATKMSECVLGQSKRVDFCGKGYHLMSFPQSAPHGVVFLHVTYVPAQEKNFTCAPAICHEGKAHFPREGVFVSNGTHWFITQRNFYEPQIITTDNTFVSGSCDVVIGIVNNTVYDPLQPELDS

SEQ ID NO: 3018 - protein, 1141 aa, Artificial Sequence
  SARS-CoV-2/pangolin/Guangxi/P5L/2017__EPI_ISL_410540 spike protein (1-1141)(I706C_T1071C)
MFVFLFVLPLVSSQCVNLTTRTGIPPGYTNSSTRGVYYPDKVFRSSILHLTQDLFLPFFSNVTWFNTINYQGGFKKFDNPVLPFNDGVYFASTEKSNIIRGWIFGTTLDARTQSLLIVNNATNVVIKVCEFQFCTDPFLGVYYHNNNKTWVENEFRVYSSANNCTFEYISQPFLMDLEGKQGNFKNLREFVFKNVDGYFKIYSKHTPIDLVRDLPRGFAALEPLVDLPIGINITRFQTLLALHRSYLTPGKLESGWTTGAAAYYVGYLQQRTFLLSYNQNGTITDAVDCSLDPLSETKCTLKSLTVEKGIYQTSNFRVQPTISIVRFPNITNLCPFGEVFNASKFASVYAWNRKRISNCVADYSVLYNSTSFSTFKCYGVSPTKLNDLCFTNVYADSFVVKGDEVRQIAPGQTGVIADYNYKLPDDFTGCVIAWNSVKQDALTGGNYGYLYRLFRKSKLKPFERDISTEIYQAGSTPCNGQVGLNCYYPLERYGFHPTTGVNYQPFRVVVLSFELLNGPATVCGPKLSTTLVKDKCVNFNFNGLTGTGVLTTSKKQFLPFQQFGRDISDTTDAVRDPQTLEILDITPCSFGGVSVITPGTNTSNQVAVLYQDVNCTEVPMAIHAEQLTPAWRVYSAGANVFQTRAGCLVGAEHVNNSYECDIPVGAGICASYHSMSSFRSVNQRSIIAYTMSLGAENSVAYSNNSCAIPTNFTISVTTEILPVSMTKTSVDCTMYICGDSIECSNLLLQYGSFCTQLNRALTGIAVEQDKNTQEVFAQVKQIYKTPPIKDFGGFNFSQILPDPSKPSKRSFIEDLLFNKVTLADAGFIKQYGDCLGDIAARDLICAQKFNGLTVLPPLLTDEMIAQYTSALLAGTITSGWTFGAGAALQIPFAMQMAYRFNGIGVTQNVLYENQKLIANQFNSAIGKIQDSLSSTASALGKLQDVVNQNAQALNTLVKQLSSNFGAISSVLNDILSRLDKVEAEVQIDRLITGRLQSLQTYVTQQLIRAAEIRASANLAATKMSECVLGQSKRVDFCGKGYHLMSFPQSAPHGVVFLHVTYVPAQEKNFTCAPAICHEGKAHFPREGVFVSNGTHWFITQRNFYEPQIITTDNTFVSGSCDVVIGIVNNTVYDPLQPELDS

SEQ ID NO: 3019 - protein, 1141 aa, Artificial Sequence
  SARS-CoV-2/pangolin/Guangxi/P5E/2017__EPI_ISL_410541 spike protein (1-1141)(I706C_T1071C)
MFVFLFVLPLVSSQCVNLTTRTGIPPGYTNSSTRGVYYPDKVFRSSILHLTQDLFLPFFSNVTWFNTITYQGGSKKFDNPVLPFNDGVYFASTEKSNIIRGWIFGTTLDARTQSLLIVNNATNVVIKVCEFQFCTDPFLGVYYHNNNKTWVENEFRVYSSANNCTFEYISQPFLMDLEGKQGNFKNLREFVFKNVDGYFKIYSKHTPIDLVRDLPRGFAALEPLVDLPIGINITRFQTLLALHRSYLTPGKLESGWTTGAAAYYVGYLQQRTFLLSYNQNGTITDAVDCSLDPLSETKCTLKSLTVEKGIYQTSNFRVQPTISIVRFPNITNLCPFGEVFNASKFASVYAWNRKRISNCVADYSVLYNSTSFSTFKCYGVSPTKLNDLCFTNVYADSFVVKGDEVRQIAPGQTGVIADYNYKLPDDFTGCVIAWNSVKQDALTGDNYGYLYRLFRKSKLKPFERDISTEIYQAGSTPCNGQVGLNCYYPLERYGFHPTTGVNYQPFRVVVLSFELLNGPATVCGPKLSTTLVKDKCVNFNFNGLTGTGVLTTSKKQFLPFQQFGRDISDTTDAVRDPQTLEILDITPCSFGGVSVITPGTNTSNQVAVLYQDVNCTEVPMAIHAEQLTPAWRVYSAGANVFQTRAGCLVGAEHVNNSYECDIPVGAGICASYHSMSSFRSVNQRSIIAYTMSLGAENSVAYSNNSCAIPTNFTISVTTEILPVSMTKTSVDCTMYICGDSIECSNLLLQYGSFCTQLNRALTGIAVEQDKNTQEVFAQVKQIYKTPPIKDFGGFNFSQILPDPSKPSKRSFIEDLLFNKVTLADAGFIKQYGDCLGDIAARDLICAQKFNGLTVLPPLLTDEMIAQYTSALLAGTITSGWTFGAGAALQIPFAMQMAYRFNGIGVTQNVLYENQKLIANQFNSAIGKIQDSLSSTASALGKLQDVVNQNAQALNTLVKQLSSNFGAISSVLNDILSRLDKVEAEVQIDRLITGRLQSLQTYVTQQLIRAAEIRASANLAATKMSECVLGQSKRVDFCGKGYHLMSFPQSAPHGVVFLHVTYVPAQEKNFTCAPAICHEGKAHFPREGVFVSNGTHWFITQRNFYEPQIITTDNTFVSGSCDVVIGIVNNTVYDPLQPELDS

SEQ ID NO: 3020 - protein, 1139 aa, Artificial Sequence
  SARS-CoV-2/pangolin/Guangxi/P1E/2017__EPI_ISL_410539 spike protein (1-1139)(I704C_T1069C)
MFVFLFVLPLVSSQCVNLTTRTGIQPGYTNSSTRGVYYPDKVFRSSILHLTQDLFLPFFSNVTWFNTINYQGGFKKFDNPVLPFNDGVYFASTEKSNIIRGWIFGTTLDARTQSLLIVNNATNVVIKVCEFQFCTDPFLGVYYHNNNKTWVENEFRVYSSANNCTFEYISQPFLMDLEGKQGNFKNLREFVFKNVDGYFKIYSKHTPIDLVRDLPRGFAALEPLVDLPIGINITRFQTLLALHRSYLTPGKLESGWTTGAAAYYVGYLQQRTFLLSYNQNGTITDAVDCSLDPLSETKCTLKSLTVEKGIYQTSNFRVQPTISIVRFPNITNLCPFGEVFNASKFASVYAWNRKRISNCVADYSVLYNSTSFSTFKCYGVSPTKLNDLCFTNVYADSFVVKGDEVRQIAPGQTGVIADYNYKLPDDFTGCVIAWNSVKQDALTGGNYLYRLFRKSKLKPFERDISTEIYQAGSTPCNGQVGLNCYYPLERYGFHPTTGVNYQPFRVVVLSFELLNGPATVCGPKLSTTLVKDKCVNFNFNGLTGTGVLTTSKKQFLPFQQFGRDISDTTDAVRDPQTLEILDITPCSFGGVSVITPGTNTSNQVAVLYQDVNCTEVPMAIHAEQLTPAWRVYSAGANVFQTRAGCLVGAEHVNNSYECDIPVGAGICASYHSMSSLRSVNQRSIIAYTMSLGAENSVAYSNNSCAIPTNFTISVTTEILPVSMTKTSVDCTMYICGDSIECSNLLLQYGSFCTQLNRALTGIAVEQDKNTQEVFAQVKQIYKTPPIKDFGGFNFSQILPDPSKPSKRSFIEDLLFNKVTLADAGFIKQYGDCLGDIAARDLICAQKFNGLTVLPPLLTDEMIAQYTSALLAGTITSGWTFGAGAALQIPFAMQMAYRFNGIGVTQNVLYENQKLIANQFNSAIGKIQDSLSSTASALGKLQDVVNQNAQALNTLVKQLSSNFGAISSVLNDILSRLDKVEAEVQIDRLITGRLQSLQTYVTQQLIRAAEIRASANLAATKMSECVLGQSKRVDFCGKGYHLMSFPQSAPHGVVFLHVTYVPAQEKNFTCAPAICHEGKAHFPREGVFVSNGTHWFITQRNFYEPQIITTDNTFVSGSCDVVIGIVNNTVYDPLQPELDS

SEQ ID NO: 3021 - protein, 1147 aa, Artificial Sequence
  SARS-CoV-2/Wuhan/WIV05/2019__EPI_ISL_402128 spike protein (1-1147)(I714C_Y1110C)
MFVFLVLLPLVSSQCVNLTTRTQLPPAYTNSFTRGVYYPDKVFRSSVLHSTQDLFLPFFSNVTWFHAIHVSGTNGTKRFDNPVLPFNDGVYFASTEKSNIIRGWIFGTTLDSKTQSLLIVNNATNVVIKVCEFQFCNDPFLGVYYHKNNKSWMESEFRVYSSANNCTFEYVSQPFLMDLEGKQGNFKNLREFVFKNIDGYFKIYSKHTPINLVRDLPQGFSALEPLVDLPIGINITRFQTLLALHRSYLTPGDSSSGWTAGAAAYYVGYLQPRTFLLKYNENGTITDAVDCALDPLSETKCTLKSFTVEKGIYQTSNFRVQPTESIVRFPNITNLCPFGEVFNATRFASVYAWNRKRISNCVADYSVLYNSASFSTFKCYGVSPTKLNDLCFTNVYADSFVIRGDEVRQIAPGQTGKIADYNYKLPDDFTGCVIAWNSNNLDSKVGGNYNYLYRLFRKSNLKPFERDISTEIYQAGSTPCNGVEGFNCYFPLQSYGFQPTNGVGYQPYRVVVLSFELLHAPATVCGPKKSTNLVKNKCVNFNFNGLTGTGVLTESNKKFLPFQQFGRDIADTTDAVRDPQTLEILDITPCSFGGVSVITPGTNTSNQVAVLYQDVNCTEVPVAIHADQLTPTWRVYSTGSNVFQTRAGCLIGAEHVNNSYECDIPIGAGICASYQTQTNSPRRARSVASQSIIAYTMSLGAENSVAYSNNSIACPTNFTISVTTEILPVSMTKTSVDCTMYICGDSTECSNLLLQYGSFCTQLNRALTGIAVEQDKNTQEVFAQVKQIYKTPPIKDFGGFNFSQILPDPSKPSKRSFIEDLLFNKVTLADAGFIKQYGDCLGDIAARDLICAQKFNGLTVLPPLLTDEMIAQYTSALLAGTITSGWTFGAGAALQIPFAMQMAYRFNGIGVTQNVLYENQKLIANQFNSAIGKIQDSLSSTASALGKLQDVVNQNAQALNTLVKQLSSNFGAISSVLNDILSRLDKVEAEVQIDRLITGRLQSLQTYVTQQLIRAAEIRASANLAATKMSECVLGQSKRVDFCGKGYHLMSFPQSAPHGVVFLHVTYVPAQEKNFTTAPAICHDGKAHFPREGVFVSNGTHWFVTQRNFCEPQIITTDNTFVSGNCDVVIGIVNNTVYDPLQPELDS

SEQ ID NO: 3022 - protein, 1143 aa, Artificial Sequence
  SARS-CoV-2/bat/Yunnan/RaTG13/2013__EPI_ISL_402131 spike protein (1-1143)(I710C_Y1106C)
MFVFLVLLPLVSSQCVNLTTRTQLPPAYTNSSTRGVYYPDKVFRSSVLHLTQDLFLPFFSNVTWFHAIHVSGTNGIKRFDNPVLPFNDGVYFASTEKSNIIRGWIFGTTLDSKTQSLLIVNNATNVVIKVCEFQFCNDPFLGVYYHKNNKSWMESEFRVYSSANNCTFEYVSQPFLMDLEGKQGNFKNLREFVFKNIDGYFKIYSKHTPINLVRDLPPGFSALEPLVDLPIGINITRFQTLLALHRSYLTPGDSSSGWTAGAAAYYVGYLQPRTFLLKYNENGTITDAVDCALDPLSETKCTLKSFTVEKGIYQTSNFRVQPTDSIVRFPNITNLCPFGEVFNATTFASVYAWNRKRISNCVADYSVLYNSTSFSTFKCYGVSPTKLNDLCFTNVYADSFVITGDEVRQIAPGQTGKIADYNYKLPDDFTGCVIAWNSKHIDAKEGGNFNYLYRLFRKANLKPFERDISTEIYQAGSKPCNGQTGLNCYYPLYRYGFYPTDGVGHQPYRVVVLSFELLNAPATVCGPKKSTNLVKNKCVNFNFNGLTGTGVLTESNKKFLPFQQFGRDIADTTDAVRDPQTLEILDITPCSFGGVSVITPGTNASNQVAVLYQDVNCTEVPVAIHADQLTPTWRVYSTGSNVFQTRAGCLIGAEHVNNSYECDIPIGAGICASYQTQTNSRSVASQSIIAYTMSLGAENSVAYSNNSIACPTNFTISVTTEILPVSMTKTSVDCTMYICGDSTECSNLLLQYGSFCTQLNRALTGIAVEQDKNTQEVFAQVKQIYKTPPIKDFGGFNFSQILPDPSKPSKRSFIEDLLFNKVTLADAGFIKQYGDCLGDIAARDLICAQKFNGLTVLPPLLTDEMIAQYTSALLAGTITSGWTFGAGAALQIPFAMQMAYRFNGIGVTQNVLYENQKLIANQFNSAIGKIQDSLSSTASALGKLQDVVNQNAQALNTLVKQLSSNFGAISSVLNDILSRLDKVEAEVQIDRLITGRLQSLQTYVTQQLIRAAEIRASANLAATKMSECVLGQSKRVDFCGKGYHLMSFPQSAPHGVVFLHVTYVPAQEKNFTTAPAICHDGKAHFPREGVFVSNGTHWFVTQRNFCEPQIITTDNTFVSGSCDVVIGIVNNTVYDPLQPELDS

SEQ ID NO: 3023 - protein, 1147 aa, Artificial Sequence
  SARS-CoV-2/Wuhan/HBCDC-HB-01/2019__EPI_ISL_402132 spike protein (1-1147)(I714C_Y1110C)
MFVFLVLLPLVSSQCVNLTTRTQLPPAYTNSITRGVYYPDKVFRSSVLHSTQDLFLPFFSNVTWFHAIHVSGTNGTKRFDNPVLPFNDGVYFASTEKSNIIRGWIFGTTLDSKTQSLLIVNNATNVVIKVCEFQFCNDPFLGVYYHKNNKSWMESEFRVYSSANNCTFEYVSQPFLMDLEGKQGNFKNLREFVFKNIDGYFKIYSKHTPINLVRDLPQGFSALEPLVDLPIGINITRFQTLLALHRSYLTPGDSSSGWTAGAAAYYVGYLQPRTFLLKYNENGTITDAVDCALDPLSETKCTLKSFTVEKGIYQTSNFRVQPTESIVRFPNITNLCPFGEVFNATRFASVYAWNRKRISNCVADYSVLYNSASFSTFKCYGVSPTKLNDLCFTNVYADSFVIRGDEVRQIAPGQTGKIADYNYKLPDDFTGCVIAWNSNNLDSKVGGNYNYLYRLFRKSNLKPFERDISTEIYQAGSTPCNGVEGFNCYFPLQSYGFQPTNGVGYQPYRVVVLSFELLHAPATVCGPKKSTNLVKNKCVNFNFNGLTGTGVLTESNKKFLPFQQFGRDIADTTDAVRDPQTLEILDITPCSFGGVSVITPGTNTSNQVAVLYQDVNCTEVPVAIHADQLTPTWRVYSTGSNVFQTRAGCLIGAEHVNNSYECDIPIGAGICASYQTQTNSPRRARSVASQSIIAYTMSLGAENSVAYSNNSIACPTNFTISVTTEILPVSMTKTSVDCTMYICGDSTECSNLLLQYGSFCTQLNRALTGIAVEQDKNTQEVFAQVKQIYKTPPIKDFGGFNFSQILPDPSKPSKRSFIEDLLFNKVTLADAGFIKQYGDCLGDIAARDLICAQKFNGLTVLPPLLTDEMIAQYTSALLAGTITSGWTFGAGAALQIPFAMQMAYRFNGIGVTQNVLYENQKLIANQFNSAIGKIQDSLSSTASALGKLQDVVNQNAQALNTLVKQLSSNFGAISSVLNDILSRLDKVEAEVQIDRLITGRLQSLQTYVTQQLIRAAEIRASANLAATKMSECVLGQSKRVDFCGKGYHLMSFPQSAPHGVVFLHVTYVPAQEKNFTTAPAICHDGKAHFPREGVFVSNGTHWFVTQRNFCEPQIITTDNTFVSGNCDVVIGIVNNTVYDPLQPELDS

SEQ ID NO: 3024 - protein, 1147 aa, Artificial Sequence
  SARS-CoV-2/Guangdong/20SF028/2020__EPI_ISL_403936 spike protein (1-1147)(I714C_Y1110C)
MFVFLVLLPLVSSQCVNLTTRTQLPPAYTNSFTRGVYYPDKVFRSSVLYSTQDLFLPFFSNVTWFHAIHVSGTNGTKRFDNPVLPFNDGVYFASTEKSNIIRGWIFGTTLDSKTQSLLIVNNATNVVIKVCEFQFCNDPFLGVYYHKNNKSWMESEFRVYSSANNCTFEYVSQPFLMDLEGKQGNFKNLREFVFKNIDGYFKIYSKHTPINLVRDLPQGFSALEPLVDLPIGINITRFQTLLALHRSYLTPGDSSSGWTAGAAAYYVGYLQPRTFLLKYNENGTITDAVDCALDPLSETKCTLKSFTVEKGIYQTSNFRVQPTESIVRFPNITNLCPFGEVFNATRFASVYAWNRKRISNCVADYSVLYNSASFSTFKCYGVSPTKLNDLCFTNVYADSFVIRGDEVRQIAPGQTGKIADYNYKLPDDFTGCVIAWNSNNLDSKVGGNYNYLYRLFRKSNLKPFERDISTEIYQAGSTPCNGVEGFNCYFPLQSYGFQPTNGVGYQPYRVVVLSFELLHAPATVCGPKKSTNLVKNKCVNFNFNGLTGTGVLTESNKKFLPFQQFGRDIADTTDAVRDPQTLEILDITPCSFGGVSVITPGTNTSNQVAVLYQDVNCTEVPVAIHADQLTPTWRVYSTGSNVFQTRAGCLIGAEHVNNSYECDIPIGAGICASYQTQTNSPRRARSVASQSIIAYTMSLGAENSVAYSNNSIACPTNFTISVTTEILPVSMTKTSVDCTMYICGDSTECSNLLLQYGSFCTQLNRALTGIAVEQDKNTQEVFAQVKQIYKTPPIKDFGGFNFSQILPDPSKPSKRSFIEDLLFNKVTLADAGFIKQYGDCLGDIAARDLICAQKFNGLTVLPPLLTDEMIAQYTSALLAGTITSGWTFGAGAALQIPFAMQMAYRFNGIGVTQNVLYENQKLIANQFNSAIGKIQDSLSSTASALGKLQDVVNQNAQALNTLVKQLSSNFGAISSVLNDILSRLDKVEAEVQIDRLITGRLQSLQTYVTQQLIRAAEIRASANLAATKMSECVLGQSKRVDFCGKGYHLMSFPQSAPHGVVFLHVTYVPAQEKNFTTAPAICHDGKAHFPREGVFVSNGTHWFVTQRNFCEPQIITTDNTFVSGNCDVVIGIVNNTVYDPLQPELDS

SEQ ID NO: 3025 - protein, 1147 aa, Artificial Sequence
  SARS-CoV-2/Shenzhen/SZTH-001/2020__EPI_ISL_406592 spike protein (1-1147)(I714C_Y1110C)
MFVFLVLLPLVSSQCVNLTTRTQLPPAYTNSFTRGVYYPDKVFRSSVLHSTQDLFLPFFSNVTWFHAIHVSGTNGTKRFDNPVLPFNDGVYFASTEKSNIIRGWIFGTTLDSKTQSLLIVNNATNVVIKVCEFQFCNDPFLGVYYHKNNKSWMESEFRVYSSANNCTFEYVSQPFLMDLEGKQGNFKNLREFVFKNIDGYFKIYSKHTPINLVRDLPQGFSALEPLVDLPIGINITRFQTLLALHRSYLTPGDSSSGWTAGAAAYYVGYLQPRTFLLKYNENGTITDAVDCALDPLSETKCTLKSFTVEKGIYQTSNFRVQPTESIVRFPNITNLCPFGEVFNATRFASVYAWNRKRISNCVADYSVLYNSASFSTFKCYGVSPTKLNDLCFTNVYADSFVIRGDEVRQIAPGQTGKIADYNYKLPDDFTGCVIAWNSNNLDSKVGGNYNYLYRLFRKSNLKPFERDISTEIYQAGSTPCNGVEGFNCYFPLQSYGFQPTNGVGYQPYRVVVLSFELLHAPATVCGPKKSTNLVKNKCVNFNFNGLTGTGVLTESNKKFLPFQQFGRDIADTTDAVRDPQTLEILDITPCSFGGVSVITPGTNTSNQVAVLYQDVNCTEVPVAIHADQLTPTWRVYSTGSNVFQTRAGCLIGAEHVNNSYECDIPIGAGICASYQTQTNSPRRARSVASQSIIAYTMSLGAENSVAYSNNSIACPTNFTISVTTEILPVSMTKTSVDCTMYICGDSTECSNLLLQYGSFCTQLNRALTGIAVEQDKNTQEVFAQVKQIYKTPPIKDFGGFNFSQILPDPSKPSKRSFIEDLLFNKVTLADAGFIKQYGDCLGDIAARDLICAQKFNGLTVLPPLLTDEMIAQYTSALLAGTITSGWTFGAGAALQIPFAMQMAYRFNGIGVTQNVLYENQKLIANQFNSAIGKIQDSLSSTASALGKLQDVVNQNAQALNTLVKQLSSNFGAISSVLNDILSRLDKVEAEVQIDRLITGRLQSLQTYVTQQLIRAAEIRASANLAATKMSECVLGQSKRVDFCGKGYHLMSFPQSAPHGVVFLHVTYVPAQEKNFTTAPAICHDGKAHFPREGVFVSNGTHWFVTQRNFCEPQIITTDNTFVSGNCDVLIGIVNNTVYDPLQPELDS

SEQ ID NO: 3026 - protein, 1147 aa, Artificial Sequence
  SARS-CoV-2/Shenzhen/SZTH-004/2020__EPI_ISL_406595 spike protein (1-1147)(I714C_Y1110C)
MFVFLVLLPLVSSQCVNLTTRTQLPPAYTNSFTRGVYYPDKVFRSSVLHSTQDLFLPFFSNVTWFHAIHVSGTNGTKRFDNPVLPFNDGVYFASTEKSNIIRGWIFGTTLDSKTQSLLIVNNATNVVIKVCEFQFCNDPFLGVYYHKNNKSWMESEFRVYSSANNCTFEYVSQPFLMDLEGKQGNFKNLREFVFKNIDGYFKIYSKHTPINLVRDLPQGFSALEPLVDLPIGINITRFQTLLALHRSYLTPGDSSSGWTAGAAAYYVGYLQPRTFLLKYNENGTITDAVDCALDPLSETKCTLKSFTVEKGIYQTSNFRVQPTESIVRFPNITNLCPFGEVFNATRFASVYAWDRKRISNCVAYYSVLYNSASFSTFKCYGVSPTKLNDLCFTNVYADSFVIRGDEVRQIAPGQTGKIADYNYKLPDDFTGCVIAWNSNNLDSKVGGNYNYLYRLFRKSNLKPFERDISTEIYQAGSTPCNGVEGFNCYFPLQSYGFQPTNGVGYQPYRVVVLSFELLHAPATVCGPKKSTNLVKNKCVNFNFNGLTGTGVLTESNKKFLPFQQFGRDIADTTDAVRDPQTLEILDITPCSFGGVSVITPGTNTSNQVAVLYQDVNCTEVPVAIHADQLTPTWRVYSTGSNVFQTRAGCLIGAEHVNNSYECDIPIGAGICASYQTQTNSPRRARSVASQSIIAYTMSLGAENSVAYSNNSIACPTNFTISVTTEILPVSMTKTSVDCTMYICGDSTECSNLLLQYGSFCTQLNRALTGIAVEQDKNTQEVFAQVKQIYKTPPIKDFGGFNFSQILPDPSKPSKRSFIEDLLFNKVTLADAGFIKQYGDCLGDIAARDLICAQKFNGLTVLPPLLTDEMIAQYTSALLAGTITSGWTFGAGAALQIPFAMQMAYRFNGIGVTQNVLYENQKLIANQFNSAIGKIQDSLSSTASALGKLQDVVNQNAQALNTLVKQLSSNFGAISSVLNDILSRLDKVEAEVQIDRLITGRLQSLQTYVTQQLIRAAEIRASANLAATKMSECVLGQSKRVDFCGKGYHLMSFPQSAPHGVVFLHVTYVPAQEKNFTTAPAICHDGKAHFPREGVFVSNGTHWFVTQRNFCEPQIITTDNTFVSGNCDVVIGIVNNTVYDPLQPELDS

SEQ ID NO: 3027 - protein, 1147 aa, Artificial Sequence
  SARS-CoV-2/France/IDF0372/2020__EPI_ISL_406596 spike protein (1-1147)(I714C_Y1110C)
MFVFLVLLPLVSSQCVNLTTRTQLPPAYTNSFTRGVYYPDKVFRSSVLHSTQDLFLPFFSNVTWFHAIHVSGTNGTKRFDNPVLPFNDGVYFASTEKSNIIRGWIFGTTLDSKTQSLLIVNNATNVVIKVCEFQFCNDPFLGVYYHKNNKSWMESEFRVYSSANNCTFEYVSQPFLMDLEGKQGNFKNLREFVFKNIDGYFKIYSKHTPINLVRDLPQGFSALEPLVDLPIGINITRFQTLLALHRSYLTPGDSSSGWTAGAAAYYVGYLQPRTFLLKYNENGTITDAVDCALDPLSETKCTLKSFTVEKGIYQTSNFRVQPTESIVRFPNITNLCPFGEVFNATRFASVYAWNRKRISNCVADYSFLYNSASFSTFKCYGVSPTKLNDLCFTNVYADSFVIRGDEVRQIAPGQTGKIADYNYKLPDDFTGCVIAWNSNNLDSKVGGNYNYLYRLFRKSNLKPFERDISTEIYQAGSTPCNGVEGFNCYFPLQSYGFQPTNGVGYQPYRVVVLSFELLHAPATVCGPKKSTNLVKNKCVNFNFNGLTGTGVLTESNKKFLPFQQFGRDIADTTDAVRDPQTLEILDITPCSFGGVSVITPGTNTSNQVAVLYQDVNCTEVPVAIHADQLTPTWRVYSTGSNVFQTRAGCLIGAEHVNNSYECDIPIGAGICASYQTQTNSPRRARSVASQSIIAYTMSLGAENSVAYSNNSIACPTNFTISVTTEILPVSMTKTSVDCTMYICGDSTECSNLLLQYGSFCTQLNRALTGIAVEQDKNTQEVFAQVKQIYKTPPIKDFGGFNFSQILPDPSKPSKRSFIEDLLFNKVTLADAGFIKQYGDCLGDIAARDLICAQKFNGLTVLPPLLTDEMIAQYTSALLAGTITSGWTFGAGAALQIPFAMQMAYRFNGIGVTQNVLYENQKLIANQFNSAIGKIQDSLSSTASALGKLQDVVNQNAQALNTLVKQLSSNFGAISSVLNDILSRLDKVEAEVQIDRLITGRLQSLQTYVTQQLIRAAEIRASANLAATKMSECVLGQSKRVDFCGKGYHLMSFPQSAPHGVVFLHVTYVPAQEKNFTTAPAICHDGKAHFPREGVFVSNGTHWFVTQRNFCEPQIITTDNTFVSGNCDVVIGIVNNTVYDPLQPELDS

SEQ ID NO: 3028 - protein, 1147 aa, Artificial Sequence
  SARS-CoV-2/Australia/VIC01/2020__EPI_ISL_406844 spike protein (1-1147)(I714C_Y1110C)
MFVFLVLLPLVSSQCVNLTTRTQLPPAYTNSFTRGVYYPDKVFRSSVLHSTQDLFLPFFSNVTWFHAIHVSGTNGTKRFDNPVLPFNDGVYFASTEKSNIIRGWIFGTTLDSKTQSLLIVNNATNVVIKVCEFQFCNDPFLGVYYHKNNKSWMESEFRVYSSANNCTFEYVSQPFLMDLEGKQGNFKNLREFVFKNIDGYFKIYSKHTPINLVRDLPQGFSALEPLVDLPIGINITRFQTLLALHRRYLTPGDSSSGWTAGAAAYYVGYLQPRTFLLKYNENGTITDAVDCALDPLSETKCTLKSFTVEKGIYQTSNFRVQPTESIVRFPNITNLCPFGEVFNATRFASVYAWNRKRISNCVADYSVLYNSASFSTFKCYGVSPTKLNDLCFTNVYADSFVIRGDEVRQIAPGQTGKIADYNYKLPDDFTGCVIAWNSNNLDSKVGGNYNYLYRLFRKSNLKPFERDISTEIYQAGSTPCNGVEGFNCYFPLQSYGFQPTNGVGYQPYRVVVLSFELLHAPATVCGPKKSTNLVKNKCVNFNFNGLTGTGVLTESNKKFLPFQQFGRDIADTTDAVRDPQTLEILDITPCSFGGVSVITPGTNTSNQVAVLYQDVNCTEVPVAIHADQLTPTWRVYSTGSNVFQTRAGCLIGAEHVNNSYECDIPIGAGICASYQTQTNSPRRARSVASQSIIAYTMSLGAENSVAYSNNSIACPTNFTISVTTEILPVSMTKTSVDCTMYICGDSTECSNLLLQYGSFCTQLNRALTGIAVEQDKNTQEVFAQVKQIYKTPPIKDFGGFNFSQILPDPSKPSKRSFIEDLLFNKVTLADAGFIKQYGDCLGDIAARDLICAQKFNGLTVLPPLLTDEMIAQYTSALLAGTITSGWTFGAGAALQIPFAMQMAYRFNGIGVTQNVLYENQKLIANQFNSAIGKIQDSLSSTASALGKLQDVVNQNAQALNTLVKQLSSNFGAISSVLNDILSRLDKVEAEVQIDRLITGRLQSLQTYVTQQLIRAAEIRASANLAATKMSECVLGQSKRVDFCGKGYHLMSFPQSAPHGVVFLHVTYVPAQEKNFTTAPAICHDGKAHFPREGVFVSNGTHWFVTQRNFCEPQIITTDNTFVSGNCDVVIGIVNNTVYDPLQPELDS

SEQ ID NO: 3029 - protein, 1147 aa, Artificial Sequence
  SARS-CoV-2/Germany/BavPat1/2020__EPI_ISL_406862 spike protein (1-1147)(I714C_Y1110C)
MFVFLVLLPLVSSQCVNLTTRTQLPPAYTNSFTRGVYYPDKVFRSSVLHSTQDLFLPFFSNVTWFHAIHVSGTNGTKRFDNPVLPFNDGVYFASTEKSNIIRGWIFGTTLDSKTQSLLIVNNATNVVIKVCEFQFCNDPFLGVYYHKNNKSWMESEFRVYSSANNCTFEYVSQPFLMDLEGKQGNFKNLREFVFKNIDGYFKIYSKHTPINLVRDLPQGFSALEPLVDLPIGINITRFQTLLALHRSYLTPGDSSSGWTAGAAAYYVGYLQPRTFLLKYNENGTITDAVDCALDPLSETKCTLKSFTVEKGIYQTSNFRVQPTESIVRFPNITNLCPFGEVFNATRFASVYAWNRKRISNCVADYSVLYNSASFSTFKCYGVSPTKLNDLCFTNVYADSFVIRGDEVRQIAPGQTGKIADYNYKLPDDFTGCVIAWNSNNLDSKVGGNYNYLYRLFRKSNLKPFERDISTEIYQAGSTPCNGVEGFNCYFPLQSYGFQPTNGVGYQPYRVVVLSFELLHAPATVCGPKKSTNLVKNKCVNFNFNGLTGTGVLTESNKKFLPFQQFGRDIADTTDAVRDPQTLEILDITPCSFGGVSVITPGTNTSNQVAVLYQGVNCTEVPVAIHADQLTPTWRVYSTGSNVFQTRAGCLIGAEHVNNSYECDIPIGAGICASYQTQTNSPRRARSVASQSIIAYTMSLGAENSVAYSNNSIACPTNFTISVTTEILPVSMTKTSVDCTMYICGDSTECSNLLLQYGSFCTQLNRALTGIAVEQDKNTQEVFAQVKQIYKTPPIKDFGGFNFSQILPDPSKPSKRSFIEDLLFNKVTLADAGFIKQYGDCLGDIAARDLICAQKFNGLTVLPPLLTDEMIAQYTSALLAGTITSGWTFGAGAALQIPFAMQMAYRFNGIGVTQNVLYENQKLIANQFNSAIGKIQDSLSSTASALGKLQDVVNQNAQALNTLVKQLSSNFGAISSVLNDILSRLDKVEAEVQIDRLITGRLQSLQTYVTQQLIRAAEIRASANLAATKMSECVLGQSKRVDFCGKGYHLMSFPQSAPHGVVFLHVTYVPAQEKNFTTAPAICHDGKAHFPREGVFVSNGTHWFVTQRNFCEPQIITTDNTFVSGNCDVVIGIVNNTVYDPLQPELDS

SEQ ID NO: 3030 - protein, 1147 aa, Artificial Sequence
  SARS-CoV-2/Wuhan/HBCDC-HB-02/2020__EPI_ISL_412978 spike protein (1-1147)(I714C_Y1110C)
MFVFLVLLPLVSSQCVNLTTRTQLPPAYTNSFTRGVYYPDKVFRSSVLHSTQDLFLPFFSNVTWFHAIHVSGTNGTKRFDNPVLPFNDGVYFASTEKSNIIRGWIFGTTLDSKTQSLLIVNNATNVVIKVCEFQFCNDPFLGVYYHKNNKSWMESEFRVYSSANNCTFEYVSQPFLMDLEGKQGNFKNLREFVFKNIDGYFKIYSKHTPINLVRDLPQGFSALEPLVDLPIGINITRFQTLLALHRSYLTPGDSSSGWTAGAAAYYVGYLQPRTFLLKYNENGTITDAVDCALDPLSETKCTLKSFTVEKGIYQTSNFRVQPTESIVRFPNITNLCPFGEVFNATRFASVYAWNRKRISNCVADYSVLYNSASFSTFKCYGVSPTKLNDLCFTNVYADSFVIRGDEVRQIAPGQTGKIADYNYKLPDDFTGCVIAWNSNNLDSKVGGNYNYLYRLFRKSNLKPFERDISTEIYQAGSTPCNGVEGFNCYFPLQSYGFQPTNGVGYQPYRVVVLSFELLHAPATVCGPKKSTNLVKNKCVNFNFNGLTGTGVLTESNKKFLPFQQFGRDIADTTDAVRDPQTLEILDITPCSFGGVSVITPGTNTSNQVAVLYQDVNCTEVPVAIHADQLTPTWRVYSTGSNVFQTRAGCLIGAEHVNNSYECDIPIGAGICASYQTQTNSPRRARSVASQSIIAYTMSLGAENSVAYSNNSIACPTNFTISVTTEILPVSMTKTSVDCTMYICGDSTECSNFLLQYGSFCTQLNRALTGIAVEQDKNTQEVFAQVKQIYKTPPIKDFGGFNFSQILPDPSKPSKRSFIEDLLFNKVTLADAGFIKQYGDCLGDIAARDLICAQKFNGLTVLPPLLTDEMIAQYTSALLAGTITSGWTFGAGAALQIPFAMQMAYRFNGIGVTQNVLYENQKLIANQFNSAIGKIQDSLSSTASALGKLQDVVNQNAQALNTLVKQLSSNFGAISSVLNDILSRLDKVEAEVQIDRLITGRLQSLQTYVTQQLIRAAEIRASANLAATKMSECVLGQSKRVDFCGKGYHLMSFPQSAPHGVVFLHVTYVPAQEKNFTTAPAICHDGKAHFPREGVFVSNGTHWFVTQRNFCEPQIITTDNTFVSGNCDVVIGIVNNTVYDPLQPELDS

SEQ ID NO: 3031 - protein, 1147 aa, Artificial Sequence
  SARS-CoV-2/Australia/QLD02/2020__EPI_ISL_407896 spike protein (1-1147)(I714C_Y1110C)
MFVFLVLLPLVSSQCVNLTTRTQLPPAYTNSFTRGVYYPDKVFRSSVLHSTQDLFLPFFSNVTWFHAIHVSGTNGTKRFDNPVLPFNDGVYFASTEKSNIIRGWIFGTTLDSKTQSLLIVNNATNVVIKVCEFQFCNDPFLGVYYHKNNKSWMESEFRVYSSANNCTFEYVSQPFLMDLEGKQGNFKNLREFVFKNIDGYFKIYSKHTPINLVRDLPQGFSALEPLVDLPIGINITRFQTLLALHRSYLTPGDSSSGWTAGAAAYYVGYLQPRTFLLKYNENGTITDAVDCALDPLSETKCTLKSFTVEKGIYQTSNFRVQPTESIVRFPNITNLCPFGEVFNATRFASVYAWNRKRISNCVADYSVLYNSASFSTFKCYGVSPTKLNDLCFTNVYADSFVIRGDEVRQIAPGQTGKIADYNYKLPDDFTGCVIAWNSNNLDSKVGGNYNYLYRLFRKSNLKPFERDISTEIYQAGSTPCNGVEGFNCYFPLQSYGFQPTNGVGYQPYRVVVLSFELLHAPATVCGPKKSTNLVKNKCVNFNFNGLTGTGVLTESNKKFLPFQQFGRDIADTTDAVRDPQTLEILDITPCSFGGVSVITPGTNTSNQVAVLYQDVNCTEVPVAIHADQLTPTWRVYSTGSNVFQTRAGCLIGAEHVNNSYECDIPIGAGICASYQTQTNSPRRARSVASQSIIAYTMSLGAENSVAYSNNSIACPTNFTISVTTEILPVSMTKTSVDCTMYICGDSTECSNLLLQYGSFCTQLNRALTGIAVEQDKNTQEVFAQVKQIYKTPPIKDFGGFNFSQILPDPSKPSKRSFIEDLLFNKVTLADAGFIKQYGDCLGDIAARDLICAQKFNGLTVLPPLLTDEMIAQYTSALLAGTITSGWTFGAGAALQIPFAMQMAYRFNGIGVTQNVLYENQKLIANQFNSAIGKIQDSLSSTASALGKLQDVVNQNAQALNTLVKQLSSNFGAISSVLNDILSRLDKVEAEVQIDRLITGRLQSLQTYVTQQLIRAAEIRASANLAATKMSECVLGQSKRVDFCGKGYHLMSFPQSAPHGVVFLHVTYVPAQEKNFTTAPAICHDGKAHFPREGVFVSNGTHWFVTQRNFCEPQIITTDNTFVSGNCDVVIGIVNNTVYDPLQLELDS

SEQ ID NO: 3032 - protein, 1147 aa, Artificial Sequence
  SARS-CoV-2/India/1-31/2020__EPI_ISL_413523 spike protein (1-1147)(I714C_Y1110C)
MFVFLVLLPLVSSQCVNLTTRTQLPPAYTNSFTRGVYYPDKVFRSSVLHSTQDLFLPFFSNVTWFHAIHVSGTNGTKRFDNPVLPFNDGVYFASTEKSNIIRGWIFGTTLDSKTQSLLIVNNATNVVIKVCEFQFCNDPFLGVYYHKNNKSWMESEFRVYSSANNCTFEYVSQPFLMDLEGKQGNFKNLREFVFKNIDGYFKIYSKHTPINLVRDLPQGFSALEPLVDLPIGINITRFQTLLALHRSYLTPGDSSSGWTAGAAAYYVGYLQPRTFLLKYNENGTITDAVDCALDPLSETKCTLKSFTVEKGIYQTSNFRVQPTESIVRFPNITNLCPFGEVFNATRFASVYAWNRKRISNCVADYSVLYNSASFSTFKCYGVSPTKLNDLCFTNVYADSFVIRGDEVRQIAPGQTGKIADYNYKLPDDFTGCVIAWNSNNLDSKVGGNYNYLYRLFRKSNLKPFERDISTEIYQAGSTPCNGVEGFNCYFPLQSYGFQPTNGVGYQPYRVVVLSFELLHAPATVCGPKKSTNLVKNKCVNFNFNGLTGTGVLTESNKKFLPFQQFGRDIADTTDAVRDPQTLEILDITPCSFGGVSVITPGTNTSNQVAVLYQDVNCTEVPVAIHADQLTPTWRVYSTGSNVFQTRAGCLIGAEHVNNSYECDIPIGAGICASYQTQTNSPRRARSVASQSIIAYTMSLGAENSVAYSNNSIACPTNFTISVTTEILPVSMTKTSVDCTMYICGDSTECSNLLLQYGSFCTQLNRALTGIAVEQDKNTQEVFAQVKQIYKTPPIKDFGGFNFSQILPDPSKPSKRSFIEDLLFNKVTLADAGFIKQYGDCLGDIAARDLICAQKFNGLTVLPPLLTDEMIAQYTSALLAGTITSGWTFGAGAALQIPFAMQMAYRFNGIGVTQNVLYENQKLIANQFNSVIGKIQDSLSSTASALGKLQDVVNQNAQALNTLVKQLSSNFGAISSVLNDILSRLDKVEAEVQIDRLITGRLQSLQTYVTQQLIRAAEIRASANLAATKMSECVLGQSKRVDFCGKGYHLMSFPQSAPHGVVFLHVTYVPAQEKNFTTAPAICHDGKAHFPREGVFVSNGTHWFVTQRNFCEPQIITTDNTFVSGNCDVVIGIVNNTVYDPLQPELDS

SEQ ID NO: 3033 - protein, 1147 aa, Artificial Sequence
  SARS-CoV-2/Guangdong/GD2020087-P0008/2020__EPI_ISL_413863 spike protein (1-1147)(I714C_Y1110C)
MFVFLVLLPLVSSQCVNLTTRTQLPPAYTNSFTRGVYYPDKVFRSSVLHSTQDLFLPFFSNVTWFHAIHVSGTNGTKRFDNPVLPFNDGVYFASTEKSNIIRGWIFGTTLDSKTQSLLIVNNATNVVIKVCEFQFCNDPFLGVYYHKNNKSWMESEFRVYSSANNCTFEYVSQPFLMDLEGKQGNFKNLREFVFKNIDGYFKIYSKHTPINLVRDLPQGFSALEPLVDLPIGINITRFQTLLALHRSYLTPGDSSSGWTAGAAAYYVGYLQPRTFLLKYNENGTITDAVDCALDPLSETKCTLKSFTVEKGIYQTSNFRVQPTESIVRFPNITNLCPFGEVFNATRFASVYAWNRKRISNCVADYSVLYNSASFSTFKCYGVSPTKLNDLCFTNVYADSFVIRGDEVREIAPGQTGKIADYNYKLPDDFTGCVIAWNSNNLDSKVGGNYNYLYRLFRKSNLKPFERDISTEIYQAGSTPCNGVEGFNCYFPLQSYGFQPTNGVGYQPYRVVVLSFELLHAPATVCGPKKSTNLVKNKCVNFNFNGLTGTGVLTESNKKFLPFQQFGRDIADTTDAVRDPQTLEILDITPCSFGGVSVITPGTNTSNQVAVLYQDVNCTEVPVAIHADQLTPTWRVYSTGSNVFQTRAGCLIGAEHVNNSYECDIPIGAGICASYQTQTNSPRRARSVASQSIIAYTMSLGAENSVAYSNNSIACPTNFTISVTTEILPVSMTKTSVDCTMYICGDSTECSNLLLQYGSFCTQLNRALTGIAVEQDKNTQEVFAQVKQIYKTPPIKDFGGFNFSQILPDPSKPSKRSFIEDLLFNKVTLADAGFIKQYGDCLGDIAARDLICAQKFNGLTVLPPLLTDEMIAQYTSALLAGTITSGWTFGAGAALQIPFAMQMAYRFNGIGVTQNVLYENQKLIANQFNSAIGKIQDSLSSTASALGKLQDVVNQNAQALNTLVKQLSSNFGAISSVLNDILSRLDKVEAEVQIDRLITGRLQSLQTYVTQQLIRAAEIRASANLAATKMSECVLGQSKRVDFCGKGYHLMSFPQSAPHGVVFLHVTYVPAQEKNFTTAPAICHDGKAHFPREGVFVSNGTHWFVTQRNFCEPQIITTDNTFVSGNCDVVIGIVNNTVYDPLQPELDS

SEQ ID NO: 3034 - protein, 1147 aa, Artificial Sequence
  SARS-CoV-2/Sweden/01/2020__EPI_ISL_411951 spike protein (1-1147)(I714C_Y1110C)
MFVFLVLLPLVSSQCVNLTTRTQLPPAYTNSFTRGVYYPDKVFRSSVLHSTQDLFLPFFSNVTWFHAIHVSGTNGTKRFDNPVLPFNDGVYFASTEKSNIIRGWIFGTTLDSKTQSLLIVNNATNVVIKVCEFQFCNDPFLGVYYHKNNKSWMESEFRVYSSANNCTFEYVSQPFLMDLEGKQGNFKNLREFVFKNIDGYFKIYSKHTPINLVRDLPQGFSALEPLVDLPIGINITRFQTLLALHRSYLTPGDSSSGWTAGAAAYYVGYLQPRTFLLKYNENGTITDAVDCALDPLSETKCTLKSFTVEKGIYQTSNFRVQPTESIVRFPNITNLCPFGEVFNATRFASVYAWNRKRISNCVADYSVLYNSASFSTFKCYGVSPTKLNDLCFTNVYADSFVIRGDEVRQIAPGQTGKIADYNYKLPDDFTGCVIAWNSNNLDSKVGGNYNYLYRLFRKSNLKPFERDISTEIYQAGSTPCNGVEGFNCYFPLQSYGFQPTNGVGYQPYRVVVLSFELLHAPATVCGPKKSTNLVKNKCVNFNFNGLTGTGVLTESNKKFLPFQQFGRDIADTTDAVRDPQTLEILDITPCSFGGVSVITPGTNTSNQVAVLYQDVNCTEVPVAIHADQLTPTWRVYSTGSNVFQTRAGCLIGAEHVNNSYECDIPIGAGICASYQTQTNSPRRARSVASQSIIAYTMSLGAENSVAYSNNSIACPTNFTISVTTEILPVSMTKTSVDCTMYICGDSTECSNLLLQYGSFCTQLNRALTGIAVEQDKNTQEVFAQVKQIYKTPPIKDCGGFNFSQILPDPSKPSKRSFIEDLLFNKVTLADAGFIKQYGDCLGDIAARDLICAQKFNGLTVLPPLLTDEMIAQYTSALLAGTITSGWTFGAGAALQIPFAMQMAYRFNGIGVTQNVLYENQKLIANQFNSAIGKIQDSLSSTASALGKLQDVVNQNAQALNTLVKQLSSNFGAISSVLNDILSRLDKVEAEVQIDRLITGRLQSLQTYVTQQLIRAAEIRASANLAATKMSECVLGQSKRVDFCGKGYHLMSFPQSAPHGVVFLHVTYVPAQEKNFTTAPAICHDGKAHFPREGVFVSNGTHWFVTQRNFCEPQIITTDNTFVSGNCDVVIGIVNNTVYDPLQPELDS

SEQ ID NO: 3035 - protein, 1147 aa, Artificial Sequence
  SARS-CoV-2/Tianmen/HBCDC-HB-07/2020__EPI_ISL_412983 spike protein (1-1147)(I714C_Y1110C)
MFVFLVLLPLVSSQCVNLTTRTQLPPAYTNSFTRGVYYPDKVFRSSVLHSTQDLFLPFFSNVTWFHAIHVSGTNGTKRFDNPVLPFNDGVYFASTEKSNIIRGWIFGTTLDSKTQSLLIVNNATNVVIKVCEFQFCNDPFLGVYYHKNNKSWMESEFRVYSSANNCTFEYVSQPFLMDLEGKQGNFKNLREFVFKNIDGYFKIYSKHTPINLVRDLPQGFSALEPLVDLPIGINITRFQTLLALHRSYLTPGDSSSGWTAGAAAYYVGYLQPRTFLLKYNENGTITDAVDCALDPLSETKCTLKSFTVEKGIYQTSNFRVQPTESIVRFPNITNLCPFGEVFNATRFASVYAWNRKRISNCVADYSVLYNSASFSTFKCYGVSPTKLNDLCFTNVYADSFVIRGDEVRQIAPGQTGKIADYNYKLPDDFTGCVIAWNSNNLDSKVGGNYNYLYRLFRKSNLKPFERDISTEIYQAGSTPCNGVEGFNCYFPLQSYGFQPTNGVGYQPYRVVVLSFELLHAPATVCGPKKSTNLVKNKCVNFNFNGLTGTGVLTESNKKFLPFQQFGRDIADTTDAVRDPQTLEILDITPCSFGGVSVITPGTNTSNQVAVLYQDLNCTEVPVAIHADQLTPTWRVYSTGSNVFQTRAGCLIGAEHVNNSYECDIPIGAGICASYQTQTNSPRRARSVASQSIIAYTMSLGAENSVAYSNNSIACPTNFTISVTTEILPVSMTKTSVDCTMYICGDSTECSNLLLQYGSFCTQLNRALTGIAVEQDKNTQEVFAQVKQIYKTPPIKDFGGFNFSQILPDPSKPSKRSFIEDLLFNKVTLADAGFIKQYGDCLGDIAARDLICAQKFNGLTVLPPLLTDEMIAQYTSALLAGTITSGWTFGAGAALQIPFAMQMAYRFNGIGVTQNVLYENQKLIANQFNSAIGKIQDSLSSTASALGKLQDVVNQNAQALNTLVKQLSSNFGAISSVLNDILSRLDKVEAEVQIDRLITGRLQSLQTYVTQQLIRAAEIRASANLAATKMSECVLGQSKRVDFCGKGYHLMSFPQSAPHGVVFLHVTYVPAQEKNFTTAPAICHDGKAHFPREGVFVSNGTHWFVTQRNFCEPQIITTDNTFVSGNCDVVIGIVNNTVYDPLQPELDS

SEQ ID NO: 3036 - protein, 1147 aa, Artificial Sequence
  SARS-CoV-2/Hong Kong/case42_VM20002493/2020__EPI_ISL_414527 spike protein (1-1147)(I714C_Y1110C)
MFVFLVLLPLVSSQCVNLTTRTQLPPAYTNSFTRGVYYPDKVFRSSVLHSTQDLFLPFFSNVTWFHAIHVSGTNGTKRFDNPVLPFNDGVYFASTEKSNIIRGWIFGTTLDSKTQSLLIVNNATNVVIKVCEFQFCNDPFLGVYYHKNNKSWMESEFRVYSSANNCTFEYVSQPFLMDLEGKQGNFKNLREFVFKNIDGYFKIYSKHTPINLVRDLPQGFSALEPLVDLPIGINITRFQTLLALHRSYLTPGDSSSGWTAGAAAYYVGYLQPRTFLLKYNENGTITDAVDCALDPLSETKCTLKSFTVEKGIYQTSNFRVQPTESIVRFPNITNLCPFGEVFNATRFASVYAWNRKRISNCVADYSVLYNSASFSTFKCYGVSPTKLNDLCFTNVYADSFVIRGDEVRQIAPGQTGKIADYNYKLPDDFTGCVIAWNSNNLDSKVGGNYNYLYRLFRKSNLKPFERDISTEIYQAGSTPCNGVEGFNCYFPLQSYGFQPTNGVGYQPYRVVVLSFELLHAPATVCGPKKSTNLVKNKCVNFNFNGLTGTGVLTESNKKFLPFQQFGRDIADTTDAVRDPQTLEILDITPCSFGGVSVITPGTNTSNQVAVLYQDVNCTEVPVAIHADQLTPTWRVYSTGSNVFQTRAGCLIGAEHVNNSYECDIPIGAGICASYQTQTNSPRRARSVASQSIIAYTMSLGAENSVAYSNNSIACPTNFAISVTTEILPVSMTKTSVDCTMYICGDSTECSNLLLQYGSFCTQLNRALTGIAVEQDKNTQEVFAQVKQIYKTPPIKDFGGFNFSQILPDPSKPSKRSFIEDLLFNKVTLADAGFIKQYGDCLGDIAARDLICAQKFNGLTVLPPLLTDEMIAQYTSALLAGTITSGWTFGAGAALQIPFAMQMAYRFNGIGVTQNVLYENQKLIANQFNSAIGKIQDSLSSTASALGKLQDVVNQNAQALNTLVKQLSSNFGAISSVLNDILSRLDKVEAEVQIDRLITGRLQSLQTYVTQQLIRAAEIRASANLAATKMSECVLGQSKRVDFCGKGYHLMSFPQSAPHGVVFLHVTYVPAQEKNFTTAPAICHDGKAHFPREGVFVSNGTHWFVTQRNFCEPQIITTDNTFVSGNCDVVIGIVNNTVYDPLQPELDS

SEQ ID NO: 3037 - protein, 1147 aa, Artificial Sequence
  SARS-CoV-2/USA/CruiseA-23/2020__EPI_ISL_414482 spike protein (1-1147)(I714C_Y1110C)
MFVFLVLLPLVSSQCVNLTTRTQLPPAYTNSFTRGVYYPDKVFRSSVLHSTQDLFLPFFSNVTWFHAIHVSGTNGTKRFDNPVLPFNDGVYFASTEKSNIIRGWIFGTTLDSKTQSLLIVNNATNVVIKVCEFQFCNDPFLGVYYHKNNKSWMESEFRVYSSANNCTFEYVSQPFLMDLEVKQGNFKNLREFVFKNIDGYFKIYSKHTPINLVRDLPQGFSALEPLVDLPIGINITRFQTLLALHRSYLTPGDSSSGWTAGAAAYYVGYLQPRTFLLKYNENGTITDAVDCALDPLSETKCTLKSFTVEKGIYQTSNFRVQPTESIVRFPNITNLCPFGEVFNATRFASVYAWNRKRISNCVADYSVLYNSASFSTFKCYGVSPTKLNDLCFTNVYADSFVIRGDEVRQIAPGQTGKIADYNYKLPDDFTGCVIAWNSNNLDSKVGGNYNYLYRLFRKSNLKPFERDISTEIYQAGSTPCNGVEGFNCYFPLQSYGFQPTNGVGYQPYRVVVLSFELLHAPATVCGPKKSTNLVKNKCVNFNFNGLTGTGVLTESNKKFLPFQQFGRDIADTTDAVRDPQTLEILDITPCSFGGVSVITPGTNTSNQVAVLYQDVNCTEVPVAIHADQLTPTWRVYSTGSNVFQTRAGCLIGAEHVNNSYECDIPIGAGICASYQTQTNSPRRARSVASQSIIAYTMSLGAENSVAYSNNSIACPTNFTISVTTEILPVSMTKTSVDCTMYICGDSTECSNLLLQYGSFCTQLNRALTGIAVEQDKNTQEVFAQVKQIYKTPPIKDFGGFNFSQILPDPSKPSKRSFIEDLLFNKVTLADAGFIKQYGDCLGDIAARDLICAQKFNGLTVLPPLLTDEMIAQYTSALLAGTITSGWTFGAGAALQIPFAMQMAYRFNGIGVTQNVLYENQKLIANQFNSAIGKIQDSLSSTASALGKLQDVVNQNAQALNTLVKQLSSNFGAISSVLNDILSRLDKVEAEVQIDRLITGRLQSLQTYVTQQLIRAAEIRASANLAATKMSECVLGQSKRVDFCGKGYHLMSFPQSAPHGVVFLHVTYVPAQEKNFTTAPAICHDGKAHFPREGVFVSNGTHWFVTQRNFCEPQIITTDNTFVSGNCDVVIGIVNNTVYDPLQPELDS

SEQ ID NO: 3038 - protein, 1147 aa, Artificial Sequence
  SARS-CoV-2/Hong Kong/case85_VM20002868/2020__EPI_ISL_414519 spike protein (1-1147)(I714C_Y1110C)
MFVFLVLVPLVSSQCVNLTTRTQLPPAYTNSFTRGVYYPDKVFRSSVLHSTQDLFLPFFSNVTWFHAIHVSGTNGTKRFDNPVLPFNDGVYFASTEKSNIIRGWIFGTTLDSKTQSLLIVNNATNVVIKVCEFQFCNDPFLGVYYHKNNKSWMESEFRVYSSANNCTFEYVSQPFLMDLEGKQGNFKNLREFVFKNIDGYFKIYSKHTPINLVRDLPQGFSALEPLVDLPIGINITRFQTLLALHRSYLTPGDSSSGWTAGAAAYYVGYLQPRTFLLKYNENGTITDAVDCALDPLSETKCTLKSFTVEKGIYQTSNFRVQPTESIVRFPNITNLCPFGEVFNATRFASVYAWNRKRISNCVADYSVLYNSASFSTFKCYGVSPTKLNDLCFTNVYADSFVIRGDEVRQIAPGQTGKIADYNYKLPDDFTGCVIAWNSNNLDSKVGGNYNYLYRLFRKSNLKPFERDISTEIYQAGSTPCNGVEGFNCYFPLQSYGFQPTNGVGYQPYRVVVLSFELLHAPATVCGPKKSTNLVKNKCVNFNFNGLTGTGVLTESNKKFLPFQQFGRDIADTTDAVRDPQTLEILDITPCSFGGVSVITPGTNTSNQVAVLYQDVNCTEVPVAIHADQLTPTWRVYSTGSNVFQTRAGCLIGAEHVNNSYECDIPIGAGICASYQTQTNSPRRARSVASQSIIAYTMSLGAENSVAYSNNSIACPTNFTISVTTEILPVSMTKTSVDCTMYICGDSTECSNLLLQYGSFCTQLNRALTGIAVEQDKNTQEVFAQVKQIYKTPPIKDFGGFNFSQILPDPSKPSKRSFIEDLLFNKVTLADAGFIKQYGDCLGDIAARDLICAQKFNGLTVLPPLLTDEMIAQYTSALLAGTITSGWTFGAGAALQIPFAMQMAYRFNGIGVTQNVLYENQKLIANQFNSAIGKIQDSLSSTASALGKLQDVVNQNAQALNTLVKQLSSNFGAISSVLNDILSRLDKVEAEVQIDRLITGRLQSLQTYVTQQLIRAAEIRASANLAATKMSECVLGQSKRVDFCGKGYHLMSFPQSAPHGVVFLHVTYVPAQEKNFTTAPAICHDGKAHFPREGVFVSNGTHWFVTQRNFCEPQIITTDNTFVSGNCDVVIGIVNNTVYDPLQPELDS

SEQ ID NO: 3039 - protein, 1147 aa, Artificial Sequence; identical to SEQ ID NO: 3029
  SARS-CoV-2/England/200990660/2020__EPI_ISL_414523 spike protein (1-1147)(I714C_Y1110C)

SEQ ID NO: 3040 - protein, 1147 aa, Artificial Sequence
  SARS-CoV-2/Australia/NSW09/2020__EPI_ISL_413595 spike protein (1-1147)(I714C_Y1110C)
MFVFLVLLPLVSSQCVNLTTRTQLPPAYTNSFTRGVYYPDKVFRSSVLHSTQDLFLPFFSNVTWFHAIHVSGTNGTKRFDNPVLPFNDGVYFASTEKSNIIRGWIFGTTLDSKTQSLLIVNNATNVVIKVCEFQFCNDPFLGVYYHKNNKSWMESEFRVYSSANNCTFEYVSQPFLMDLEGKQGNFKNLREFVFKNIDGYFKIYSKHTPINLVRDLPQGFSALEPLVDLPIGINITRFQTLLALHRSYLTPGDSSSGWTAGAAAYYVGYLQPRTFLLKYNENGTITDAVDCALDPLSETKCTLKSFTVEKGIYQTSNFRVQPTESIVRFPNITNLCPFGEVFNATRFASVYAWNRKRISNCVADYSVLYNSASFSTFKCYGVSPTKLNDLCFTNVYADSFVIRGDEVRQIAPGQTGKIADYNYKLPDDFTGCVIAWNSNNLDSKVGGNYNYLYRLFRKSNLKPFERDISTEIYQAGSTPCNGVEGFNCYFPLQSYGFQPTNGVGYQPYRVVVLSFELLHAPATVCGPKKSTNLVKNKCVNFNFNGLTGTGVLTESNKKFLPFQQFGRDIADTTDAVRDPQTLEILDITPCSFGGVSVITPGTNTSNQVAVLYQDVNCTEVPVAIHADQLTPTWRVYSTGSNVFQTRAGCLIGAEHVNNSYECDIPIGAGICASYQTQTNSPRRARSVASQSIIAYTMSLGAENSVAYSNNSIACPTNFTISVTTEILPVSMTKTSVDCTMYICGDSTECSNLLLQYGSFCTQLNRALTGIAVEQDKNTQEVFAQVKQIYKTPPIKDFGGFNFSQILPDPSKPSKRSFIEDLLFNKVTLADAGFIKQYGDCLGDIAARDLICAQKFNGLTVLPPLLTDEMIAQYTSALLAGTITSGWTFGAGAALQIPFAMQMAYRFNGIGVTQNVLYENQKLIANQFNSAIGKIQDSLSFTASALGKLQDVVNQNAQALNTLVKQLSSNFGAISSVLNDILSRLDKVEAEVQIDRLITGRLQSLQTYVTQQLIRAAEIRASANLAATKMSECVLGQSKRVDFCGKGYHLMSFPQSAPHGVVFLHVTYVPAQEKNFTTAPAICHDGKAHFPREGVFVSNGTHWFVTQRNFCEPQIITTDNTFVSGNCDVVIGIVNNTVYDPLQPELDS

SEQ ID NO: 3041 - protein, 1147 aa, Artificial Sequence; identical to SEQ ID NO: 3021
  SARS-CoV-2/Australia/NSW10/2020__EPI_ISL_413596 spike protein (1-1147)(I714C_Y1110C)

SEQ ID NO: 3042 - protein, 1147 aa, Artificial Sequence
  SARS-CoV-2/Switzerland/1000477797/2020__EPI_ISL_413023 spike protein (1-1147)(I714C_Y1110C)
MFVFLVLLPLVSSQCVNLTTRTQLPPAYTNSFTRGVYYPDKVFRSSVLHSTQDLFLPFFSNVTWFHAIHVSGTNGTKRFDNPVLPFNDGVYFASTEKSNIIRGWIFGTTLDSKTQSLLIVNNATNVVIKVCEFQFCNDPFLGVYYHKNNKSWMESEFRVYSSANNCTFEYVSQPFLMDLEGKQGNFKNLREFVFKNIDGYFNIYSKHTPINLVRDLPQGFSALEPLVDLPIGINITRFQTLLALHRSYLTPGDSSSGWTAGAAAYYVGYLQPRTFLLKYNENGTITDAVDCALDPLSETKCTLKSFTVEKGIYQTSNFRVQPTESIVRFPNITNLCPFGEVFNATRFASVYAWNRKRISNCVADYSVLYNSASFSTFKCYGVSPTKLNDLCFTNVYADSFVIRGDEVRQIAPGQTGKIADYNYKLPDDFTGCVIAWNSNNLDSKVGGNYNYLYRLFRKSNLKPFERDISTEIYQAGSTPCNGVEGFNCYFPLQSYGFQPTNGVGYQPYRVVVLSFELLHAPATVCGPKKSTNLVKNKCVNFNFNGLTGTGVLTESNKKFLPFQQFGRDIADTTDAVRDPQTLEILDITPCSFGGVSVITPGTNTSNQVAVLYQGVNCTEVPVAIHADQLTPTWRVYSTGSNVFQTRAGCLIGAEHVNNSYECDIPIGAGICASYQTQTNSPRRARSVASQSIIAYTMSLGAENSVAYSNNSIACPTNFTISVTTEILPVSMTKTSVDCTMYICGDSTECSNLLLQYGSFCTQLNRALTGIAVEQDKNTQEVFAQVKQIYKTPPIKDFGGFNFSQILPDPSKPSKRSFIEDLLFNKVTLADAGFIKQYGDCLGDIAARDLICAQKFNGLTVLPPLLTDEMIAQYTSALLAGTITSGWTFGAGAALQIPFAMQMAYRFNGIGVTQNVLYENQKLIANQFNSAIGKIQDSLSSTASALGKLQDVVNQNAQALNTLVKQLSSNFGAISSVLNDILSRLDKVEAEVQIDRLITGRLQSLQTYVTQQLIRAAEIRASANLAATKMSECVLGQSKRVDFCGKGYHLMSFPQSAPHGVVFLHVTYVPAQEKNFTTAPAICHDGKAHFPREGVFVSNGTHWFVTQRNFCEPQIITTDNTFVSGNCDVVIGIVNNTVYDPLQPELDS

SEQ ID NO: 3043 - protein, 1147 aa, Artificial Sequence
  SARS-CoV-2/Belgium/BA-02291/2020__EPI_ISL_415159 spike protein (1-1147)(I714C_Y1110C)
MFVFLVLLPLVSSQCVNLTTRTQLPPAYTNSFTRGVYYPDKVFRSSVLHSTQDLFLPFFSNVTWFHAIHVSGTNGTKRFDNPVLPFNDGVYFASTEKSNIIRGWIFGTTLDSKTQSLLIVNNATNVVIKVCEFQFCNDPFLGVYYHKNNKSWMESEFRVYSSANNCTFEYVSQPFLMDLEGKQGNFKNLREFVFKNIDGYFKIYSKHTPINLVRDLPQGFSALEPLVDLPIGINITRFQTLLALHRSYLTPGDSSSGWTAGAAAYYVGYLQPRTFLLKYNENGTITDAVDCALDPLSETKCTLKSFTVEKGIYQTSNFRVQPTESIVRFPNITNLCPFGEVFNATRFASVYAWNRKRISNCVADYSVLYNSASFSTFKCYGVSPTKLNDLCFTNVYADSFVIRGDEVRQIAPGQTGKIADYNYKLPDDFTGCVIAWNSNNLDSKVGGNYNYLYRLFRRSNLKPFERDISTEIYQAGSTPCNGVEGFNCYFPLQSYGFQPTNGVGYQPYRVVVLSFELLPAPATVCGPKKSTNLVKNKCVNFNFNGLTGTGVLTESNKKFLPFQQFGRDIADTTDAVRDPQTLEILDITPCSFGGVSVITPGTNTSNQVAVLYQGVNCTEVPVAIHADQLTPTWRVYSTGSNVFQTRAGCLIGAEHVNNSYECDIPIGAGICASYQTQTNSPRRARSVASQSIIAYTMSLGAENSVAYSNNSIACPTNFTISVTTEILPVSMTKTSVDCTMYICGDSTECSNLLLQYGSFCTQLNRALTGIAVEQDKNTQEVFAQVKQIYKTPPIKDFGGFNFSQILPDPSKPSKRSFIEDLLFNKVTLADAGFIKQYGDCLGDIAARDLICAQKFNGLTVLPPLLTDEMIAQYTSALLAGTITSGWTFGAGAALQIPFAMQMAYRFNGIGVTQNVLYENQKLIANQFNSAIGKIQDSLSSAAPALGKLQDVVNQNAQALNTLVKQLSSNFGAISSVLNDILSRLDKVEAEVQIDRLITGRLQSLQTYVTQQLIRAAEIRASANLAATKMSECVLGQSKRVDFCGKGYHLMSFPQSAPHGVVFLHVTYVPAQEKNFTTAPAICHDGKAHFPREGVFVSNGTHWFVTQRNFCEPQIITTDNTFVSGNCDVVIGIVNNTVYDPLQPELDS

SEQ ID NO: 3044 - protein, 1147 aa, Artificial Sequence
  SARS-CoV-2/USA/WA8-UW5/2020__EPI_ISL_413486 spike protein (1-1147)(I714C_Y1110C)
MFVFLVLLPLVSSQCVNLTTRTQLPPAYTNSFTRGVYYPDKVFRSSVLHSTQDLFLPFFSNVTWFHAIHVSGTNGTKRFDNPVLPFNDGVYFASTEKSNIIRGWIFGTTLDSKTQSLLIVNNATNVVIKVCEFQFCNDPFLGVYYHKNNKSWMESEFRVYSSANNCTFEYVSQPFLMDLEGKQGNFKNLREFVFKNIDGYFKIYSKHTPINLVRDLPQGFSALEPLVDLPIGINITRFQTLLALHRSYLTPGDSSSGWTAGAAAYYVGYLQPRTFLLKYNENGTITDAVDCALDPLSETKCTLKSFTVEKGIYQTSNFRVQPTESIVRFPNITNLCPFGEVFNATRFASVYAWNRKRISNCVADYSVLYNSASFSTFKCYGVSPTKLNDLCFTNVYADSFVIRGDEVRQIAPGQTGKIADYNYKLPDDFTGCVIAWNSNNLDSKVGGNYNYLYRLFRKSNLKPFERDISTEIYQAGSTPCNGVEGFNCYFPLQSYGFQPTNGVGYQPYRVVVLSFELLHAPATVCGPKKSTNLVKNKCVNFNFNGLTGTGVLTESNKKFLPFQQFGRDIADTTDAVRDPQTLEILDITPCSFGGVSVITPGTNTSNQVAVLYQDVNCTEVPVAIHADQLTPTWRVYSTGSNVFQTRAGCLIGAEYVNNSYECDIPIGAGICASYQTQTNSPRRARSVASQSIIAYTMSLGAENSVAYSNNSIACPTNFTISVTTEILPVSMTKTSVDCTMYICGDSTECSNLLLQYGSFCTQLNRALTGIAVEQDKNTQEVFAQVKQIYKTPPIKDFGGFNFSQILPDPSKPSKRSFIEDLLFNKVTLADAGFIKQYGDCLGDIAARDLICAQKFNGLTVLPPLLTDEMIAQYTSALLAGTITSGWTFGAGAALQIPFAMQMAYRFNGIGVTQNVLYENQKLIANQFNSAIGKIQDSLSSTASALGKLQDVVNQNAQALNTLVKQLSSNFGAISSVLNDILSRLDKVEAEVQIDRLITGRLQSLQTYVTQQLIRAAEIRASANLAATKMSECVLGQSKRVDFCGKGYHLMSFPQSAPHGVVFLHVTYVPAQEKNFTTAPAICHDGKAHFPREGVFVSNGTHWFVTQRNFCEPQIITTDNTFVSGNCDVVIGIVNNTVYDPLQPELDS

SEQ ID NO: 3045 - protein, 1147 aa, Artificial Sequence
  SARS-CoV-2/England/20102000506/2020__EPI_ISL_415147 spike protein (1-1147)(I714C_Y1110C)
MFVFLVLLPLVSSQCVNLTTRTQLPPAYTNSFTRGVYYPDKVFRSSVLHSTQDLFLPFFSNVTWFHAIHVSGTNGTKRFDNPVLPFNDGVYFASTEKSNIIRGWIFGTTLDSKTQSLLIVNNATNVVIKVCEFQFCNDPFLGVYYHKNNKSWMESEFRVYSSANNCTFEYVSQPFLMDLEGKQGNFKNLREFVFKNIDGYFKIYSKHTPINLVRDLPQGFSALEPLVDLPIGINITRFQTLLALHRSYLTPGDSSSGWTAGAAAYYVGYLQPRTFLLKYNENGTITDAVDCALDPLSETKCTLKSFTVEKGIYQTSNFRVQPTESIVRFPNITNLCPFGEVFNATRFASVYAWNRKRISNCVADYSVLYNSASFSTFKCYGVSPTKLNDLCFTNVYADSFVIRGDEVRQIAPGQTGKIADYNYKLPDDFTGCVIAWNSNNLDSKVGGNYNYLYRLFRKSNLKPFERDISTEIYQAGSTPCNGVEGFNCYFPLQSYGFQPTNGVGYQPYRVVVLSFELLHAPATVCGPKKSTNLVKNKCVNFNFNGLTGTGVLTESNKKFLPFQQFGRDIADTTDAVRDPQTLEILDITPCSFGGVSVITPGTNTSNQVAVLYQGVNCTEVPVAIHADQLTPTWRVYSTGSNVFQTRAGCLIGAEHVNNSYECDIPIGAGICASYQTQTNSPRRARSVASQSIIAYTMSLGAENSVAYSNNSIACPTNFTISVTTEILPVSMTKTSVDCTMYICGDSTECSNLLLQYGSFCTQLNRALTGIAVEQDKNTQEVFAQVKQIYKTPPIKDFGGFNFSQILPDPSKPSKRSFIEDLLFNKVTLADAGFIKQYGYCLGDIAARDLICAQKFNGLTVLPPLLTDEMIAQYTSALLAGTITSGWTFGAGAALQIPFAMQMAYRFNGIGVTQNVLYENQKLIANQFNSAIGKIQDSLSSTASALGKLQDVVNQNAQALNTLVKQLSSNFGAISSVLNDILSRLDKVEAEVQIDRLITGRLQSLQTYVTQQLIRAAEIRASANLAATKMSECVLGQSKRVDFCGKGYHLMSFPQSAPHGVVFLHVTYVPAQEKNFTTAPAICHDGKAHFPREGVFVSNGTHWFVTQRNFCEPQIITTDNTFVSGNCDVVIGIVNNTVYDPLQPELDS

SEQ ID NO: 3046 - protein, 1147 aa, Artificial Sequence
  SARS-CoV-2/Belgium/VAG-03013/2020__EPI_ISL_415155 spike protein (1-1147)(I714C_Y1110C)
MFVFLVLLPLVSSQCVNLTTRTQLPPAYTNSFTRGVYYPDKVFRSSVLHSTQDLFLPFFSNVTWFHAIHVSGTNGTKRFDNPVLPFNDGVYFASTEKSNIIRGWIFGTTLDSKTQSLLIVNNATNVVIKVCEFQFCNDPFLGVYYHKNNKSWMESEFRVYSSANNCTFEYVSQPFLMDLEGKQGNFKNLREFVFKNIDGYFKIYSKHTPINLVRDLPQGFSALEPLVDLPIGINITRFQTLLALHRSYLTPGDSSSGWTAGAAAYYVGYLQPRTFLLKYNENGTITDAVDCALDPLSETKCTLKSFTVEKGIYQTSNFRVQPTESIVRFPNITNLCPFGEVFNATRFASVYAWNRKRISNCVADYSVLYNSASFSTFKCYGVSPTKLNDLCFTNVYADSFVIRGDEVRQIAPGQTGKIADYNYKLPDDFTGCVIAWNSNNLDSKVGGNYNYLYRLFRKSNLKPFERDISTEIYQAGSTPCNGVEGFNCYFPLQSYGFQPTNGVGYQPYRVVVLSFELLHAPATVCGPKKSTNLVKNKCVNFNFNGLTGTGVLTESNKKFLPFQQFGRDIADTTDAVRDPQTLEILDITPCSFGGVSVITPGTNTSNQVAVLYQGVNCTEVPVAIHADQLTPTWRVYSTGSNVFQTRAGCLIGAEHVNNSYECDIPIGAGICASYQTQTNSPRRARSVASQSIIAYTMSLGAENSVAYSNNSIACPTNFTISVTTEILPVSMTKTSVDCTMYICGDSTECSNLLLQYGSFCTQLNRALTGIAVEQDKNTQEVFAQVKQIYKTPPIKDFGGFNFSQILPDPSKPSKRSFIEDLLFNKVTLADAGFIKQYGDCLGDIAARDLICAQKFNGLTVLPPLLTDEMIAQYTSALLAGTITSGWTFGAGAALQIPFAMQMAYRFNGIGVTQNVLYENQKLIANQFNSAIGKIQDSLSSTATALGKLQDVVNQNAQALNTLVKQLSSNFGAISSVLNDILSRLDKVEAEVQIDRLITGRLQSLQTYVTQQLIRAAEIRASANLAATKMSECVLGQSKRVDFCGKGYHLMSFPQSAPHGVVFLHVTYVPAQEKNFTTAPAICHDGKAHFPREGVFVSNGTHWFVTQRNFCEPQIITTDNTFVSGNCDVVIGIVNNTVYDPLQPELDS

SEQ ID NO: 3047 - protein, 1147 aa, Artificial Sequence
  SARS-CoV-2/Belgium/BC-03016/2020__EPI_ISL_415157 spike protein (1-1147)(I714C_Y1110C)
MFVFLVLLPLVSSQCVNLTTRTQLPPAYTNSFTRGVYYPDKVFRSSVLHSTQDLFLPFFSNVTWFHAIHVSGTNGTKRFDNPVLPFNDGVYFASTEKSNIIRGWIFGTTLDSKTQSLLIVNNATNVVIKVCEFQFCNDPFLGVYYHKNNKSWMESEFRVYSSANNCTFEYVSQPFLMDLEGKQGNFKNLREFVFKNIDGYFKIYSKHTPINLVRDLPQGFSALEPLVDLPIGINITRFQTLLALHRSYLTPGDSSSGWTAGAAAYYVGYLQPRTFLLKYNENGTITDAVDCALDPLSETKCTLKSFTVEKGIYQTSNFRVQPTESIVRFPNITNLCPFGEVFNATRFASVYAWNRKRISNCVADYSVLYNSASFSTFKCYGVSPTKLNDLCFTNVYADSFVIRGDEVRQIAPGQTGKIADYNYKLPDDFTGCVIAWNSNNLDSKVGGNYNYLYRLFRKSNLKPFERDISTEIYQAGSTPCNGVEGFNCYFPLQSYGFQPTNGVGYQPYRVVVLSFELLHAPATVCGPKKSTNLVKNKCVNFNFNGLTGTGVLTESNKKFLPFQQFGRDIADTTDAVRDPQTLEILDITPCSFGGVSVITPGTNTSNQVAVLYQGVNCTEVPVAIHADQLTPTWRVYSTGSNVFQTRAGCLIGAEHVNNSYECDIPIGAGICASYQTQTNSPRRARSVASQSIIAYTMSLGAENSVAYSNNSIACPTNFTISVTTEILPVSMTKTSVDCTMYICGDSTECSNLLLQYGSFCTQLNRALTGIAVEQDKNTQEVFAQVKQIYKTPPIKDFGGFNFSQILPDPSKPSKRSFIEDLLFNKVTLADAGFIKQYGDCLGDIAARDLICAQKFNGLTVLPPLLTDEMIAQYTSALLAGTITSGWTFGAGAALQIPFAMQMAYRFNGIGVTQNVLYENQKLIANQFNSAIGKIQDSLSSTAPALGKLQDVVNQNAQALNTLVKQLSSNFGAISSVLNDILSRLDKVEAEVQIDRLITGRLQSLQTYVTQQLIRAAEIRASANLAATKMSECVLGQSKRVDFCGKGYHLMSFPQSAPHGVVFLHVTYVPAQEKNFTTAPAICHDGKAHFPREGVFVSNGTHWFVTQRNFCEPQIITTDNTFVSGNCDVVIGIVNNTVYDPLQPELDS

SEQ ID NO: 3048 - protein, 1147 aa, Artificial Sequence
  SARS-CoV-2/Germany/BavPat3/2020__EPI_ISL_414521 spike protein (1-1147)(I714C_Y1110C)
MFVFLVLLPLVSSQCVNLTTRTQLPPAYTNSFTRGVYYPDKVFRSSVLHSTQDLFLPFFSNVTWFHAIHVSGTNGTKRFDNPVLPFNDGVYFASTEKSNIIRGWIFGTTLDSKTQSLLIVNNATNVVIKVCEFQFCNDPFLGVYYHKNNKSWMESEFRVYSSANNCTFEYVSQPFLMDLEGKQGNFKNLREFVFKNIDGYFKIYSKHTPINLVRDLPQGFSALEPLVDLPIGINITRFQTLLALHRSYLTPGDSSSGWTAGAAAYYVGYLQPRTFLLKYNENGTITDAVDCALDPLSETKCTLKSFTVEKGIYQTSNFRVQPTESIVRFPNITNLCPFGEVFNATRFASVYAWNRKRISNCVADYSVLYNSASFSTFKCYGVSPTKLNDLCFTNVYADSFVIRGDEVRQIAPGQTGKIADYNYKLPDDFTGCVIAWNSNNLDSKVGGNYNYLYRLFRKSNLKPFERDISTEIYQAGSTPCNGVEGFNCYFPLQSYGFQPTNGVGYQPYRVVVLSFELLHAPATVCGPKKSTNLVKNKCVNFNFNGLTGTGVLTESNKKFLPFQQFGRDIADTTDAVRDPQTLEILDITPCSFGGVSVITPGTNTSNQVAVLYQDVNCTEVPVAIHADQLTPTWRVYSTGSNVFQTRAGCLIGAEHVNNSYECDIPIGAGICASYQTQTNSPRRARSVASQSIIAYTMSLGAENSVAYSNNSIACPTNFTISVTTEILPVSMTKTSVDCTMYICGDSTECSNLLLQYGSFCTQLNRALTGIAVEQDKNTQQVFAQVKQIYKTPPIKDFGGFNFSQILPDPSKPSKRSFIEDLLFNKVTLADAGFIKQYGDCLGDIAARDLICAQKFNGLTVLPPLLTDEMIAQYTSALLAGTITSGWTFGAGAALQIPFAMQMAYRFNGIGVTQNVLYENQKLIANQFNSAIGKIQDSLSSTASALGKLQDVVNQNAQALNTLVKQLSSNFGAISSVLNDILSRLDKVEAEVQIDRLITGRLQSLQTYVTQQLIRAAEIRASANLAATKMSECVLGQSKRVDFCGKGYHLMSFPQSAPHGVVFLHVTYVPAQEKNFTTAPAICHDGKAHFPREGVFVSNGTHWFVTQRNFCEPQIITTDNTFVSGNCDVVIGIVNNTVYDPLQPELDS

SEQ ID NO: 3049 - protein, 1147 aa, Artificial Sequence
  SARS-CoV-2/France/HF1805/2020__EPI_ISL_414628 spike protein (1-1147)(I714C_Y1110C)
MFVFLVLLPLVSSQCVNLTTRTQLPPAYTNSFTRGVYYPDKVFRSSVLHSTQDLFLPFFSNVTWFHAIHVSGTNGTKRFDNPVLPFNDGVYFASTEKSNIIRGWIFGTTLDSKTQSLLIVNNATNVVIKVCEFQFCNDPFLGVYYHKNNKSWMESEFRVYSSANNCTFEYVSQPFLMDLEGKQGNFKNLREFVFKNIDGYFKIYSKHTPINLVRDLPQGFSALEPLVDLPIGINITRFQTLLALHRSYLTPGDSSSGWTAGAAAYYVGYLQPRTFLLKYNENGTITDAVDCALDPLSETKCTLKSFTVEKGIYQTSNFRVQPTESIVRFPNITNLCPFGEVFNATRFASVYAWNRKRISNCVADYSVLYNSASFSTFKCYGVSPTKLNDLCFTNVYADSFVIRGDEVRQIAPGQTGKIADYNYKLPDDFTGCVIAWNSNNLDSKVGGNYNYLYRLFRKSNLKPFERDISTEIYQAGSTPCNGVEGFNCYFPLQSYGFQPTNGVGYQPYRVVVLSFELLHAPATVCGPKKSTNLVKNKCVNFNFNGLTGTGVLTESNKKFLPFQQFGRDIADTTDAVRDPQTLEILDITPCSFGGVSVITPGTNTSNQVAVLYQGVNCTEVPVAIHADQLTPTWRVYSTGSNVFQTRAGCLIGAEHVNNSYECDIPIGAGICASYQTQTNSPRRARSVASQSIIAYTMSLGAENSVAYSNNSIACPTNFTISVTTEILPVSMTKTSVDCTMYICGDSTECSNLLLQYGSFCTQLNRALTGIAVEQDKNTQEVFAQVKQIYKTPPIKDFGGFNFSQILPDPSKPSKRSFIEDLLFNKVTLADAGFIKQYGDCLGDIAARDLICAQKFNGLTVLPPLLTDEMIAQYTSALLAGTITSGWTFGAGAALQIPFAMQMAYRFNGIGVTQNVLYENQKLIANQFNSAIGKIQDSLSSTASALGKLQDVVNQNAQALNTLVKQLSSNFGAISSVLNDILSRLDKVEAEVQIDRLITGRLQSLQTYVTQQLIRAAEIRASANLAATKMSECVLGQSKRVDFCGKGYHLMSFPQSAPHGVVFLHVTYVPAQEKNFTTAPAICHDGKAHFPREGVFVSNGTHWFVTQRNFCEPQIITTDNTFVSGNCDVVIGVVNNTVYDPLQPELDS

SEQ ID NO: 3050 - protein, 1147 aa, Artificial Sequence
  SARS-CoV-2/Netherlands/ZuidHolland_9/2020__EPI_ISL_414445 spike protein (1-1147)(I714C_Y1110C)
MFVFLVLLPLVSSQCVNLTTRTQLPPAYTNSFTRGVYYPDKVFRSSVLHSTQDLFLPFFSNVTWFHAIHVSGTNGTKRFDNPVLPFNDGVYFASTEKSNIIRGWIFGTTLDSKTQSLLIVNNATNVVIKVCEFQFCNDPFLGVYYHKNNKSWMESEFRVYSSANNCTFEYVSQPFLMDLEGKQGNFKNLREFVFKNIDGYFKIYSKHTPINLVRDLPQGFSALEPLVDLPIGINITRFQTLLALHRSYLTPGDSSSGWTAGAAAYYVGYLQPRTFLLKYNENGTITDAVDCALDPLSETKCTLKSFTVEKGIYQTSNFRVQPTESIVRFPNITNLCPFGEVFNATRFASVYAWNRKRISNCVADYSVLYNSASFSTFKCYGVSPTKLNDLCFTNVYADSFVIRGDEVRQIAPGQTGKIADYNYKLPDDFTGCVIAWNSNNLDSKVGGNYNYLYRLFRKSNLKPFERDISTEIYQAGSTPCNGVEGFNCYFPLQSYGFQPTNGVGYQPYRVVVLSFELLHAPATVCGPKKSTNLVKNKCVNFNFNGLTGTGVLTESNKKFLPFQQFGRDIADTTDAVRDPQTLEILDITPCSFGGVSVITPGTNTSNQVAVLYQGVNCTEVPVAIHADQLTPTWRVYSTGSNVFQTRAGCLIGAEHVNNSYECDIPIGAGICASYQTQTNSPRRARSVASQSIIAYTMSLGAENSVAYSNNSIACPTNFTISVTTEILPVSMTKTSVDCTMYICGDSTECSNLLLQYGSFCTQLNRALTGIAVEQDKNTQEVFAQVKQIYKTPPIKDFGGFNFSQILPDPSKPSKRSFIEDLLFNKVTLADAGFIKQYGDCLGDIAARDLICVQKFNGLTVLPPLLTDEMIAQYTSALLAGTITSGWTFGAGAALQIPFAMQMAYRFNGIGVTQNVLYENQKLIANQFNSAIGKIQDSLSSTASALGKLQDVVNQNAQALNTLVKQLSSNFGAISSVLNDILSRLDKVEAEVQIDRLITGRLQSLQTYVTQQLIRAAEIRASANLAATKMSECVLGQSKRVDFCGKGYHLMSFPQSAPHGVVFLHVTYVPAQEKNFTTAPAICHDGKAHFPREGVFVSNGTHWFVTQRNFCEPQIITTDNTFVSGNCDVVIGIVNNTVYDPLQPELDS

SEQ ID NO: 3051 - protein, 1147 aa, Artificial Sequence
  SARS-CoV-2/Finland/FIN03032020A/2020__EPI_ISL_413602 spike protein (1-1147)(I714C_Y1110C)
MFVFLVLLPLVSSQCVNLTTRTQLPPAYTNSFTRGVYYPDKVFRSSVLHSTQDLFLPFFSNVTWFHAIHVSGTNGTKRFDNPVLPFNDGVYFASTEKSNIIRGWIFGTTLDSKTQSLLIVNNATNVVIKVCEFQFCNDPFLGVYYHKNNKSWMESEFRVYSSANNCTFEYVSQPFLMDLEGKQGNFKNLREFVFKNIDGYFKIYSKHTPINLVRDLPQGFSALEPLVDLPIGINITRFQTLLALHRSYLTPGDSSSGWTAGAAAYYVGYLQPRTFLLKYNENGTITDAVDCALDPLSETKCTLKSFTVEKGIYQTSNFRVQPTESIVRFPNITNLCPFGEVFNATRFASVYAWNRKRISNCVADYSVLYNSASFSTFKCYGVSPTKLNDLCFTNVYADSFVIRGDEVRQIAPGQTGKIADYNYKLPDDFTGCVISWNSNNLDSKVGGNYNYLYRLFRKSNLKPFERDISTEIYQAGSTPCNGVEGFNCYFPLQSYGFQPTNGVGYQPYRVVVLSFELLHAPATVCGPKKSTNLVKNKCVNFNFNGLTGTGVLTESNKKFLPFQQFGRDIADTTDAVRDPQTLEILDITPCSFGGVSVITPGTNTSNQVAVLYQGVNCTEVPVAIHADQLTPTWRVYSTGSNVFQTRAGCLIGAEHVNNSYECDIPIGAGICASYQTQTNSPRRARSVASQSIIAYTMSLGAENSVAYSNNSIACPTNFTISVTTEILPVSMTKTSVDCTMYICGDSTECSNLLLQYGSFCTQLNRALTGIAVEQDKNTQEVFAQVKQIYKTPPIKDFGGFNFSQILPDPSKPSKRSFIEDLLFNKVTLADAGFIKQYGDCLGDIAARDLICAQKFNGLTVLPPLLTDEMIAQYTSALLAGTITSGWTFGAGAALQIPFAMQMAYRFNGIGVTQNVLYENQKLIANQFNSAIGKIQDSLSSTASALGKLQDVVNQNAQALNTLVKQLSSNFGAISSVLNDILSRLDKVEAEVQIDRLITGRLQSLQTYVTQQLIRAAEIRASANLAATKMSECVLGQSKRVDFCGKGYHLMSFPQSAPHGVVFLHVTYVPAQEKNFTTAPAICHDGKAHFPREGVFVSNGTHWFVTQRNFCEPQIITTDNTFVSGNCDVVIGIVNNTVYDPLQPELDS

SEQ ID NO: 3052 - protein, 1147 aa, Artificial Sequence
  SARS-CoV-2/France/GE1977/2020__EPI_ISL_414632 spike protein (1-1147)(I714C_Y1110C)
MFVFLVLLPLVSSQCVNLTTRTQLPPAYTNSFTRGVYYPDKVFRSSVLHSTQDLFLPFFSNVTWFHAIHVSGTNGTKRFDNPVLPFNDGVYFASTEKSNIIRGWIFGTTLDSKTQSLLIVNNATNVVIKVCEFQFCNDPFLGVYYHKNNKSWMESEFRVYSSANNCTFEYVSQPFLMDLEGKQGNFKNLREFVFKNIDGYFKIYSKHTPINLVRDLPQGFSALEPLVDLPIGINITRFQTLLALHRSYLTPGDSSSGWTAGAAAYYVGYLQPRTFLLKYNENGTITDAVDCALDPLSETKCTLKSFTVEKGIYQTSNFRVQPTESIVRFPNITNLCPFGEVFNATRFASVYAWNRKRISNCVADYSVLYNSASFSTFKCYGVSPTKLNDLCFTNVYADSFVIRGDEVRQIAPGQTGKIADYNYKLPDDFTGCVIAWNSNNLDSKVGGNYNYLYRLFRKSNLKPFERDISTEIYQAGSTPCNGVEGFNCYFPLQSYGFQPTNGVGYQPYRVVVLSFELLHAPATVCGPKKSTNLVKNKCVNFNFNGLTGTGVLTESNKKFLPFQQFGRDIADTTDAVRDPQTLEILDITPCSFGGVSVITPGTNTSNQVAVLYQGVNCTEVPVAIHADQLTPTWRVYSTGSNVFQTRAGCLIGAEHVNNSYECDIPIGAGICASYQTQTNSPRRARSVASQSIIAYTMSLGAENSVAYSNNSIACPTNFTISVTTEILPVSMTKTSVDCTMYICGDSTECSNLLLQYGSFCTQLNRALTGIAVEQDKNTQEVFAQVKQIYKTPPIKDFGGFNFSQILPDPSKPSKRSFIEDLLFNKVTLADAGFIKQYGDCLGDIAARDLICAQKFNGLTVLPPLLTDEMIAQYTSALLAGTITSGWTFGAGAALQIPFAMQMAYRFNGIGVTQNVLYENQKLIANQFNSAIGKIQDSLFSTASALGKLQDVVNQNAQALNTLVKQLSSNFGAISSVLNDILSRLDKVEAEVQIDRLITGRLQSLQTYVTQQLIRAAEIRASANLAATKMSECVLGQSKRVDFCGKGYHLMSFPQSAPHGVVFLHVTYVPAQEKNFTTAPAICHDGKAHFPREGVFVSNGTHWFVTQRNFCEPQIITTDNTFVSGNCDVVIGIVNNTVYDPLQPELDS

SEQ ID NO: 3053 - protein, 1147 aa, Artificial Sequence
  SARS-CoV-2/Finland/FIN-313/2020__EPI_ISL_414641 spike protein (1-1147)(I714C_Y1110C)
MFVFLVLLPLVSSQCVNLTTRTQLPPAYTNSFTRGVYYPDKVFRSSVLHSTQDLFLPFFSNVTWFHAIHVSGTNGTKRFDNPVLPFNDGVYFASTEKSNIIRGWIFGTTLDSKTQSLLIVNNATNVVIKVCEFQFCNDPFLGVYYHKNNKSWMESEFRVYSSANNCTFEYVSQPFLMDLEGKQGNFKNLREFVFKNIDGYFKIYSKHTPINLVRDLPQGFSALEPLVDLPIGINITRFKTLLALHRSYLTPGDSSSGWTAGAAAYYVGYLQPRTFLLKYNENGTITDAVDCALDPLSETKCTLKSFTVEKGIYQTSNFRVQPTESIVRFPNITNLCPFGEVFNATRFASVYAWNRKRISNCVADYSVLYNSASFSTFKCYGVSPTKLNDLCFTNVYADSFVIRGDEVRQIAPGQTGKIADYNYKLPDDFTGCVIAWNSNNLDSKVGGNYNYLYRLFRKSNLKPFERDISTEIYQAGSTPCNGVEGFNCYFPLQSYGFQPTNGVGYQPYRVVVLSFELLHAPATVCGPKKSTNLVKNKCVNFNFNGLTGTGVLTESNKKFLPFQQFGRDIADTTDAVRDPQTLEILDITPCSFGGVSVITPGTNTSNQVAVLYQGVNCTEVPVAIHADQLTPTWRVYSTGSNVFQTRAGCLIGAEHVNNSYECDIPIGAGICASYQTQTNSPRRARSVASQSIIAYTMSLGAENSVAYSNNSIACPTNFTISVTTEILPVSMTKTSVDCTMYICGDSTECSNLLLQYGSFCTQLNRALTGIAVEQDKNTQEVFAQVKQIYKTPPIKDFGGFNFSQILPDPSKPSKRSFIEDLLFNKVTLADAGFIKQYGDCLGDIAARDLICAQKFNGLTVLPPLLTDEMIAQYTSALLAGTITSGWTFGAGAALQIPFAMQMAYRFNGIGVTQNVLYENQKLIANQFNSAIGKIQDSLSSTASALGKLQDVVNQNAQALNTLVKQLSSNFGAISSVLNDILSRLDKVEAEVQIDRLITGRLQSLQTYVTQQLIRAAEIRASANLAATKMSECVLGQSKRVDFCGKGYHLMSFPQSAPHGVVFLHVTYVPAQEKNFTTAPAICHDGKAHFPREGVFVSNGTHWFVTQRNFCEPQIITTDNTFVSGNCDVVIGIVNNTVYDPLQPELDS

SEQ ID NO: 3054 - protein, 1147 aa, Artificial Sequence
  SARS-CoV-2/Netherlands/ZuidHolland_2/2020__EPI_ISL_414556 spike protein (1-1147)(I714C_Y1110C)
MFVFLVLLPLVSSQCVNLTTRTQLPPAYTNSFTRGVYYPDKVFRSSVLHSTQDLFLPFFSNVTWFHAIHVSGTNGTKRFDNPVLPFNDGVYFASTEKSNIIRGWIFGTTLDSKTQSLLIVNNATNVVIKVCEFQFCNDPFLGVYYHKNNKSWMESEFRVYSSANNCTFEYVSQPFLMDLEGKQGNFKNLREFVFKNIDGYFKIYSKHTPINLVRDLPQGFSALEPLVDLPIGINITRFQTLLALHRSYLTPGDSSSGWTAGAAAYYVGYLQPRTFLLKYNENGTITDAVDCALDPLSETKCTLKSFTVEKGIYQTSNFRVQPTESIVRFPNITNLCPFGEVFNATRFASVYAWNRKRISNCVADYSVLYNSASFSTFKCYGVSPTKLNDLCFTNVYADSFVIRGDEVRQIAPGQTGKIADYNYKLPDDFTGCVIAWNSNNLDSKVGGNYNYLYRLFRKSNLKPFERDISTEIYQAGSTPCNGVEGFNCYFPLQSYGFQPTNGVGYQPYRVVVLSFELLHAPATVCGPKKSTNLVKNKCVNFNFNGLTGTGVLTESNKKFLPFQQFGRDIADTTDAVRDPQTLEILDITPCSFGGVSVITPGTNTSNQVAVLYQGVNCTEVPVAIHADQLTPTWRVYSTGSNVFQTRAGCLIGAEHVNNSYECDIPIGAGICASYQTQTNSPRRARSVASQSIIAYTMSLGAENSVAYSNNSIACPTNFTISVTTEILPVSMTKTSVDCTMYICGDSTECSNLLLQYGSFCTQLNRALTGIALEQDKNTQEVFAQVKQIYKTPPIKDFGGFNFSQILPDPSKPSKRSFIEDLLFNKVTLADAGFIKQYGDCLGDIAARDLICAQKFNGLTVLPPLLTDEMIAQYTSALLAGTITSGWTFGAGAALQIPFAMQMAYRFNGIGVTQNVLYENQKLIANQFNSAIGKIQDSLSSTASALGKLQDVVNQNAQALNTLVKQLSSNFGAISSVLNDILSRLDKVEAEVQIDRLITGRLQSLQTYVTQQLIRAAEIRASANLAATKMSECVLGQSKRVDFCGKGYHLMSFPQSAPHGVVFLHVTYVPAQEKNFTTAPAICHDGKAHFPREGVFVSNGTHWFVTQRNFCEPQIITTDNTFVSGNCDVVIGIVNNTVYDPLQPELDS

SEQ ID NO: 3055 - protein, 1147 aa, Artificial Sequence
  SARS-CoV-2/USA/WA-UW31/2020__EPI_ISL_414618 spike protein (1-1147)(I714C_Y1110C)
MFVFLVLLPLVSSQCVNLTTRTQLPPAYTNSFTRGVYYPDKVFRSSVLHSTQDLFLPFFSNVTWFHAIHVSGTNGTKRFDNPVLPFNDGVYFASTEKSNIIRGWIFGTTLDSKTQSLLIVNNATNVVIKVCEFQFCNDPFLGVYYHKNNKSWMESEFRVYSSANNCTFEYVSQPFLMDLEGKQGNFKNLREFVFKNIDGYFKIYSKHTPINLVRDLPQGFSALEPLVDLPIGINITRFQTLLALHRSYLTPGDSSSGWTAGAAAYYVGYLQPRTFLLKYNENGTITDAVDCALDPLSETKCTLKSFTVEKGIYQTSNFRVQPTESIVRFPNITNLCPFGEVFNATRFASVYAWNRKRISNCVADYSVLYNSASFSTFKCYGVSPTKLNDLCFTNVYADSFVIRGDEVRQIAPGQTGKIADYNYKLPDDFTGCVIAWNSNNLDSKVGGNYNYLYRLFRKSNLKPFERDISTEIYQAGSTPCNGAEGFNCYFPLQSYGFQPTNGVGYQPYRVVVLSFELLHAPATVCGPKKSTNLVKNKCVNFNFNGLTGTGVLTESNKKFLPFQQFGRDIADTTDAVRDPQTLEILDITPCSFGGVSVITPGTNTSNQVAVLYQDVNCTEVPVAIHADQLTPTWRVYSTGSNVFQTRAGCLIGAEHVNNSYECDIPIGAGICASYQTQTNSPRRARSVASQSIIAYTMSLGAENSVAYSNNSIACPTNFTISVTTEILPVSMTKTSVDCTMYICGDSTECSNLLLQYGSFCTQLNRALTGIAVEQDKNTQEVFAQVKQIYKTPPIKDFGGFNFSQILPDPSKPSKRSFIEDLLFNKVTLADAGFIKQYGDCLGDIAARDLICAQKFNGLTVLPPLLTDEMIAQYTSALLAGTITSGWTFGAGAALQIPFAMQMAYRFNGIGVTQNVLYENQKLIANQFNSAIGKIQDSLSSTASALGKLQDVVNQNAQALNTLVKQLSSNFGAISSVLNDILSRLDKVEAEVQIDRLITGRLQSLQTYVTQQLIRAAEIRASANLAATKMSECVLGQSKRVDFCGKGYHLMSFPQSAPHGVVFLHVTYVPAQEKNFTTAPAICHDGKAHFPREGVFVSNGTHWFVTQRNFCEPQIITTDNTFVSGNCDVVIGIVNNTVYDPLQPELDS

SEQ ID NO: 3056 - protein, 1147 aa, Artificial Sequence
  SARS-CoV-2/South Korea/SNU01/2020__EPI_ISL_411929 spike protein (1-1147)(I714C_Y1110C)
MFVFLVLLPLVSSQCVNLTTRTQLPPAYTNSFTRGVYYPDKVFRSSVLHSTQDLFLPFFSNVTWFHAIHVSGTNGTKRFDNPVLPFNDGVYFASTEKSNIIRGWIFGTTLDSKTQSLLIVNNATNVVIKVCEFQFCNDPFLGVYYHKNNKSWMESEFRVYSSANNCTFEYVSQPFLMDLEGKQGNFKNLREFVFKNIDGYFKIYSKHTPINLVRDLPQGFWALEPLVDLPIGINITRFQTLLALHRSYLTPGDSSSGWTAGAAAYYVGYLQPRTFLLKYNENGTITDAVDCALDPLSETKCTLKSFTVEKGIYQTSNFRVQPTESIVRFPNITNLCPFGEVFNATRFASVYAWNRKRISNCVADYSVLYNSASFSTFKCYGVSPTKLNDLCFTNVYADSFVIRGDEVRQIAPGQTGKIADYNYKLPDDFTGCVIAWNSNNLDSKVGGNYNYLYRLFRKSNLKPFERDISTEIYQAGSTPCNGVEGFNCYFPLQSYGFQPTNGVGYQPYRVVVLSFELLHAPATVCGPKKSTNLVKNKCVNFNFNGLTGTGVLTESNKKFLPFQQFGRDIADTTDAVRDPQTLEILDITPCSFGGVSVITPGTNTSNQVAVLYQDVNCTEVPVAIHADQLTPTWRVYSTGSNVFQTRAGCLIGAEHVNNSYECDIPIGAGICASYQTQTNSPRRARSVASQSIIAYTMSLGAENSVAYSNNSIACPTNFTISVTTEILPVSMTKTSVDCTMYICGDSTECSNLLLQYGSFCTQLNRALTGIAVEQDKNTQEVFAQVKQIYKTPPIKDFGGFNFSQILPDPSKPSKRSFIEDLLFNKVTLADAGFIKQYGDCLGDIAARDLICAQKFNGLTVLPPLLTDEMIAQYTSALLAGTITSGWTFGAGAALQIPFAMQMAYRFNGIGVTQNVLYENQKLIANQFNSAIGKIQDSLSSTASALGKLQDVVNQNAQALNTLVKQLSSNFGAISSVLNDILSRLDKVEAEVQIDRLITGRLQSLQTYVTQQLIRAAEIRASANLAATKMSECVLGQSKRVDFCGKGYHLMSFPQSAPHGVVFLHVTYVPAQEKNFTTAPAICHDGKAHFPREGVFVSNGTHWFVTQRNFCEPQIITTDNTFVSGNCDVVIGIVNNTVYDPLQPELDS

SEQ ID NO: 3057 - protein, 1147 aa, Artificial Sequence
  SARS-CoV-2/China/WF0004/2020__EPI_ISL_413694 spike protein (1-1147)(I714C_Y1110C)
MFVFLVLLPLVSSQCVNLTTRTQLPPAYTNSFTRGVYYPDKVFRSSVLHSTQDLFLPFFSNVTWFHAIHVSGTNGTKRFDNPVLPFNDGVYFASTEKSNIIRGWIFGTTLDSKTQSLLIVNNATNVVIKVCEFQFCNDPFLGVYYHKNNKSWTESEFRVYSSANNCTFEYVSQPFLMDLEGKQGNFKNLREFVFKNIDGYFKIYSKHTPINLVRDLPQGFSALEPLVDLPIGINITRFQTLLALHRSYLTPGDSSSGWTAGAAAYYVGYLQPRTFLLKYNENGTITDAVDCALDPLSETKCTLKSFTVEKGIYQTSNFRVQPTESIVRFPNITNLCPFGEVFNATRFASVYAWNRKRISNCVADYSVLYNSASFSTFKCYGVSPTKLNDLCFTNVYADSFVIRGDEVRQIAPGQTGKIADYNYKLPDDFTGCVIAWNSNNLDSKVGGNYNYLYRLFRKSNLKPFERDISTEIYQAGSTPCNGVEGFNCYFPLQSYGFQPTNGVGYQPYRVVVLSFELLHAPATVCGPKKSTNLVKNKCVNFNFNGLTGTGVLTESNKKFLPFQQFGRDIADTTDAVRDPQTLEILDITPCSFGGVSVITPGTNTSNQVAVLYQDVNCTEVPVAIHADQLTPTWRVYSTGSNVFQTRAGCLIGAEHVNNSYECDIPIGAGICASYQTQTNSPRRARSVASQSIIAYTMSLGAENSVAYSNNSIACPTNFTISVTTEILPVSMTKTSVDCTMYICGDSTECSNLLLQYGSFCTQLNRALTGIAVEQDKNTQEVFAQVKQIYKTPPIKDFGGFNFSQILPDPSKPSKRSFIEDLLFNKVTLADAGFIKQYGDCLGDIAARDLICAQKFNGLTVLPPLLTDEMIAQYTSALLAGTITSGWTFGAGAALQIPFAMQMAYRFNGIGVTQNVLYENQKLIANQFNSAIGKIQDSLSSTASALGKLQDVVNQNAQALNTLVKQLSSNFGAISSVLNDILSRLDKVEAEVQIDRLITGRLQSLQTYVTQQLIRAAEIRASANLAATKMSECVLGQSKRFDFCGKGYHLMSFPQSAPHGVVFLHVTYVPAQEKNFTTAPAICHDGKAHFPREGVFVSNGTHWFVTQRNFCEPQIITTDNTFVSGNCDVVIGIVNNTVYDPLQPELDS

SEQ ID NO: 3058 - protein, 1147 aa, Artificial Sequence
  SARS-CoV-2/China/WF0028/2020__EPI_ISL_413791 spike protein (1-1147)(I714C_Y1110C)
MFVFLVLLPLVSSQCVNLTTRTQLPPAYTNSFTRGVYYPDKVFRSSVLHSTQDLFLPFFSNVTWFHAIHVSGTNGTKRFDNPVLPFNDGVYFASTEKSNIIRGWIFGTTLDSKTQSLLIVNNATNVVIKVCEFQFCNDPFLGVYYHKNNKSWMESEFRVYSSANNCTFEYVSQPFLMDLEGKQGNFKNLREFVFKNIDGYFKIYSKHTPINLVRDLPQGFSALEPLVDLPIGINITRFQTLLALHRSYLTPGDSSSGWTAGAAAYYVGYLQPRTFLLKYNENGTITDAVDCALDPLSETKCTLKSFTVEKGIYQTSNFRVQPTESIVRFPNITNLCPFGEVFNATRFASVYAWNRKRISNCVADYSVLYNSASFSTFKCYGVSPTKLNDLCFTNVYADSFVIRGDEVRQIAPGQTGKIADYNYKLPDDFTGCVIAWNSNNLDSKVGGNYNYLYRLFRKSNLKPFERDISTEIYQAGSTPCNGVEGFNCYFPLQSYGFQPTNGVGYQPYRVVVLSFELLHAPATVCGPKKSTNLVKNKCVNFNFNGLTGTGVLTESNKKFLPFQQFGRDIADTTDAVRDPQTLEILDITPCSFGGVSVITPGTNTSNQVAVLYQDVNCTEVPVAIHADQLTPTWRVYSTGSNVFQTRAGCLIGAEHVNNSYECDIPIGAGICASYQTQTNSPRRARSVASQSIIAYTMSLGAENSVAYSNNSIACPTNFTISVTTEILPVSMTKTSVDCTMYICGDSTECSNLLLQYGSFCTQLNRALTGIAVEQDKNTQEVFAQVKQIYKTPPIKDFGGFNFSQILPDPSKPSKRSFIEDLLFNKVTLADAGFIKQYGDCLGDIAARDLICAQKFNGLTVLPPLLTDEMIAQYTSALLAGTITSGWTFGAGAALQIPFAMQMAYRFNGIGVTQNVLYENQKLIANQFNSAIGKIQDSLSSTASALGKLQDVVNQNAQALNTLVKQLSSNFGAISSVLNDILSRLDKVEAEVQIDRLITGRLQSLQTYVTQQLIRAAEIRASANLAATKMSECVLGQSKRVDFCGKGYHLMSFPQSAPHGVVFLHVTYVPAQEKNFTTAPAICHDGKAHFPREGVFVSNGTHWFVTQRNFCEPQIITTDNTFVSGNCDVVIGIVNNTVYDPLQPELES

SEQ ID NO: 3059 - protein, 1147 aa, Artificial Sequence
  SARS-CoV-2/2019-nCoV/USA-CruiseA-18/2020__MT159716.1 spike protein (1-1147)(I714C_Y1110C)
MFVFLVLLPLVSSQCVNLTTRTQLPPAYTNSFTRGVYYPDKVFRSSVLHSTQDLFLPFFSNVTWFHAIHVSGTNGTKRFDNPVLPFNDGVYFASTEKSNIIRGWIFGTTLDSKTQSLLIVNNATNVVIKVCEFQFCNDPFLGVYYHKNNKSWMESELRVYSSANNCTFEYVSQPFLMDLEGKQGNFKNLREFVFKNIDGYFKIYSKHTPINLVRDLPQGFSALEPLVDLPIGINITRFQTLLALHRSYLTPGDSSSGWTAGAAAYYVGYLQPRTFLLKYNENGTITDAVDCALDPLSETKCTLKSFTVEKGIYQTSNFRVQPTESIVRFPNITNLCPFGEVFNATRFASVYAWNRKRISNCVADYSVLYNSASFSTFKCYGVSPTKLNDLCFTNVYADSFVIRGDEVRQIAPGQTGKIADYNYKLPDDFTGCVIAWNSNNLDSKVGGNYNYLYRLFRKSNLKPFERDISTEIYQAGSTPCNGVEGFNCYFPLQSYGFQPTNGVGYQPYRVVVLSFELLHAPATVCGPKKSTNLVKNKCVNFNFNGLTGTGVLTESNKKFLPFQQFGRDIADTTDAVRDPQTLEILDITPCSFGGVSVITPGTNTSNQVAVLYQDVNCTEVPVAIHADQLTPTWRVYSTGSNVFQTRAGCLIGAEHVNNSYECDIPIGAGICASYQTQTNSPRRARSVASQSIIAYTMSLGAENSVAYSNNSIACPTNFTISVTTEILPVSMTKTSVDCTMYICGDSTECSNLLLQYGSFCTQLNRALTGIAVEQDKNTQEVFAQVKQIYKTPPIKDFGGFNFSQILPDPSKPSKRSFIEDLLFNKVTLADAGFIKQYGDCLGDIAARDLICAQKFNGLTVLPPLLTDEMIAQYTSALLAGTITSGWTFGAGAALQIPFAMQMAYRFNGIGVTQNVLYENQKLIANQFNSAIGKIQDSLSSTASALGKLQDVVNQNAQALNTLVKQLSSNFGAISSVLNDILSRLDKVEAEVQIDRLITGRLQSLQTYVTQQLIRAAEIRASANLAATKMSECVLGQSKRVDFCGKGYHLMSFPQSAPHGVVFLHVTYVPAQEKNFTTAPAICHDGKAHFPREGVFVSNGTHWFVTQRNFCEPQIITTDNTFVSGNCDVVIGIVNNTVYDPLQPELDS

SEQ ID NO: 3060 - protein, 1147 aa, Artificial Sequence
  SARS-CoV-2/SARS-CoV-2/Yunnan-01/human/2020/CHN__MT049951.1 spike protein (1-1147)(I714C_Y1110C)
MFVFLVLLPLVSSQCVNLTTRTQLPPANTNSFTRGVYYPDKVFRSSVLHSTQDLFLPFFSNVTWFHAIHVSGTNGTKRFDNPVLPFNDGVYFASTEKSNIIRGWIFGTTLDSKTQSLLIVNNATNVVIKVCEFQFCNDPFLGVYYHKNNKSWMESEFRVYSSANNCTFEYVSQPFLMDLEGKQGNFKNLREFVFKNIDGYFKIYSKHTPINLVRDLPQGFSALEPLVDLPIGINITRFQTLLALHRSYLTPGDSSSGWTAGAAAYYVGYLQPRTFLLKYNENGTITDAVDCALDPLSETKCTLKSFTVEKGIYQTSNFRVQPTESIVRFPNITNLCPFGEVFNATRFASVYAWNRKRISNCVADYSVLYNSASFSTFKCYGVSPTKLNDLCFTNVYADSFVIRGDEVRQIAPGQTGKIADYNYKLPDDFTGCVIAWNSNNLDSKVGGNYNYLYRLFRKSNLKPFERDISTEIYQAGSTPCNGVEGFNCYFPLQSYGFQPTNGVGYQPYRVVVLSFELLHAPATVCGPKKSTNLVKNKCVNFNFNGLTGTGVLTESNKKFLPFQQFGRDIADTTDAVRDPQTLEILDITPCSFGGVSVITPGTNTSNQVAVLYQDVNCTEVPVAIHADQLTPTWRVYSTGSNVFQTRAGCLIGAEHVNNSYECDIPIGAGICASYQTQTNSPRRARSVASQSIIAYTMSLGAENSVAYSNNSIACPTNFTISVTTEILPVSMTKTSVDCTMYICGDSTECSNLLLQYGSFCTQLNRALTGIAVEQDKNTQEVFAQVKQIYKTPPIKDFGGFNFSQILPDPSKPSKRSFIEDLLFNKVTLADAGFIKQYGDCLGDIAARDLICAQKFNGLTVLPPLLTDEMIAQYTSALLAGTITSGWTFGAGAALQIPFAMQMAYRFNGIGVTQNVLYENQKLIANQFNSAIGKIQDSLSSTASALGKLQDVVNQNAQALNTLVKQLSSNFGAISSVLNDILSRLDKVEAEVQIDRLITGRLQSLQTYVTQQLIRAAEIRASANLAATKMSECVLGQSKRVDFCGKGYHLMSFPQSAPHGVVFLHVTYVPAQEKNFTTAPAICHDGKAHFPREGVFVSNGTHWFVTQRNFCEPQIITTDNTFVSGNCDVVIGIVNNTVYDPLQPELDS

SEQ ID NO: 3061 - protein, 1147 aa, Artificial Sequence
  SARS-CoV-2/USA/WA-UW292/2020__EPI_ISL_418077 spike protein (1-1147)(I714C_Y1110C)
MFVFLVLLPLVSSQCVNLTTRTQLPPAYTNSFTRGVYYPDKVFRSSVLHSTQDLFLPFFSNVTWFHAIHVSGTNGTKRFDNPVLPFNDGVYFASTEKSNIIRGWIFGTTLDSKTQSLLIVNNATNVVIKVCEFQFCNDPFLGVYYHKNNKSWMESEFRVYSSANNCTFEYVSQPFLMDLEGKQGNFKNLREFVFKNIDGYFKIYSKHTPINLVRDLPQGFSALEPLVDLPIGINITRFQTLLALHRSYLTPGDSSSGWTAGAAAYYVGYLQPRTFLLKYNENGTITDAVDCALDPLSETKCTLKSFTVEKGIYQTSNFRVQPTESIVRFPNITNLCPFGEVFNATRFASVYAWNRKRISNCVADYSVLYNSASFSTFKCYGVSPTKLNDLCFTNVYADSFVIRGDEVRQIAPGQTGKIADYNYKLPDDFTGCVIAWNSNNLDSKVGGNYNYLYRLFRKSNLKPFERDISTEIYQASSTPCNGVEGFNCYFPLQSYGFQPTNGVGYQPYRVVVLSFELLHAPATVCGPKKSTNLVKNKCVNFNFNGLTGTGVLTESNKKFLPFQQFGRDIADTTDAVRDPQTLEILDITPCSFGGVSVITPGTNTSNQVAVLYQDVNCTEVPVAIHADQLTPTWRVYSTGSNVFQTRAGCLIGAEHVNNSYECDIPIGAGICASYQTQTNSPRRARSVASQSIIAYTMSLGAENSVAYSNNSIACPTNFTISVTTEILPVSMTKTSVDCTMYICGDSTECSNLLLQYGSFCTQLNRALTGIAVEQDKNTQEVFAQVKQIYKTPPIKDFGGFNFSQILPDPSKPSKRSFIEDLLFNKVTLADAGFIKQYGDCLGDIAARDLICAQKFNGLTVLPPLLTDEMIAQYTSALLAGTITSGWTFGAGAALQIPFAMQMAYRFNGIGVTQNVLYENQKLIANQFNSAIGKIQDSLSSTASALGKLQDVVNQNAQALNTLVKQLSSNFGAISSVLNDILSRLDKVEAEVQIDRLITGRLQSLQTYVTQQLIRAAEIRASANLAATKMSECVLGQSKRVDFCGKGYHLMSFPQSAPHGVVFLHVTYVPAQEKNFTTAPAICHDGKAHFPREGVFVSNGTHWFVTQRNFCEPQIITTDNTFVSGNCDVVIGIVNNTVYDPLQPELDS

SEQ ID NO: 3062 - protein, 1147 aa, Artificial Sequence
  SARS-CoV-2/Iceland/192/2020__EPI_ISL_417819 spike protein (1-1147)(I714C_Y1110C)
MFVFFVLLPLVSSQCVNLTTRTQLPPAYTNSFTRGVYYPDKVFRSSVLHSTQDLFLPFFSNVTWFHAIHVSGTNGTKRFDNPVLPFNDGVYFASTEKSNIIRGWIFGTTLDSKTQSLLIVNNATNVVIKVCEFQFCNDPFLGVYYHKNNKSWMESEFRVYSSANNCTFEYVSQPFLMDLEGKQGNFKNLREFVFKNIDGYFKIYSKHTPINLVRDLPQGFSALEPLVDLPIGINITRFQTLLALHRSYLTPGDSSSGWTAGAAAYYVGYLQPRTFLLKYNENGTITDAVDCALDPLSETKCTLKSFTVEKGIYQTSNFRVQPTESIVRFPNITNLCPFGEVFNATRFASVYAWNRKRISNCVADYSVLYNSASFSTFKCYGVSPTKLNDLCFTNVYADSFVIRGDEVRQIAPGQTGKIADYNYKLPDDFTGCVIAWNSNNLDSKVGGNYNYLYRLFRKSNLKPFERDISTEIYQAGSTPCNGVEGFNCYFPLQSYGFQPTNGVGYQPYRVVVLSFELLHAPATVCGPKKSTNLVKNKCVNFNFNGLTGTGVLTESNKKFLPFQQFGRDIADTTDAVRDPQTLEILDITPCSFGGVSVITPGTNTSNQVAVLYQGVNCTEVPVAIHADQLTPTWRVYSTGSNVFQTRAGCLIGAEHVNNSYECDIPIGAGICASYQTQTNSPRRARSVASQSIIAYTMSLGAENSVAYSNNSIACPTNFTISVTTEILPVSMTKTSVDCTMYICGDSTECSNLLLQYGSFCTQLNRALTGIAVEQDKNTQEVFAQVKQIYKTPPIKDFGGFNFSQILPDPSKPSKRSFIEDLLFNKVTLADAGFIKQYGDCLGDIAARDLICAQKFNGLTVLPPLLTDEMIAQYTSALLAGTITSGWTFGAGAALQIPFAMQMAYRFNGIGVTQNVLYENQKLIANQFNSAIGKIQDSLSSTASALGKLQDVVNQNAQALNTLVKQLSSNFGAISSVLNDILSRLDKVEAEVQIDRLITGRLQSLQTYVTQQLIRAAEIRASANLAATKMSECVLGQSKRVDFCGKGYHLMSFPQSAPHGVVFLHVTYVPAQEKNFTTAPAICHDGKAHFPREGVFVSNGTHWFVTQRNFCEPQIITTDNTFVSGNCDVVIGIVNNTVYDPLQPELDS

SEQ ID NO: 3063 - protein, 1147 aa, Artificial Sequence
  SARS-CoV-2/Belgium/ULG-6939/2020__EPI_ISL_417020 spike protein (1-1147)(I714C_Y1110C)
MFVFLVLLPLVSSQCVNLTTRTQLPPAYTNSFTRGVYYPDKVFRSSVLHSTQDLFLPFFSNVTWFHAIHVSGTNGTKRFDNPVLPFNDGVYFASTEKSNIIRGWIFGTTLDSKTQSLLIVNNATNVVIKVCEFQFCNDPFLGVYYHKNNKSWMESEFRVYSSANNCTFEYVSQPFLMDLEGKQGNFKNLREFVFKNIDGYFKIYSKHTPINLVRDLPQGFSALEPLVDLPIGINITRFQTLLALHRSYLTPGDSSSGWTAGAAAYYVGYLQPRTFLLKYNENGTITDAVDCALDPLSETKCTLKSFTVEKGIYQTSNFRVQPTESIVRFPNITNLCPFGEVFNATRFASVYAWNRKRISNCVADYSVLYNSASFSTFKCYGVSPTKLNDLCFTNVYADSFVIRGDEVRQIAPGQTGKIADYNYKLPDDFTGCVIAWNSNNLDSKVGGNYNYLYRLFRKSNLKPFERDISTEIYQAGSTPCNGVEGFNCYFPLQSYGFQPTNGVGYQPYRVVVLSFELLHAPATVCGPKKSTNLVKNKCVNFNFNGLTGTGVLTESNKKFLPFQQFGRDIADTTDAVRDPQTLEILDITPCSFGGVSVITPGTNTSNQVAVLYQGVNCTEVPVAIHADQLTPTWRVYSTGSNVFQTRAGCLIGAEHVNNSYECDIPIGAGICASYQTQTNSPRRARSVASQSIIAYTMSLGAENSVVYSNNSIACPTNFTISVTTEILPVSMTKTSVDCTMYICGDSTECSNLLLQYGSFCTQLNRALTGIAVEQDKNTQEVFAQVKQIYKTPPIKDFGGFNFSQILPDPSKPSKRSFIEDLLFNKVTLADAGFIKQYGDCLGDIAARDLICAQKFNGLTVLPPLLTDEMIAQYTSALLAGTITSGWTFGAGAALQIPFAMQMAYRFNGIGVTQNVLYENQKLIANQFNSAIGKIQDSLSSTASALGKLQDVVNQNAQALNTLVKQLSSNFGAISSVLNDILSRLDKVEAEVQIDRLITGRLQSLQTYVTQQLIRAAEIRASANLAATKMSECVLGQSKRVDFCGKGYHLMSFPQSAPHGVVFLHVTYVPAQEKNFTTAPAICHDGKAHFPREGVFVSNGTHWFVTQRNFCEPQIITTDNTFVSGNCDVVIGIVNNTVYDPLQPELDS

SEQ ID NO: 3064 - protein, 1147 aa, Artificial Sequence
  SARS-CoV-2/France/HF2496/2020__EPI_ISL_418231 spike protein (1-1147)(I714C_Y1110C)
MFVFLVLLPLVSSQCVNLTTRTQLPPAYTNSFTRGVYYPDKVFRSSVLHSTQDLFLPFFSNVTWFHAIHVSGTNGTKRFDNPVLPFNDGVYFASTEKSNIIRGWIFGTTLDSKTQSLLIVNNATNVVIKVCEFQFCNDPFLGVYYHKNNKSWMESEFRVYSSANNCTFEYVSQPFLMDLEGKQGNFKNLREFVFKNIDGYFKIYSKHTPINLVRDLPQGFSALEPLVDLPIGINITRFQTLLALHRSYLTPGDSSSGWTAGAAAYYVGYLQPRTFLLKYNENGTITDAVDCALDPLSETKCTLKSFTVEKGIYQTSNFRVQPTESIVRFPNITNLCPFGEVFNATRFASVYAWNRKRISNCVADYSVLYNSASFSTFKCYGVSPTKLNDLCFTNVYADSFVIRGDEVRQIAPGQTGKIADYNYKLPDDFTGCVIAWNSNNLDSKVGGNYNYLYRLFRKSNLKPFERDISTEIYQAGSTPCNGVEGFNCYFPLQSYGFQPTNGVGYQPYRVVVLSFELLHAPATVCGPKKSTNLVKNKCVNFNFNGLTGTGVLTESNKKFLPFQQFGRDIADTTDAVRDPQTLEILDITPCSFGGVSVITPGTNTSNQVAVLYQGVNCTEVPVAIHADQLTPTWRVYSTGSNVFQTRAGCLIGAEHVNNSYECDIPIGAGICASYQTQTNSPRRARSVASQSIIAYTMSLGAENSVAYSNNSIACPTNFTISVTTEILPVSMTKTSVDCTMYICGDSTECSNLLLQYGSFCTQLNRALTGIAVEQDKNTQEVFAQVKQIYKTPPIKDFGGFNFSQILPDPSKPSKRSFIEDLLFNKVTLADAGFIKQYGDCLGDIVARDLICAQKFNGLTVLPPLLTDEMIAQYTSALLAGTITSGWTFGAGAALQIPFAMQMAYRFNGIGVTQNVLYENQKLIANQFNSAIGKIQDSLSSTASALGKLQDVVNQNAQALNTLVKQLSSNFGAISSVLNDILSRLDKVEAEVQIDRLITGRLQSLQTYVTQQLIRAAEIRASANLAATKMSECVLGQSKRVDFCGKGYHLMSFPQSAPHGVVFLHVTYVPAQEKNFTTAPAICHDGKAHFPREGVFVSNGTHWFVTQRNFCEPQIITTDNTFVSGNCDVVIGIVNNTVYDPLQPELDS

SEQ ID NO: 3065 - protein, 1147 aa, Artificial Sequence
  SARS-CoV-2/USA/WA-UW291/2020__EPI_ISL_418076 spike protein (1-1147)(I714C_Y1110C)
MFVFLVLLPLVSSQCVNLTTRTQLPPAYTNSFTRGVYYPDKVFRSSVLHSTQDLFLPFFSNVTWFHAIHVSGTNGTKRFDNPVLPFNDGVYFASTEKSNIIRGWIFGTTLDSKTQSLLIVNNATNVVIKVCEFQFCNDPFLGVYYHKNNKSWMESEFRVYSSANNCTFEYVSQPFLMDLEGKQGNFKNLREFVFKNIDGYFKIYSKHTPINLVRDLPQGFSALEPLVDLPIGINITRFQTLLALHRSYLTPGDSSSGWTAGAAAYYVGYLQPRTFLLKYNENGTITDAVDCALDPLSETKCTLKSFTVEKGIYQTSNFRVQPTESIVRFPNITNLCPFGEVFNATRFASVYAWNRKRISNCVADYSVLYNSASFSTFKCYGVSPTKLNDLCFTNVYADSFVIRGDEVRQIAPGQTGKIADYNYKLPDDFTGCVIAWNSNNLDSKVGGNYNYLYRLFRKSNLKPFERDISTEIYQAGSTPCNGVEGFNCYFPLQSYGFQPTNGVGYQPYRVVVLSFELLHAPATVCGPKKSTNLVKNKCVNFNFNGLTGTGVLTESNKKFLPFQQFGRDIADTTDAVRDPQTLEILDITPCSFGGVSVITPGTNTSNQVAVLYQGVNCTEVPVAIHADQLTPTWRVYSTGSNVFQTRAGCLIGAEHVNNSYECDIPIGAGICASYQTQTNSPRRARSVASQSIIAYTMSLGAENSVAYSNNSIACPTNFTISVTTEILPVSMTKTSVDCTMYICGDSTECSNLLLQYGSFCTQLNRALTGIAVEQDKNTQEVFAQVKQIYKTPPIKDFGGFNFSQILPDPSKPSKRSFIEDLLFNKVTLADAGFIKQYGDCLGDIAARDLICAQKFNGLTVLPPLLTDEMIAQYTSALLAGTITSGWTFGAGAALQIPFAMQMAYRFNGIGVTQNVLYENQKLIANQFNSAIGKIQYSLSSTASALGKLQDVVNQNAQALNTLVKQLSSNFGAISSVLNDILSRLDKVEAEVQIDRLITGRLQSLQTYVTQQLIRAAEIRASANLAATKMSECVLGQSKRVDFCGKGYHLMSFPQSAPHGVVFLHVTYVPAQEKNFTTAPAICHDGKAHFPREGVFVSNGTHWFVTQRNFCEPQIITTDNTFVSGNCDVVIGIVNNTVYDPLQPELDS

SEQ ID NO: 3066 - protein, 1147 aa, Artificial Sequence; identical to SEQ ID NO: 3029
  SARS-CoV-2/Portugal/PT0034/2020__EPI_ISL_418019 spike protein (1-1147)(I714C_Y1110C)

SEQ ID NO: 3067 - protein, 1147 aa, Artificial Sequence; identical to SEQ ID NO: 3021
  SARS-CoV-2/Iceland/202/2020__EPI_ISL_417750 spike protein (1-1147)(I714C_Y1110C)

SEQ ID NO: 3068 - protein, 1147 aa, Artificial Sequence
  SARS-CoV-2/USA/WA-UW261/2020__EPI_ISL_418046 spike protein (1-1147)(I714C_Y1110C)
MFVFLVLLPLVSSQCVNLTTRTQLPPAYTNSFTRGVYYPDKVFRSSVLHSTQDLFLPFFSNVTWFHAIHVSGTNGTKRFDNPVLPFNDGVYFASTEKSNIIRGWIFGTTLDSKTQSLLIVNNATNVVIKVCEFQFCNDPFLGVYYHKNNKSWMESEFRVYSSANNCTFEYVSQPFLMDLEGKQGNFKNLREFVFKNIDGYFKIYSKHTPINLVRDLPQGFSALEPLVDLPIGINITRFQTLLALHRSYLTPGDSSSGWTAGAAAYYVGYLQPRTFLLKYNENGTITDAVDCALDPLSETKCTLKSFTVEKGIYQTSNFRVQPTESIVRFPNITNLCPFGEVFNATRFTSVYAWNRKRISNCVADYSVLYNSASFSTFKCYGVSPTKLNDLCFTNVYADSFVIRGDEVRQIAPGQTGKIADYNYKLPDDFTGCVIAWNSNNLDSKVGGNYNYLYRLFRKSNLKPFERDISTEIYQAGSTPCNGVEGFNCYFPLQSYGFQPTNGVGYQPYRVVVLSFELLHAPATVCGPKKSTNLVKNKCVNFNFNGLTGTGVLTESNKKFLPFQQFGRDIADTTDAVRDPQTLEILDITPCSFGGVSVITPGTNTSNQVAVLYQDVNCTEVPVAIHADQLTPTWRVYSTGSNVFQTRAGCLIGAEHVNNSYECDIPIGAGICASYQTQTNSPRRARSVASQSIIAYTMSLGAENSVAYSNNSIACPTNFTISVTTEILPVSMTKTSVDCTMYICGDSTECSNLLLQYGSFCTQLNRALTGIAVEQDKNTQEVFAQVKQIYKTPPIKDFGGFNFSQILPDPSKPSKRSFIEDLLFNKVTLADAGFIKQYGDCLGDIAARDLICAQKFNGLTVLPPLLTDEMIAQYTSALLAGTITSGWTFGAGAALQIPFAMQMAYRFNGIGVTQNVLYENQKLIANQFNSAIGKIQDSLSSTASALGKLQDVVNQNAQALNTLVKQLSSNFGAISSVLNDILSRLDKVEAEVQIDRLITGRLQSLQTYVTQQLIRAAEIRASANLAATKMSECVLGQSKRVDFCGKGYHLMSFPQSAPHGVVFLHVTYVPAQEKNFTTAPAICHDGKAHFPREGVFVSNGTHWFVTQRNFCEPQIITTDNTFVSGNCDVVIGIVNNTVYDPLQPELDS

SEQ ID NO: 3069 - protein, 1147 aa, Artificial Sequence
  SARS-CoV-2/Portugal/PT0035/2020__EPI_ISL_418020 spike protein (1-1147)(I714C_Y1110C)
MFVFLVLLPLVSSQCVNLTTRTQLPPAYTNSFTRGVYYPDKVFRSSVLHSTQDLFLPFFSNVTWFHAIHVSGTNGTKRFDNPVLPFNDGVYFASTEKSNIIRGWIFGTTLDSKTQSLLIVNNATNVVIKVCEFQFCNDPFLGVYYHKNNKSWMESEFRVYSSANNCTFEYVSQPFLMDLEGKQGNFKNLREFVFKNIDGYFKIYSKHTPINLVRDLPQGFSALEPLVDLPIGINITRFQTLLALHRSYLTPGDSSSGWTAGAAAYYVGYLQPRTFLLKYNENGTITDAVDCALDPLSETKCTLKSFTVEKGIYQTSNFRVQPTESIVRFPNITNLCPFGEVFNATRFASVYAWNRKRISNCVADYSVLYNSASFSTFKCYGVSPTKLNDLCFTNVYADSFVIRGDEVRQIAPGQTGKIADYNYKLPDDFTGCVIAWNSNNLDSKVGGNYNYLYRLFRKSNLKPFERDISTEIYQAGSTPCNGVEGFNCYFPLQSYGFQPTNGVGYQPYRVVVLSFELLHAPATVCGPKKSTNLVKNKCVNFNFNGLTGTGVLTESNKKFLPFQQFGRDIADTTDAVRDPQTLEILDITPCSFGGVSVITPGTNTSNQVAVLYQDVNCTEVPVAIHADQLTPTWRVYSTGSNVFQTRAGCLIGAEHVNNSYECDIPIGAGICASYQTQTNSPRRARSVASQSIIAYTMSLGAENSVAYSNNSIACPTNFTISVTTEILPVSMTKTSVDCTMYICGDSTECSNLLLQYGSFCTQLNRALTGIAVEQDKNTQEVFAQVKQIYKTPPIKDFGGFNFSQILPDPSKPSKRSFIEDLLFNKVTLADAGFIKQYGDCLGDISARDLICAQKFNGLTVLPPLLTDEMIAQYTSALLAGTITSGWTFGAGAALQIPFAMQMAYRFNGIGVTQNVLYENQKLIANQFNSAIGKIQDSLSSTASALGKLQDVVNQNAQALNTLVKQLSSNFGAISSVLNDILSRLDKVEAEVQIDRLITGRLQSLQTYVTQQLIRAAEIRASANLAATKMSECVLGQSKRVDFCGKGYHLMSFPQSAPHGVVFLHVTYVPAQEKNFTTAPAICHDGKAHFPREGVFVSNGTHWFVTQRNFCEPQIITTDNTFVSGNCDVVIGIVNNTVYDPLQPELDS

SEQ ID NO: 3070 - protein, 1147 aa, Artificial Sequence
  SARS-CoV-2/USA/NY-NYUMC7/2020__EPI_ISL_418192 spike protein (1-1147)(I714C_Y1110C)
MFVFLVLLPLVSSQCVNLTTRTQLPPAYTNSFTRGVYYPDKVFRSSVLHSTQDLFLPFFSNVTWFHAIHVSGTNGTKRFDNPVLPFNDGVYFASTEKSNIIRGWIFGTTLDSKTQSLLIVNNATNVVIKVCEFQFCNDPFLGVYHHKNNKSWMESEFRVYSSANNCTFEYVSQPFLMDLEGKQGNFKNLREFVFKNIDGYFKIYSKHTPINLVRDLPQGFSALEPLVDLPIGINITRFQTLLALHRSYLTPGDSSSGWTAGAAAYYVGYLQPRTFLLKYNENGTITDAVDCALDPLSETKCTLKSFTVEKGIYQTSNFRVQPTESIVRFPNITNLCPFGEVFNATRFASVYAWNRKRISNCVADYSVLYNSASFSTFKCYGVSPTKLNDLCFTNVYADSFVIRGDEVRQIAPGQTGKIADYNYKLPDDFTGCVIAWNSNNLDSKVGGNYNYLYRLFRKSNLKPFERDISTEIYQAGSTPCNGVEGFNCYFPLQSYGFQPTNGVGYQPYRVVVLSFELLHAPATVCGPKKSTNLVKNKCVNFNFNGLTGTGVLTESNKKFLPFQQFGRDIADTTDAVRDPQTLEILDITPCSFGGVSVITPGTNTSNQVAVLYQGVNCTEVPVAIHADQLTPTWRVYSTGSNVFQTRAGCLIGAEHVNNSYECDIPIGAGICASYQTQTNSPRRARSVASQSIIAYTMSLGAENSVAYSNNSIACPTNFTISVTTEILPVSMTKTSVDCTMYICGDSTECSNLLLQYGSFCTQLNRALTGIAVEQDKNTQEVFAQVKQIYKTPPIKDFGGFNFSQILPDPSKPSKRSFIEDLLFNKVTLADAGFIKQYGDCLGDIAARDLICAQKFNGLTVLPPLLTDEMIAQYTSALLAGTITSGWTFGAGAALQIPFAMQMAYRFNGIGVTQNVLYENQKLIANQFNSAIGKIQDSLSSTASALGKLQDVVNQNAQALNTLVKQLSSNFGAISSVLNDILSRLDKVEAEVQIDRLITGRLQSLQTYVTQQLIRAAEIRASANLAATKMSECVLGQSKRVDFCGKGYHLMSFPQSAPHGVVFLHVTYVPAQEKNFTTAPAICHDGKAHFPREGVFVSNGTHWFVTQRNFCEPQIITTDNTFVSGNCDVVIGIVNNTVYDPLQPELDS

SEQ ID NO: 3071 - protein, 1147 aa, Artificial Sequence
  SARS-CoV-2/Iceland/189/2020__EPI_ISL_417709 spike protein (1-1147)(I714C_Y1110C)
MFVFLVLLPLVSSQCVNLTTRTQLPPAYTNSFTRGVYYPDKVFRSSVLHSTQDLFLPFFSNVTWFHAIHVSGTNGTKRFDNPVLPFNDGVYFASTEKSNIIRGWIFGTTLDSKTQSLLIVNNATNVVIKVCEFQFCNDPFLGVYYHKNNKSWMESEFRVYSSANNCTFEYVSQPFLMDLEGKQGNFKNLREFVFKNIDGYFKIYSKHTPINLVRDLPQGFSALEPLVDLPIGINITRFQTLLALHRSYLTPGDSSSGWTAGAAAYYVGYLQPRTFLLKYNENGTITDAVDCALDPLSETKCTLKSFTVEKGIYQTSNFRVQPTESIVRFPNITNLCPFGEVFNATRFASVYAWNRKRISNCVADYSVLYNSASFSTFKCYGVSPTKLNDLCFTNVYADSFVIRGDEVRQIAPGQTGKIADYNYKLPDDFTGCVIAWNSNNLDSKVGGNYNYLYRLFRKSNLKPFERDISTEIYQAGSTPCNGVEGFNCYFPLQSYGFQPTNGVGYQPYRVVVLSFELLHAPATVCGPKKSTNLVKNKCVNFNFNGLTGTGVLTESNKKFLPFQQFGRDIADTTDAVRDPQTLEILDITPCSFGGVSVITPGTNTSNQVAVLYQGVNCTEVPVAIHADQLTPTWRVYSTGSNVFQTRAGCLIGAEHVNNSYECDIPIGAGICASYQTQTNSPRRARSVASQSIIAYTMSLGAENSVAYSNNSIACPTNFTISVTTEILPVSMTKTSVDCTMYICGDSTECSNLLLQYGSFCTQLNRALTGIAVEQDKNTQEVFAQVKQIYKTPPIKDFGGFNFSQILPDPSKPSKRSFIEDLLFNKVTLADAGFTKQYGDCLGDIAARDLICAQKFNGLTVLPPLLTDEMIAQYTSALLAGTITSGWTFGAGAALQIPFAMQMAYRFNGIGVTQNVLYENQKLIANQFNSAIGKIQDSLSSTASALGKLQDVVNQNAQALNTLVKQLSSNFGAISSVLNDILSRLDKVEAEVQIDRLITGRLQSLQTYVTQQLIRAAEIRASANLAATKMSECVLGQSKRVDFCGKGYHLMSFPQSAPHGVVFLHVTYVPAQEKNFTTAPAICHDGKAHFPREGVFVSNGTHWFVTQRNFCEPQIITTDNTFVSGNCDVVIGIVNNTVYDPLQPELDS

SEQ ID NO: 3072 - protein, 1147 aa, Artificial Sequence
  SARS-CoV-2/Australia/NSW56/2020__EPI_ISL_417408 spike protein (1-1147)(I714C_Y1110C)
MFVFLVLLPLVSSQCVNLTTRTQLPPAYTNSFTRGVYYPDKVFRSSVLHSTQDLFLPFFSNVTWFHAIHVSGTNGTKRFDNPVLPFNDGVYFASTEKSNIIRGWIFGTTLDSKTQSLLIVNNATNVVIKVCEFQFCNDPFLGVYYHKNNKSWMESEFRVYSSANNCTFEYVSQPFLMDLEGKQGNFKNLREFVFKNIDGYFKIYSKHTPINLVRDLPQGFSALEPLVDLPIGINITRFQTLLALHRSYLTPGDSSSGWTAGAAAYYVGYLQPRTFLLKYNENGTITDAVDCALDPLSETKCTLKSFTVEKGIYQTSNFRVQPTESIVRFPNITNLCPFGEVFNATRFASVYAWNRKRISNCVADYSVLYNSASFSTFKCYGVSPTKLNDLCFTNVYADSFVIRGDEVRQIAPGQTGKIADYNYKLPDDFTGCVIAWNSNNLDSKVGGNYNYLYRLFRKSNLKPFERDISTEIYQAGSTPCNGVEGFNCYFPLQSYGFQPTNGVGYQPYRVVVLSFELLHAPATVCGPKKSTNLVKNKCVNFNFNGLTGTGVLTESNKKFLPFQQFGRDIADTTDAVRDPQTLEILDITPCSFGGVSVITPGTNTSNQVAVLYQDVNCTEVPVAIHADQLTPTWRVYSTGSNVFQTRAGCLIGAEHVNNSYECDIPIGAGICASYQTQTNSPRRARSVASQSIIAYTMSLGAENSVAYSNNSIACPTNFTISVTTEILPVSMTKTSVDCTMYICGDSTECSNLLLQYGSFCTQLNRALTGIAVEQDKNTQEVFAQVKQIYKTPPIKDFGGFNFSQILPDSSKPSKRSFIEDLLFNKVTLADAGFIKQYGDCLGDIAARDLICAQKFNGLTVLPPLLTDEMIAQYTSALLAGTITSGWTFGAGAALQIPFAMQMAYRFNGIGVTQNVLYENQKLIANQFNSAIGKIQDSLSSTASALGKLQDVVNQNAQALNTLVKQLSSNFGAISSVLNDILSRLDKVEAEVQIDRLITGRLQSLQTYVTQQLIRAAEIRASANLAATKMSECVLGQSKRVDFCGKGYHLMSFPQSAPHGVVFLHVTYVPAQEKNFTTAPAICHDGKAHFPREGVFVSNGTHWFVTQRNFCEPQIITTDNTFVSGNCDVVIGIVNNTVYDPLQPELDS

SEQ ID NO: 3073 - protein, 1147 aa, Artificial Sequence
  SARS-CoV-2/Iceland/280/2020__EPI_ISL_417608 spike protein (1-1147)(I714C_Y1110C)
MFVFLVLLPLVSSQCVNLTTRTQLPPAYTNSFTRGVYYPDKVFRSSVLHSTQDLFLPFFSNVTWFHAIHVSGTNGTKRFDNPVLPFNDGVYFASTEKSNIIRGWIFGTTLDSKTQSLLIVNNATNVVIKVCEFQFCNDPFLGVYYHKNNKSWMESEFRVYSSANNCTFEYVSQPFLMDLEGKQGNFKNLREFVFKNIDGYFKIYSKHTPINLVRDLPQGFSALEPLVDLPIGINITRFQTLLALHRSYLTPGDSSSGWTAGAAAYYVGYLQPRTFLLKYNENGTITDAVDCALDPLSETKCTLKSFTVEKGIYQTSNFRVQPTESIVRFPNITNLCPFGEVFNATRFASVYAWNRKRISNCVADYSVLYNSASFSTFKCYGVSPTKLNDLCFTNVYADSFVIRGDEVRQIAPGQTGKIADYNYKLPDDFTGCVIAWNSNNLDSKVGGNYNYLYRLFRKSNLKPFERDISTEIYQAGSTPCNGVEGFNCYFPLQSYGFQPTNGVGYQPYRVVVLSFELLHAPATVCGPKKSTNLVKNKCVNFNFNGLTGTGVLTESNKKFLPFQQFGRDIADTTDAVRDPQTLEILDITPCSFGGVSVITPGTNTSNQVAVLYQGVNCTEVPVAIHADQLTPTWRVYSTGSNVFQTRAGCLIGAEHVNNSYECDIPIGAGICASYHTQTNSPRRARSVASQSIIAYTMSLGAENSVAYSNNSIACPTNFTISVTTEILPVSMTKTSVDCTMYICGDSTECSNLLLQYGSFCTQLNRALTGIAVEQDKNTQEVFAQVKQIYKTPPIKDFGGFNFSQILPDPSKPSKRSFIEDLLFNKVTLADAGFIKQYGDCLGDIAARDLICAQKFNGLTVLPPLLTDEMIAQYTSALLAGTITSGWTFGAGAALQIPFAMQMAYRFNGIGVTQNVLYENQKLIANQFNSAIGKIQDSLSSTASALGKLQDVVNQNAQALNTLVKQLSSNFGAISSVLNDILSRLDKVEAEVQIDRLITGRLQSLQTYVTQQLIRAAEIRASANLAATKMSECVLGQSKRVDFCGKGYHLMSFPQSAPHGVVFLHVTYVPAQEKNFTTAPAICHDGKAHFPREGVFVSNGTHWFVTQRNFCEPQIITTDNTFVSGNCDVVIGIVNNTVYDPLQPELDS

SEQ ID NO: 3074 - protein, 1147 aa, Artificial Sequence; identical to SEQ ID NO: 3029
  SARS-CoV-2/Iceland/247/2020__EPI_ISL_417575 spike protein (1-1147)(I714C_Y1110C)

SEQ ID NO: 3075 - protein, 1147 aa, Artificial Sequence
  SARS-CoV-2/Iceland/238/2020__EPI_ISL_417566 spike protein (1-1147)(I714C_Y1110C)
MFVFLVLLPLVSSQCVNLTTRTQLPPAYTNSFTRGVYYPDKVFRSSVLHSTQDLFLPFFSNVTWFHAIHVSGTNGTKRFDNPVLPFNDGVYFASTEKSNIIRGWIFGTTLDSKTQSLLIVNNATNVVIKVCEFQFCNDPFLGVYYHKNNKSWMESEFRVYSSANNCTFEYVSQPFLMDLEGKQGNFKNLREFVFKNIDGYFKIYSKHTPINLVRDLPQGFSALEPLVDLPIGINITRFQTLLALHRSYLTPGDSSSGWTAGAAAYYVGYLQPRTFLLKYNENGTITDAVDCALDPLSETKCTLKSFTVEKGIYQTSNFRVQPTESIVRFPNITNLCPFGEVFNATRFASVYAWNRKRISNCVADYSVLYNSASFSTFKCYGVSPTKLNDLCFTNVYADSFVIRGDEVRQIAPGQTGKIADYNYKLPDDFTGCVIAWNSNNLDSKVGGNYNYLYRLFRKSNLKPFERDISTEIYQAGSTPCNGVEGFNCYFPLQSYGFQPTNGVGYQPYRVVVLSFELLHAPATVCGPKKSTNLVKNKCVNFNFNGLTGTGVLTESNKKFLPFQQFGRDIADTTDAVRDPQTLEILDITPCSFGGVSVITPGTNTSNQVAVLYQGVNCTEVPVAIHADQLTPTWRVYSTGSNVFQTRAGCLIGAEHVNNSYECDIPIGAGICASYQTQTNSPRRARSVASQSIIAYTMSLGAENSVAYSNNSIACPTNFTISVTTEILPVSMTKTSVDCTMYICGDSTECSNLLLQYGSFCTQLNRALTGIAVEQDKNTQEVFAQVKQIYKTPPIKDFGGFNFSQILPDPSKPSKRSFIEDLLFNKVTLADVGFIKQYGDCLGDIAARDLICAQKFNGLTVLPPLLTDEMIAQYTSALLAGTITSGWTFGAGAALQIPFAMQMAYRFNGIGVTQNVLYENQKLIANQFNSAIGKIQDSLSSTASALGKLQDVVNQNAQALNTLVKQLSSNFGAISSVLNDILSRLDKVEAEVQIDRLITGRLQSLQTYVTQQLIRAAEIRASANLAATKMSECVLGQSKRVDFCGKGYHLMSFPQSAPHGVVFLHVTYVPAQEKNFTTAPAICHDGKAHFPREGVFVSNGTHWFVTQRNFCEPQIITTDNTFVSGNCDVVIGIVNNTVYDPLQPELDS

SEQ ID NO: 3076 - protein, 1147 aa, Artificial Sequence
  SARS-CoV-2/Greece/16/2020__EPI_ISL_418265 spike protein (1-1147)(I714C_Y1110C)
MFVFLVLLPLVSSQCVNLTTRTQLPPAYTNSFTRGVYYPDKVFRSSVLHSTQDLFLPFFSNVTWFHAIHVSGTNGTKRFDNPVLPFNDGVYFASTEKSNIIRGWIFGTTLDSKTQSLLIVNNATNVVIKVCEFQFCNDPFLGVYYHKNNKSWMESEFRVYSSANNCTFEYVSQPFLMDLEGKQGNFKNLREFVFKNVDGYFKIYSKHTPINLVRDLPQGFSALEPLVDLPIGINITRFQTLLALHRSYLTPGDSSSGWTAGAAAYYVGYLQPRTFLLKYNENGTITDAVDCALDPLSETKCTLKSFTVEKGIYQTSNFRVQPTESIVRFPNITNLCPFGEVFNATRFASVYAWNRKRISNCVADYSVLYNSASFSTFKCYGVSPTKLNDLCFTNVYADSFVIRGDEVRQIAPGQTGKIADYNYKLPDDFTGCVIAWNSNNLDSKVGGNYNYLYRLFRKSNLKPFERDISTEIYQAGSTPCNGVEGFNCYFPLQSYGFQPTNGVGYQPYRVVVLSFELLHAPATVCGPKKSTNLVKNKCVNFNFNGLTGTGVLTESNKKFLPFQQFGRDIADTTDAVRDPQTLEILDITPCSFGGVSVITPGTNTSNQVAVLYQDVNCTEVPVAIHADQLTPTWRVYSTGSNVFQTRAGCLIGAEHVNNSYECDIPIGAGICASYQTQTNSPRRARSVASQSIIAYTMSLGAENSVAYSNNSIACPTNFTISVTTEILPVSMTKTSVDCTMYICGDSTECSNLLLQYGSFCTQLNRALTGIAVEQDKNTQEVFAQVKQIYKTPPIKDFGGFNFSQILPDPSKPSKRSFIEDLLFNKVTLADAGFIKQYGDCLGDIAARDLICAQKFNGLTVLPPLLTDEMIAQYTSALLAGTITSGWTFGAGAALQIPFAMQMAYRFNGIGVTQNVLYENQKLIANQFNSAIGKIQDSLSSTASALGKLQDVVNQNAQALNTLVKQLSSNFGAISSVLNDILSRLDKVEAEVQIDRLITGRLQSLQTYVTQQLIRAAEIRASANLAATKMSECVLGQSKRVDFCGKGYHLMSFPQSAPHGVVFLHVTYVPAQEKNFTTAPAICHDGKAHFPREGVFVSNGTHWFVTQRNFCEPQIITTDNTFVSGNCDVVIGIVNNTVYDPLQPELDS

SEQ ID NO: 3077 - protein, 1147 aa, Artificial Sequence
  SARS-CoV-2/Iceland/319/2020__EPI_ISL_417648 spike protein (1-1147)(I714C_Y1110C)
MFVFLVLLPLVSSQCVNLTTRTQLPPAYTNSFTRGVYYPDKVFRSSVLHSTQDLFLPFFSNVTWFHAIHVSGTNGTKRFDNPVLPFNDGVYFASTEKSNIIRGWIFGTTLDSKTQSLLIVNNATNVVIKVCEFQFCNDPFLGVYYHKNNKSWMESEFRVYSSANNCTFEYVSQPFLIDLEGKQGNFKNLREFVFKNIDGYFKIYSKHTPINLVRDLPQGFSALEPLVDLPIGINITRFQTLLALHRSYLTPGDSSSGWTAGAAAYYVGYLQPRTFLLKYNENGTITDAVDCALDPLSETKCTLKSFTVEKGIYQTSNFRVQPTESIVRFPNITNLCPFGEVFNATRFASVYAWNRKRISNCVADYSVLYNSASFSTFKCYGVSPTKLNDLCFTNVYADSFVIRGDEVRQIAPGQTGKIADYNYKLPDDFTGCVIAWNSNNLDSKVGGNYNYLYRLFRKSNLKPFERDISTEIYQAGSTPCNGVEGFNCYFPLQSYGFQPTNGVGYQPYRVVVLSFELLHAPATVCGPKKSTNLVKNKCVNFNFNGLTGTGVLTESNKKFLPFQQFGRDIADTTDAVRDPQTLEILDITPCSFGGVSVITPGTNTSNQVAVLYQGVNCTEVPVAIHADQLTPTWRVYSTGSNVFQTRAGCLIGAEHVNNSYECDIPIGAGICASYQTQTNSPRRARSVASQSIIAYTMSLGAENSVAYSNNSIACPTNFTISVTTEILPVSMTKTSVDCTMYICGDSTECSNLLLQYGSFCTQLNRALTGIAVEQDKNTQEVFAQVKQIYKTPPIKDFGGFNFSQILPDPSKPSKRSFIEDLLFNKVTLADAGFIKQYGDCLGDIAARDLICAQKFNGLTVLPPLLTDEMIAQYTSALLAGTITSGWTFGAGAALQIPFAMQMAYRFNGIGVTQNVLYENQKLIANQFNSAIGKIQDSLSSTASALGKLQDVVNQNAQALNTLVKQLSSNFGAISSVLNDILSRLDKVEAEVQIDRLITGRLQSLQTYVTQQLIRAAEIRASANLAATKMSECVLGQSKRVDFCGKGYHLMSFPQSAPHGVVFLHVTYVPAQEKNFTTAPAICHDGKAHFPREGVFVSNGTHWFVTQRNFCEPQIITTDNTFVSGNCDVVIGIVNNTVYDPLQPELDS

SEQ ID NO: 3078 - protein, 1147 aa, Artificial Sequence
  SARS-CoV-2/Congo/94/2020__EPI_ISL_417947 spike protein (1-1147)(I714C_Y1110C)
MFVFLVLLPLVSSQCVNLTTRTQLPPAYTNSFTRGVYYPDKVFRSSVLHSTQDLFLPFFSNVTWFHAIHVSGTNGTKRFDNPVLPFNDGVYFASTEKSNIIRGWIFGTTLDSKTQSLLIVNNATNVVIKVCEFQFCNDPFLGVYYHKNNKSWMESEFRVYSSANNCTFEYVSQPFLMDLEGKQGNFKNLREFVFKNIDGYFKIYSKHTPINLVRDLPQGFSALEPLVDLPIGINITRFQTLLALHRSYLTPGDSSSGWTAGAAAYYVGYLQPRTFLLKYNENGTITDAVDCALDPLSETKCTLKSFTVEKGIYQTSNFRVQPTESIVRFPNITNLCPFGEVFNATRFASVYAWNRKRISNCVADYSVLYNSASFSTFKCYGVSPTKLNDLCFTNVYADSFVIRGDEVRQIAPGQTGKIADYNYKLPDDFTGCVIAWNSNNLDSKVGGNYNYLYRLFRKSNLKPFERDISTEIYQAGSTPCNGVEGFNCYFPLQSYGFQPTNGVGYQPYRVVVLSFELLHAPATVCGPKKSTNLVKNKCVNFNFNGLTGTGVLTESNKKFLPFQQFGRDIADTTDAVRDPQTLEILDITPCSFGGVSVITPGTNTSNQVAVLYQGVNCTEVPVAIHADQLTPTWRVYSTGSNVFQTRAGCLIGAEHVNNSYECDIPIGAGICASYQTQTNSPRRARSVASQSIIAYTMSLGAENSVAYSNNSIACPTNFTISVTTEILPVSMTKTSVDCTMYICGDSTECSNLLLQYGSFCTQLNRALTGIAVEQDKNTQEVFAQVKQIYKTPPIKDFGGFNFSQILPDPSKPSKRSFIEDILFNKVTLADAGFIKQYGDCLGDIAARDLICAQKFNGLTVLPPLLTDEMIAQYTSALLAGTITSGWTFGAGAALQIPFAMQMAYRFNGIGVTQNVLYENQKLIANQFNSAIGKIQDSLSSTASALGKLQDVVNQNAQALNTLVKQLSSNFGAISSVLNDILSRLDKVEAEVQIDRLITGRLQSLQTYVTQQLIRAAEIRASANLAATKMSECVLGQSKRVDFCGKGYHLMSFPQSAPHGVVFLHVTYVPAQEKNFTTAPAICHDGKAHFPREGVFVSNGTHWFVTQRNFCEPQIITTDNTFVSGNCDVVIGIVNNTVYDPLQPELDS

SEQ ID NO: 3079 - protein, 1147 aa, Artificial Sequence
  SARS-CoV-2/Congo/158/2020__EPI_ISL_417950 spike protein (1-1147)(I714C_Y1110C)
MFVFLVLLPLVSSQCVNLTTRTQLPPAYTNSFTRGVYYPDKVFRSSVLHSTQDLFLPFFSNVTWFHAIHVSGTNGTKRFDNPVLPFNDGVYFASTEKSNIIRGWIFGTTLDSKTQSLLIVNNATNVVIKVCEFQFCNDPFLGVYYHKNNKSWMESEFRVYSSANNCTFEYVSQPFLMDLEGKQGNFKNLREFVFKNIDGYFKIYSKHTPINLVRDLPQGFSALEPLVDLPIGINITRFQTLLALHRSYLTPGDSSSGWTAGAAAYYVGYLQPRTFLLKYNENGTITDAVDCALDPLSETKCTLKSFTVEKGIYQTSNFRVQPTESIVRFPNITNLCPFGEVFNATRFASVYAWNRKRISNCVADYSVLYNSASFSTFKCYGVSPTKLNDLCFTNVYADSFVIRGDEVRQIAPGQTGKIADYNYKLPDDFTGCVIAWNSNNLDSKVGGNYNYLYRLFRKSNLKPFERDISTEIYQAGSTPCNGVEGFNCYFPLQSYGFQPTNGVGYQPYRVVVLSFELLHAPATVCGPKKSTNLVKNKCVNFNFNGLTGTGVLTESNKKFLPFQQFGRDIADTTDAVRDPQTLEILDITPCSFGGVSVITPGTNTSNQVAVLYQDVNCTEVPVAIHADQLTPTWRVYSTGSNVFQTRAGCLIGAEHVNNSYECDIPIGAGICASYQTQTNSPRRARSVASQSIIAYTMSLGAENSVAYSNNSIACPTNFTISVTTEILPVSMTKTSVDCTMYICGDSTECSNLLLQYGSFCTQLNRALTGIAVEQDKNTQEVFAQVKQIYKTPPIKDFGGFNFSQILPDPSKPSKRSFIEDLLFNKVTLADAGFIKQYGDCLGDIAARDLICAQKFNGLTVLPPLLTDEMIAQYTSALLAGTITSGWTFGAGAALQIPFAMQMAYRFNGIGVTQNVLYENQKLIANQFNSAIGKIQDSLSSTASALGKLQDVVNQNAQALNTLVKQLSSNFGAISSVLNDILSRLDKVEAEVQIDRLITGRLQSLQTYVTQQLIRAAEIRASANLAATKMSECVLGQSKRVDFCGKGYHLMSFPQSAPHGVVFLHVTYVPAQEKNFTTAPAICHDGKAHFPREGVFVSNGTHWFVTQRNFCEPQIITTDNTFLSGNCDVVIGIVNNTVYDPLQPELDS

SEQ ID NO: 3080 - protein, 1147 aa, Artificial Sequence
  SARS-CoV-2/USA/UT-00034/2020__EPI_ISL_417977 spike protein (1-1147)(I714C_Y1110C)
MFVFLVLLPLVSSQCVNLTTRTQLPPAYTNSFTRGVYYPDKVFRSSVLHSTQDLFLPFFSNVTWFHAIHVSGTNGTKRFDNPVLPFNDGVYFASTEKSNIIRGWIFGTTLDSKTQSLLIVNNATNVVIKVCEFQFCNDPFLGVYYYKNNKSWMESEFRVYSSANNCTFEYVSQPFLMDLEGKQGNFKNLREFVFKNIDGYFKIYSKHTPINLVRDLPQGFSALEPLVDLPIGINITRFQTLLALHRSYLTPGDSSSGWTAGAAAYYVGYLQPRTFLLKYNENGTITDAVDCALDPLSETKCTLKSFTVEKGIYQTSNFRVQPTESIVRFPNITNLCPFGEVFNATRFASVYAWNRKRISNCVADYSVLYNSASFSTFKCYGVSPTKLNDLCFTNVYADSFVIRGDEVRQIAPGQTGKIADYNYKLPDDFTGCVIAWNSNNLDSKVGGNYNYLYRLFRKSNLKPFERDISTEIYQAGSTPCNGVEGFNCYFPLQSYGFQPTNGVGYQPYRVVVLSFELLHAPATVCGPKKSTNLVKNKCVNFNFNGLTGTGVLTESNKKFLPFQQFGRDIADTTDAVRDPQTLEILDITPCSFGGVSVITPGTNTSNQVAVLYQGVNCTEVPVAIHADQLTPTWRVYSTGSNVFQTRAGCLIGAEHVNNSYECDIPIGAGICASYQTQTNSPRRARSVASQSIIAYTMSLGAENSVAYSNNSIACPTNFTISVTTEILPVSMTKTSVDCTMYICGDSTECSNLLLQYGSFCTQLNRALTGIAVEQDKNTQEVFAQVKQIYKTPPIKDFGGFNFSQILPDPSKPSKRSFIEDLLFNKVTLADAGFIKQYGDCLGDIAARDLICAQKFNGLTVLPPLLTDEMIAQYTSALLAGTITSGWTFGAGAALQIPFAMQMAYRFNGIGVTQNVLYENQKLIANQFNSAIGKIQDSLSSTASALGKLQDVVNQNAQALNTLVKQLSSNFGAISSVLNDILSRLDKVEAEVQIDRLITGRLQSLQTYVTQQLIRAAEIRASANLAATKMSECVLGQSKRVDFCGKGYHLMSFPQSAPHGVVFLHVTYVPAQEKNFTTAPAICHDGKAHFPREGVFVSNGTHWFVTQRNFCEPQIITTDNTFVSGNCDVVIGIVNNTVYDPLQPELDS

SEQ ID NO: 3081 - protein, 1147 aa, Artificial Sequence
  SARS-CoV-2/USA/UT-00033/2020__EPI_ISL_417976 spike protein (1-1147)(I714C_Y1110C)
MFVFLVLLPLVSSQCVNLTTRTQLPPAYTNSFTRGVYYPDKVFRSSVLHSTQDLFLPFFSNVTWFHAIHVSGTNGTKRFDNPVLPFNDGVYFASTEKSNIIRGWIFGTTLDSKTQSLLIVNNATNVVIKVCEFQFCNDPFLGVYYHKNNKSWMESEFRVYSSANNCTFEYVSQPFLMDLEGKQGNFKNLREFVFKNIDGYFKIYSKHTPINLVRDLPQGFSALEPLVDLPIGINITRFQTLLALHRSYLTPGDSSSGLTAGAAAYYVGYLQPRTFLLKYNENGTITDAVDCALDPLSETKCTLKSFTVEKGIYQTSNFRVQPTESIVRFPNITNLCPFGEVFNATRFASVYAWNRKRISNCVADYSVLYNSASFSTFKCYGVSPTKLNDLCFTNVYADSFVIRGDEVRQIAPGQTGKIADYNYKLPDDFTGCVIAWNSNNLDSKVGGNYNYLYRLFRKSNLKPFERDISTEIYQAGSTPCNGVEGFNCYFPLQSYGFQPTNGVGYQPYRVVVLSFELLHAPATVCGPKKSTNLVKNKCVNFNFNGLTGTGVLTESNKKFLPFQQFGRDIADTTDAVRDPQTLEILDITPCSFGGVSVITPGTNTSNQVAVLYQGVNCTEVPVAIHADQLTPTWRVYSTGSNVFQTRAGCLIGAEHVNNSYECDIPIGAGICASYQTQTNSPRRARSVASQSIIAYTMSLGAENSVAYSNNSIACPTNFTISVTTEILPVSMTKTSVDCTMYICGDSTECSNLLLQYGSFCTQLNRALTGIAVEQDKNTQEVFAQVKQIYKTPPIKDFGGFNFSQILPDPSKPSKRSFIEDLLFNKVTLADAGFIKQYGDCLGDIAARDLICAQKFNGLTVLPPLLTDEMIAQYTSALLAGTITSGWTFGAGAALQIPFAMQMAYRFNGIGVTQNVLYENQKLIANQFNSAIGKIQDSLSSTASALGKLQDVVNQNAQALNTLVKQLSSNFGAISSVLNDILSRLDKVEAEVQIDRLITGRLQSLQTYVTQQLIRAAEIRASANLAATKMSECVLGQSKRVDFCGKGYHLMSFPQSAPHGVVFLHVTYVPAQEKNFTTAPAICHDGKAHFPREGVFVSNGTHWFVTQRNFCEPQIITTDNTFVSGNCDVVIGIVNNTVYDPLQPELDS

SEQ ID NO: 3082 - protein, 1147 aa, Artificial Sequence
  SARS-CoV-2/USA/WI-13/2020__EPI_ISL_417516 spike protein (1-1147)(I714C_Y1110C)
MFVFLVLLPLVSSQCVNLTTRTQLPPAYTNSFTRGVYYPDKVFRSSVLHSTQDLFLPFFSNVTWFHAIHVSGTNGTKRFDNPVLPFNDGVYFASTEKSNIIRGWIFGTTLDSKTQSLLIVNNATNVVIKVCEFQFCNDPFLGVYYHKNNKSWMESEFRVYSSANNCTFEYVSQPFLMDLEGKQGNFKNLREFVFKNIDGYFKIYSKHTPINLVRDLPQGFSALEPLVDLPIGINITRFQTLLALHRSYLTPGDSSSGWTAGAAAYYVGYLQPRTFLLKYNENGTITDAVDCALDPLSETKCTLKSFTVEKGIYQTSNFRVLPTESIVRFPNITNLCPFGEVFNATRFASVYAWNRKRISNCVADYSVLYNSASFSTFKCYGVSPTKLNDLCFTNVYADSFVIRGDEVRQIAPGQTGKIADYNYKLPDDFTGCVIAWNSNNLDSKVGGNYNYLYRLFRKSNLKPFERDISTEIYQAGSTPCNGVEGFNCYFPLQSYGFQPTNGVGYQPYRVVVLSFELLHAPATVCGPKKSTNLVKNKCVNFNFNGLTGTGVLTESNKKFLPFQQFGRDIADTTDAVRDPQTLEILDITPCSFGGVSVITPGTNTSNQVAVLYQGVNCTEVPVAIHADQLTPTWRVYSTGSNVFQTRAGCLIGAEHVNNSYECDIPIGAGICASYQTQTNSPRRARSVASQSIIAYTMSLGAENSVAYSNNSIACPTNFTISVTTEILPVSMTKTSVDCTMYICGDSTECSNLLLQYGSFCTQLNRALTGIAVEQDKNTQEVFAQVKQIYKTPPIKDFGGFNFSQILPDPSKPSKRSFIEDLLFNKVTLADAGFIKQYGDCLGDIAARDLICAQKFNGLTVLPPLLTDEMIAQYTSALLAGTITSGWTFGAGAALQIPFAMQMAYRFNGIGVTQNVLYENQKLIANQFNSAIGKIQDSLSSTASALGKLQDVVNQNAQALNTLVKQLSSNFGAISSVLNDILSRLDKVEAEVQIDRLITGRLQSLQTYVTQQLIRAAEIRASANLAATKMSECVLGQSKRVDFCGKGYHLMSFPQSAPHGVVFLHVTYVPAQEKNFTTAPAICHDGKAHFPREGVFVSNGTHWFVTQRNFCEPQIITTDNTFVSGNCDVVIGIVNNTVYDPLQPELDS

SEQ ID NO: 3083 - protein, 1146 aa, Artificial Sequence
  SARS-CoV-2/India/1-27/2020__EPI_ISL_413522 spike protein (1-1146)(I713C_Y1109C)
MFVFLVLLPLVSSQCVNLTTRTQLPPAYTNSFTRGVYYPDKVFRSSVLHSTQDLFLPFFSNVTWFHAIHVSGTNGTKRFDNPVLPFNDGVYFASTEKSNIIRGWIFGTTLDSKTQSLLIVNNATNVVIKVCEFQFCNDPFLGVYHKNNKSWMESEFRVYSSANNCTFEYVSQPFLMDLEGKQGNFKNLREFVFKNIDGYFKIYSKHTPINLVRDLPQGFSALEPLVDLPIGINITRFQTLLALHRSYLTPGDSSSGWTAGAAAYYVGYLQPRTFLLKYNENGTITDAVDCALDPLSETKCTLKSFTVEKGIYQTSNFRVQPTESIVRFPNITNLCPFGEVFNATRFASVYAWNRKRISNCVADYSVLYNSASFSTFKCYGVSPTKLNDLCFTNVYADSFVIRGDEVIQIAPGQTGKIADYNYKLPDDFTGCVIAWNSNNLDSKVGGNYNYLYRLFRKSNLKPFERDISTEIYQAGSTPCNGVEGFNCYFPLQSYGFQPTNGVGYQPYRVVVLSFELLHAPATVCGPKKSTNLVKNKCVNFNFNGLTGTGVLTESNKKFLPFQQFGRDIADTTDAVRDPQTLEILDITPCSFGGVSVITPGTNTSNQVAVLYQDVNCTEVPVAIHADQLTPTWRVYSTGSNVFQTRAGCLIGAEHVNNSYECDIPIGAGICASYQTQTNSPRRARSVASQSIIAYTMSLGAENSVAYSNNSIACPTNFTISVTTEILPVSMTKTSVDCTMYICGDSTECSNLLLQYGSFCTQLNRALTGIAVEQDKNTQEVFAQVKQIYKTPPIKDFGGFNFSQILPDPSKPSKRSFIEDLLFNKVTLADAGFIKQYGDCLGDIAARDLICAQKFNGLTVLPPLLTDEMIAQYTSALLAGTITSGWTFGAGAALQIPFAMQMAYRFNGIGVTQNVLYENQKLIANQFNSAIGKIQDSLSSTASALGKLQDVVNQNAQALNTLVKQLSSNFGAISSVLNDILSRLDKVEAEVQIDRLITGRLQSLQTYVTQQLIRAAEIRASANLAATKMSECVLGQSKRVDFCGKGYHLMSFPQSAPHGVVFLHVTYVPAQEKNFTTAPAICHDGKAHFPREGVFVSNGTHWFVTQRNFCEPQIITTDNTFVSGNCDVVIGIVNNTVYDPLQPELDS

SEQ ID NO: 3084 - protein, 1141 aa, Artificial Sequence
  SARS-CoV-2/pangolin/Guangxi/P4L/2017__EPI_ISL_410538 spike protein (1-1141)(I708C_Y1104C)
MFVFLFVLPLVSSQCVNLTTRTGIPPGYTNSSTRGVYYPDKVFRSSILHLTQDLFLPFFSNVTWFNTINYQGGFKKFDNPVLPFNDGVYFASTEKSNIIRGWIFGTTLDARTQSLLIVNNATNVVIKVCEFQFCTDPFLGVYYHNNNKTWVENEFRVYSSANNCTFEYISQPFLMDLEGKQGNFKNLREFVFKNVDGYFKIYSKHTPIDLVRDLPRGFAALEPLVDLPIGINITRFQTLLALHRSYLTPGNLESGWTTGAAAYYVGYLQQRTFLLSYNQNGTITDAVDCSLDPLSETKCTLKSLTVEKGIYQTSNFRVQPTISIVRFPNITNLCPFGEVFNASKFASVYAWNRKRISNCVADYSVLYNSTSFSTFKCYGVSPTKLNDLCFTNVYADSFVVKGDEVRQIAPGQTGVIADYNYKLPDDFTGCVIAWNSVKQDALTGGNYGYLYRLFRKSKLKPFERDISTEIYQAGSTPCNGQVGLNCYYPLERYGFHPTTGVNYQPFRVVVLSFELLNGPATVCGPKLSTTLVKDKCVNFNFNGLTGTGVLTTSKKQFLPFQQFGRDISDTTDAVRDPQTLEILDITPCSFGGVSVITPGTNTSNQVAVLYQDVNCTEVPMAIHAEQLTPAWRVYSAGANVFQTRAGCLVGAEHVNNSYECDIPVGAGICASYHSMSSLRSVNQRSIIAYTMSLGAENSVAYSNNSIACPTNFTISVTTEILPVSMTKTSVDCTMYICGDSIECSNLLLQYGSFCTQLNRALTGIAVEQDKNTQEVFAQVKQIYKTPPIKDFGGFNFSQILPDPSKPSKRSFIEDLLFNKVTLADAGFIKQYGDCLGDIAARDLICAQKFNGLTVLPPLLTDEMIAQYTSALLAGTITSGWTFGAGAALQIPFAMQMAYRFNGIGVTQNVLYENQKLIANQFNSAIGKIQDSLSSTASALGKLQDVVNQNAQALNTLVKQLSSNFGAISSVLNDILSRLDKVEAEVQIDRLITGRLQSLQTYVTQQLIRAAEIRASANLAATKMSECVLGQSKRVDFCGKGYHLMSFPQSAPHGVVFLHVTYVPAQEKNFTTAPAICHEGKAHFPREGVFVSNGTHWFITQRNFCEPQIITTDNTFVSGSCDVVIGIVNNTVYDPLQPELDS

SEQ ID NO: 3085 - protein, 1141 aa, Artificial Sequence
  SARS-CoV-2/pangolin/Guangxi/P5L/2017__EPI_ISL_410540 spike protein (1-1141)(I708C_Y1104C)
MFVFLFVLPLVSSQCVNLTTRTGIPPGYTNSSTRGVYYPDKVFRSSILHLTQDLFLPFFSNVTWFNTINYQGGFKKFDNPVLPFNDGVYFASTEKSNIIRGWIFGTTLDARTQSLLIVNNATNVVIKVCEFQFCTDPFLGVYYHNNNKTWVENEFRVYSSANNCTFEYISQPFLMDLEGKQGNFKNLREFVFKNVDGYFKIYSKHTPIDLVRDLPRGFAALEPLVDLPIGINITRFQTLLALHRSYLTPGKLESGWTTGAAAYYVGYLQQRTFLLSYNQNGTITDAVDCSLDPLSETKCTLKSLTVEKGIYQTSNFRVQPTISIVRFPNITNLCPFGEVFNASKFASVYAWNRKRISNCVADYSVLYNSTSFSTFKCYGVSPTKLNDLCFTNVYADSFVVKGDEVRQIAPGQTGVIADYNYKLPDDFTGCVIAWNSVKQDALTGGNYGYLYRLFRKSKLKPFERDISTEIYQAGSTPCNGQVGLNCYYPLERYGFHPTTGVNYQPFRVVVLSFELLNGPATVCGPKLSTTLVKDKCVNFNFNGLTGTGVLTTSKKQFLPFQQFGRDISDTTDAVRDPQTLEILDITPCSFGGVSVITPGTNTSNQVAVLYQDVNCTEVPMAIHAEQLTPAWRVYSAGANVFQTRAGCLVGAEHVNNSYECDIPVGAGICASYHSMSSFRSVNQRSIIAYTMSLGAENSVAYSNNSIACPTNFTISVTTEILPVSMTKTSVDCTMYICGDSIECSNLLLQYGSFCTQLNRALTGIAVEQDKNTQEVFAQVKQIYKTPPIKDFGGFNFSQILPDPSKPSKRSFIEDLLFNKVTLADAGFIKQYGDCLGDIAARDLICAQKFNGLTVLPPLLTDEMIAQYTSALLAGTITSGWTFGAGAALQIPFAMQMAYRFNGIGVTQNVLYENQKLIANQFNSAIGKIQDSLSSTASALGKLQDVVNQNAQALNTLVKQLSSNFGAISSVLNDILSRLDKVEAEVQIDRLITGRLQSLQTYVTQQLIRAAEIRASANLAATKMSECVLGQSKRVDFCGKGYHLMSFPQSAPHGVVFLHVTYVPAQEKNFTTAPAICHEGKAHFPREGVFVSNGTHWFITQRNFCEPQIITTDNTFVSGSCDVVIGIVNNTVYDPLQPELDS

SEQ ID NO: 3086 - protein, 1141 aa, Artificial Sequence
  SARS-CoV-2/pangolin/Guangxi/P5E/2017__EPI_ISL_410541 spike protein (1-1141)(I708C_Y1104C)
MFVFLFVLPLVSSQCVNLTTRTGIPPGYTNSSTRGVYYPDKVFRSSILHLTQDLFLPFFSNVTWFNTITYQGGSKKFDNPVLPFNDGVYFASTEKSNIIRGWIFGTTLDARTQSLLIVNNATNVVIKVCEFQFCTDPFLGVYYHNNNKTWVENEFRVYSSANNCTFEYISQPFLMDLEGKQGNFKNLREFVFKNVDGYFKIYSKHTPIDLVRDLPRGFAALEPLVDLPIGINITRFQTLLALHRSYLTPGKLESGWTTGAAAYYVGYLQQRTFLLSYNQNGTITDAVDCSLDPLSETKCTLKSLTVEKGIYQTSNFRVQPTISIVRFPNITNLCPFGEVFNASKFASVYAWNRKRISNCVADYSVLYNSTSFSTFKCYGVSPTKLNDLCFTNVYADSFVVKGDEVRQIAPGQTGVIADYNYKLPDDFTGCVIAWNSVKQDALTGDNYGYLYRLFRKSKLKPFERDISTEIYQAGSTPCNGQVGLNCYYPLERYGFHPTTGVNYQPFRVVVLSFELLNGPATVCGPKLSTTLVKDKCVNFNFNGLTGTGVLTTSKKQFLPFQQFGRDISDTTDAVRDPQTLEILDITPCSFGGVSVITPGTNTSNQVAVLYQDVNCTEVPMAIHAEQLTPAWRVYSAGANVFQTRAGCLVGAEHVNNSYECDIPVGAGICASYHSMSSFRSVNQRSIIAYTMSLGAENSVAYSNNSIACPTNFTISVTTEILPVSMTKTSVDCTMYICGDSIECSNLLLQYGSFCTQLNRALTGIAVEQDKNTQEVFAQVKQIYKTPPIKDFGGFNFSQILPDPSKPSKRSFIEDLLFNKVTLADAGFIKQYGDCLGDIAARDLICAQKFNGLTVLPPLLTDEMIAQYTSALLAGTITSGWTFGAGAALQIPFAMQMAYRFNGIGVTQNVLYENQKLIANQFNSAIGKIQDSLSSTASALGKLQDVVNQNAQALNTLVKQLSSNFGAISSVLNDILSRLDKVEAEVQIDRLITGRLQSLQTYVTQQLIRAAEIRASANLAATKMSECVLGQSKRVDFCGKGYHLMSFPQSAPHGVVFLHVTYVPAQEKNFTTAPAICHEGKAHFPREGVFVSNGTHWFITQRNFCEPQIITTDNTFVSGSCDVVIGIVNNTVYDPLQPELDS

SEQ ID NO: 3087 - protein, 1139 aa, Artificial Sequence
  SARS-CoV-2/pangolin/Guangxi/P1E/2017__EPI_ISL_410539 spike protein (1-1139)(I706C_Y1102C)
MFVFLFVLPLVSSQCVNLTTRTGIQPGYTNSSTRGVYYPDKVFRSSILHLTQDLFLPFFSNVTWFNTINYQGGFKKFDNPVLPFNDGVYFASTEKSNIIRGWIFGTTLDARTQSLLIVNNATNVVIKVCEFQFCTDPFLGVYYHNNNKTWVENEFRVYSSANNCTFEYISQPFLMDLEGKQGNFKNLREFVFKNVDGYFKIYSKHTPIDLVRDLPRGFAALEPLVDLPIGINITRFQTLLALHRSYLTPGKLESGWTTGAAAYYVGYLQQRTFLLSYNQNGTITDAVDCSLDPLSETKCTLKSLTVEKGIYQTSNFRVQPTISIVRFPNITNLCPFGEVFNASKFASVYAWNRKRISNCVADYSVLYNSTSFSTFKCYGVSPTKLNDLCFTNVYADSFVVKGDEVRQIAPGQTGVIADYNYKLPDDFTGCVIAWNSVKQDALTGGNYLYRLFRKSKLKPFERDISTEIYQAGSTPCNGQVGLNCYYPLERYGFHPTTGVNYQPFRVVVLSFELLNGPATVCGPKLSTTLVKDKCVNFNFNGLTGTGVLTTSKKQFLPFQQFGRDISDTTDAVRDPQTLEILDITPCSFGGVSVITPGTNTSNQVAVLYQDVNCTEVPMAIHAEQLTPAWRVYSAGANVFQTRAGCLVGAEHVNNSYECDIPVGAGICASYHSMSSLRSVNQRSIIAYTMSLGAENSVAYSNNSIACPTNFTISVTTEILPVSMTKTSVDCTMYICGDSIECSNLLLQYGSFCTQLNRALTGIAVEQDKNTQEVFAQVKQIYKTPPIKDFGGFNFSQILPDPSKPSKRSFIEDLLFNKVTLADAGFIKQYGDCLGDIAARDLICAQKFNGLTVLPPLLTDEMIAQYTSALLAGTITSGWTFGAGAALQIPFAMQMAYRFNGIGVTQNVLYENQKLIANQFNSAIGKIQDSLSSTASALGKLQDVVNQNAQALNTLVKQLSSNFGAISSVLNDILSRLDKVEAEVQIDRLITGRLQSLQTYVTQQLIRAAEIRASANLAATKMSECVLGQSKRVDFCGKGYHLMSFPQSAPHGVVFLHVTYVPAQEKNFTTAPAICHEGKAHFPREGVFVSNGTHWFITQRNFCEPQIITTDNTFVSGSCDVVIGIVNNTVYDPLQPELDS

SEQ ID NO: 3088 - protein, 1147 aa, Artificial Sequence
  SARS-CoV-2/Wuhan/WIV05/2019__EPI_ISL_402128 spike protein (1-1147)(P715C_P1069C)
MFVFLVLLPLVSSQCVNLTTRTQLPPAYTNSFTRGVYYPDKVFRSSVLHSTQDLFLPFFSNVTWFHAIHVSGTNGTKRFDNPVLPFNDGVYFASTEKSNIIRGWIFGTTLDSKTQSLLIVNNATNVVIKVCEFQFCNDPFLGVYYHKNNKSWMESEFRVYSSANNCTFEYVSQPFLMDLEGKQGNFKNLREFVFKNIDGYFKIYSKHTPINLVRDLPQGFSALEPLVDLPIGINITRFQTLLALHRSYLTPGDSSSGWTAGAAAYYVGYLQPRTFLLKYNENGTITDAVDCALDPLSETKCTLKSFTVEKGIYQTSNFRVQPTESIVRFPNITNLCPFGEVFNATRFASVYAWNRKRISNCVADYSVLYNSASFSTFKCYGVSPTKLNDLCFTNVYADSFVIRGDEVRQIAPGQTGKIADYNYKLPDDFTGCVIAWNSNNLDSKVGGNYNYLYRLFRKSNLKPFERDISTEIYQAGSTPCNGVEGFNCYFPLQSYGFQPTNGVGYQPYRVVVLSFELLHAPATVCGPKKSTNLVKNKCVNFNFNGLTGTGVLTESNKKFLPFQQFGRDIADTTDAVRDPQTLEILDITPCSFGGVSVITPGTNTSNQVAVLYQDVNCTEVPVAIHADQLTPTWRVYSTGSNVFQTRAGCLIGAEHVNNSYECDIPIGAGICASYQTQTNSPRRARSVASQSIIAYTMSLGAENSVAYSNNSIAICTNFTISVTTEILPVSMTKTSVDCTMYICGDSTECSNLLLQYGSFCTQLNRALTGIAVEQDKNTQEVFAQVKQIYKTPPIKDFGGFNFSQILPDPSKPSKRSFIEDLLFNKVTLADAGFIKQYGDCLGDIAARDLICAQKFNGLTVLPPLLTDEMIAQYTSALLAGTITSGWTFGAGAALQIPFAMQMAYRFNGIGVTQNVLYENQKLIANQFNSAIGKIQDSLSSTASALGKLQDVVNQNAQALNTLVKQLSSNFGAISSVLNDILSRLDKVEAEVQIDRLITGRLQSLQTYVTQQLIRAAEIRASANLAATKMSECVLGQSKRVDFCGKGYHLMSFPQSAPHGVVFLHVTYVCAQEKNFTTAPAICHDGKAHFPREGVFVSNGTHWFVTQRNFYEPQIITTDNTFVSGNCDVVIGIVNNTVYDPLQPELDS

SEQ ID NO: 3089 - protein, 1143 aa, Artificial Sequence
  SARS-CoV-2/bat/Yunnan/RaTG13/2013__EPI_ISL_402131 spike protein (1-1143)(P711C_P1065C)
MFVFLVLLPLVSSQCVNLTTRTQLPPAYTNSSTRGVYYPDKVFRSSVLHLTQDLFLPFFSNVTWFHAIHVSGTNGIKRFDNPVLPFNDGVYFASTEKSNIIRGWIFGTTLDSKTQSLLIVNNATNVVIKVCEFQFCNDPFLGVYYHKNNKSWMESEFRVYSSANNCTFEYVSQPFLMDLEGKQGNFKNLREFVFKNIDGYFKIYSKHTPINLVRDLPPGFSALEPLVDLPIGINITRFQTLLALHRSYLTPGDSSSGWTAGAAAYYVGYLQPRTFLLKYNENGTITDAVDCALDPLSETKCTLKSFTVEKGIYQTSNFRVQPTDSIVRFPNITNLCPFGEVFNATTFASVYAWNRKRISNCVADYSVLYNSTSFSTFKCYGVSPTKLNDLCFTNVYADSFVITGDEVRQIAPGQTGKIADYNYKLPDDFTGCVIAWNSKHIDAKEGGNFNYLYRLFRKANLKPFERDISTEIYQAGSKPCNGQTGLNCYYPLYRYGFYPTDGVGHQPYRVVVLSFELLNAPATVCGPKKSTNLVKNKCVNFNFNGLTGTGVLTESNKKFLPFQQFGRDIADTTDAVRDPQTLEILDITPCSFGGVSVITPGTNASNQVAVLYQDVNCTEVPVAIHADQLTPTWRVYSTGSNVFQTRAGCLIGAEHVNNSYECDIPIGAGICASYQTQTNSRSVASQSIIAYTMSLGAENSVAYSNNSIAICTNFTISVTTEILPVSMTKTSVDCTMYICGDSTECSNLLLQYGSFCTQLNRALTGIAVEQDKNTQEVFAQVKQIYKTPPIKDFGGFNFSQILPDPSKPSKRSFIEDLLFNKVTLADAGFIKQYGDCLGDIAARDLICAQKFNGLTVLPPLLTDEMIAQYTSALLAGTITSGWTFGAGAALQIPFAMQMAYRFNGIGVTQNVLYENQKLIANQFNSAIGKIQDSLSSTASALGKLQDVVNQNAQALNTLVKQLSSNFGAISSVLNDILSRLDKVEAEVQIDRLITGRLQSLQTYVTQQLIRAAEIRASANLAATKMSECVLGQSKRVDFCGKGYHLMSFPQSAPHGVVFLHVTYVCAQEKNFTTAPAICHDGKAHFPREGVFVSNGTHWFVTQRNFYEPQIITTDNTFVSGSCDVVIGIVNNTVYDPLQPELDS

SEQ ID NO: 3090 - protein, 1147 aa, Artificial Sequence
  SARS-CoV-2/Wuhan/HBCDC-HB-01/2019__EPI_ISL_402132 spike protein (1-1147)(P715C_P1069C)
MFVFLVLLPLVSSQCVNLTTRTQLPPAYTNSITRGVYYPDKVFRSSVLHSTQDLFLPFFSNVTWFHAIHVSGTNGTKRFDNPVLPFNDGVYFASTEKSNIIRGWIFGTTLDSKTQSLLIVNNATNVVIKVCEFQFCNDPFLGVYYHKNNKSWMESEFRVYSSANNCTFEYVSQPFLMDLEGKQGNFKNLREFVFKNIDGYFKIYSKHTPINLVRDLPQGFSALEPLVDLPIGINITRFQTLLALHRSYLTPGDSSSGWTAGAAAYYVGYLQPRTFLLKYNENGTITDAVDCALDPLSETKCTLKSFTVEKGIYQTSNFRVQPTESIVRFPNITNLCPFGEVFNATRFASVYAWNRKRISNCVADYSVLYNSASFSTFKCYGVSPTKLNDLCFTNVYADSFVIRGDEVRQIAPGQTGKIADYNYKLPDDFTGCVIAWNSNNLDSKVGGNYNYLYRLFRKSNLKPFERDISTEIYQAGSTPCNGVEGFNCYFPLQSYGFQPTNGVGYQPYRVVVLSFELLHAPATVCGPKKSTNLVKNKCVNFNFNGLTGTGVLTESNKKFLPFQQFGRDIADTTDAVRDPQTLEILDITPCSFGGVSVITPGTNTSNQVAVLYQDVNCTEVPVAIHADQLTPTWRVYSTGSNVFQTRAGCLIGAEHVNNSYECDIPIGAGICASYQTQTNSPRRARSVASQSIIAYTMSLGAENSVAYSNNSIAICTNFTISVTTEILPVSMTKTSVDCTMYICGDSTECSNLLLQYGSFCTQLNRALTGIAVEQDKNTQEVFAQVKQIYKTPPIKDFGGFNFSQILPDPSKPSKRSFIEDLLFNKVTLADAGFIKQYGDCLGDIAARDLICAQKFNGLTVLPPLLTDEMIAQYTSALLAGTITSGWTFGAGAALQIPFAMQMAYRFNGIGVTQNVLYENQKLIANQFNSAIGKIQDSLSSTASALGKLQDVVNQNAQALNTLVKQLSSNFGAISSVLNDILSRLDKVEAEVQIDRLITGRLQSLQTYVTQQLIRAAEIRASANLAATKMSECVLGQSKRVDFCGKGYHLMSFPQSAPHGVVFLHVTYVCAQEKNFTTAPAICHDGKAHFPREGVFVSNGTHWFVTQRNFYEPQIITTDNTFVSGNCDVVIGIVNNTVYDPLQPELDS

SEQ ID NO: 3091 - protein, 1147 aa, Artificial Sequence
  SARS-CoV-2/Guangdong/20SF028/2020__EPI_ISL_403936 spike protein (1-1147)(P715C_P1069C)
MFVFLVLLPLVSSQCVNLTTRTQLPPAYTNSFTRGVYYPDKVFRSSVLYSTQDLFLPFFSNVTWFHAIHVSGTNGTKRFDNPVLPFNDGVYFASTEKSNIIRGWIFGTTLDSKTQSLLIVNNATNVVIKVCEFQFCNDPFLGVYYHKNNKSWMESEFRVYSSANNCTFEYVSQPFLMDLEGKQGNFKNLREFVFKNIDGYFKIYSKHTPINLVRDLPQGFSALEPLVDLPIGINITRFQTLLALHRSYLTPGDSSSGWTAGAAAYYVGYLQPRTFLLKYNENGTITDAVDCALDPLSETKCTLKSFTVEKGIYQTSNFRVQPTESIVRFPNITNLCPFGEVFNATRFASVYAWNRKRISNCVADYSVLYNSASFSTFKCYGVSPTKLNDLCFTNVYADSFVIRGDEVRQIAPGQTGKIADYNYKLPDDFTGCVIAWNSNNLDSKVGGNYNYLYRLFRKSNLKPFERDISTEIYQAGSTPCNGVEGFNCYFPLQSYGFQPTNGVGYQPYRVVVLSFELLHAPATVCGPKKSTNLVKNKCVNFNFNGLTGTGVLTESNKKFLPFQQFGRDIADTTDAVRDPQTLEILDITPCSFGGVSVITPGTNTSNQVAVLYQDVNCTEVPVAIHADQLTPTWRVYSTGSNVFQTRAGCLIGAEHVNNSYECDIPIGAGICASYQTQTNSPRRARSVASQSIIAYTMSLGAENSVAYSNNSIAICTNFTISVTTEILPVSMTKTSVDCTMYICGDSTECSNLLLQYGSFCTQLNRALTGIAVEQDKNTQEVFAQVKQIYKTPPIKDFGGFNFSQILPDPSKPSKRSFIEDLLFNKVTLADAGFIKQYGDCLGDIAARDLICAQKFNGLTVLPPLLTDEMIAQYTSALLAGTITSGWTFGAGAALQIPFAMQMAYRFNGIGVTQNVLYENQKLIANQFNSAIGKIQDSLSSTASALGKLQDVVNQNAQALNTLVKQLSSNFGAISSVLNDILSRLDKVEAEVQIDRLITGRLQSLQTYVTQQLIRAAEIRASANLAATKMSECVLGQSKRVDFCGKGYHLMSFPQSAPHGVVFLHVTYVCAQEKNFTTAPAICHDGKAHFPREGVFVSNGTHWFVTQRNFYEPQIITTDNTFVSGNCDVVIGIVNNTVYDPLQPELDS

SEQ ID NO: 3092 - protein, 1147 aa, Artificial Sequence
  SARS-CoV-2/Shenzhen/SZTH-001/2020__EPI_ISL_406592 spike protein (1-1147)(P715C_P1069C)
MFVFLVLLPLVSSQCVNLTTRTQLPPAYTNSFTRGVYYPDKVFRSSVLHSTQDLFLPFFSNVTWFHAIHVSGTNGTKRFDNPVLPFNDGVYFASTEKSNIIRGWIFGTTLDSKTQSLLIVNNATNVVIKVCEFQFCNDPFLGVYYHKNNKSWMESEFRVYSSANNCTFEYVSQPFLMDLEGKQGNFKNLREFVFKNIDGYFKIYSKHTPINLVRDLPQGFSALEPLVDLPIGINITRFQTLLALHRSYLTPGDSSSGWTAGAAAYYVGYLQPRTFLLKYNENGTITDAVDCALDPLSETKCTLKSFTVEKGIYQTSNFRVQPTESIVRFPNITNLCPFGEVFNATRFASVYAWNRKRISNCVADYSVLYNSASFSTFKCYGVSPTKLNDLCFTNVYADSFVIRGDEVRQIAPGQTGKIADYNYKLPDDFTGCVIAWNSNNLDSKVGGNYNYLYRLFRKSNLKPFERDISTEIYQAGSTPCNGVEGFNCYFPLQSYGFQPTNGVGYQPYRVVVLSFELLHAPATVCGPKKSTNLVKNKCVNFNFNGLTGTGVLTESNKKFLPFQQFGRDIADTTDAVRDPQTLEILDITPCSFGGVSVITPGTNTSNQVAVLYQDVNCTEVPVAIHADQLTPTWRVYSTGSNVFQTRAGCLIGAEHVNNSYECDIPIGAGICASYQTQTNSPRRARSVASQSIIAYTMSLGAENSVAYSNNSIAICTNFTISVTTEILPVSMTKTSVDCTMYICGDSTECSNLLLQYGSFCTQLNRALTGIAVEQDKNTQEVFAQVKQIYKTPPIKDFGGFNFSQILPDPSKPSKRSFIEDLLFNKVTLADAGFIKQYGDCLGDIAARDLICAQKFNGLTVLPPLLTDEMIAQYTSALLAGTITSGWTFGAGAALQIPFAMQMAYRFNGIGVTQNVLYENQKLIANQFNSAIGKIQDSLSSTASALGKLQDVVNQNAQALNTLVKQLSSNFGAISSVLNDILSRLDKVEAEVQIDRLITGRLQSLQTYVTQQLIRAAEIRASANLAATKMSECVLGQSKRVDFCGKGYHLMSFPQSAPHGVVFLHVTYVCAQEKNFTTAPAICHDGKAHFPREGVFVSNGTHWFVTQRNFYEPQIITTDNTFVSGNCDVLIGIVNNTVYDPLQPELDS

SEQ ID NO: 3093 - protein, 1147 aa, Artificial Sequence
  SARS-CoV-2/Shenzhen/SZTH-004/2020__EPI_ISL_406595 spike protein (1-1147)(P715C_P1069C)
MFVFLVLLPLVSSQCVNLTTRTQLPPAYTNSFTRGVYYPDKVFRSSVLHSTQDLFLPFFSNVTWFHAIHVSGTNGTKRFDNPVLPFNDGVYFASTEKSNIIRGWIFGTTLDSKTQSLLIVNNATNVVIKVCEFQFCNDPFLGVYYHKNNKSWMESEFRVYSSANNCTFEYVSQPFLMDLEGKQGNFKNLREFVFKNIDGYFKIYSKHTPINLVRDLPQGFSALEPLVDLPIGINITRFQTLLALHRSYLTPGDSSSGWTAGAAAYYVGYLQPRTFLLKYNENGTITDAVDCALDPLSETKCTLKSFTVEKGIYQTSNFRVQPTESIVRFPNITNLCPFGEVFNATRFASVYAWDRKRISNCVAYYSVLYNSASFSTFKCYGVSPTKLNDLCFTNVYADSFVIRGDEVRQIAPGQTGKIADYNYKLPDDFTGCVIAWNSNNLDSKVGGNYNYLYRLFRKSNLKPFERDISTEIYQAGSTPCNGVEGFNCYFPLQSYGFQPTNGVGYQPYRVVVLSFELLHAPATVCGPKKSTNLVKNKCVNFNFNGLTGTGVLTESNKKFLPFQQFGRDIADTTDAVRDPQTLEILDITPCSFGGVSVITPGTNTSNQVAVLYQDVNCTEVPVAIHADQLTPTWRVYSTGSNVFQTRAGCLIGAEHVNNSYECDIPIGAGICASYQTQTNSPRRARSVASQSIIAYTMSLGAENSVAYSNNSIAICTNFTISVTTEILPVSMTKTSVDCTMYICGDSTECSNLLLQYGSFCTQLNRALTGIAVEQDKNTQEVFAQVKQIYKTPPIKDFGGFNFSQILPDPSKPSKRSFIEDLLFNKVTLADAGFIKQYGDCLGDIAARDLICAQKFNGLTVLPPLLTDEMIAQYTSALLAGTITSGWTFGAGAALQIPFAMQMAYRFNGIGVTQNVLYENQKLIANQFNSAIGKIQDSLSSTASALGKLQDVVNQNAQALNTLVKQLSSNFGAISSVLNDILSRLDKVEAEVQIDRLITGRLQSLQTYVTQQLIRAAEIRASANLAATKMSECVLGQSKRVDFCGKGYHLMSFPQSAPHGVVFLHVTYVCAQEKNFTTAPAICHDGKAHFPREGVFVSNGTHWFVTQRNFYEPQIITTDNTFVSGNCDVVIGIVNNTVYDPLQPELDS

SEQ ID NO: 3094 - protein, 1147 aa, Artificial Sequence
  SARS-CoV-2/France/IDF0372/2020__EPI_ISL_406596 spike protein (1-1147)(P715C_P1069C)
MFVFLVLLPLVSSQCVNLTTRTQLPPAYTNSFTRGVYYPDKVFRSSVLHSTQDLFLPFFSNVTWFHAIHVSGTNGTKRFDNPVLPFNDGVYFASTEKSNIIRGWIFGTTLDSKTQSLLIVNNATNVVIKVCEFQFCNDPFLGVYYHKNNKSWMESEFRVYSSANNCTFEYVSQPFLMDLEGKQGNFKNLREFVFKNIDGYFKIYSKHTPINLVRDLPQGFSALEPLVDLPIGINITRFQTLLALHRSYLTPGDSSSGWTAGAAAYYVGYLQPRTFLLKYNENGTITDAVDCALDPLSETKCTLKSFTVEKGIYQTSNFRVQPTESIVRFPNITNLCPFGEVFNATRFASVYAWNRKRISNCVADYSFLYNSASFSTFKCYGVSPTKLNDLCFTNVYADSFVIRGDEVRQIAPGQTGKIADYNYKLPDDFTGCVIAWNSNNLDSKVGGNYNYLYRLFRKSNLKPFERDISTEIYQAGSTPCNGVEGFNCYFPLQSYGFQPTNGVGYQPYRVVVLSFELLHAPATVCGPKKSTNLVKNKCVNFNFNGLTGTGVLTESNKKFLPFQQFGRDIADTTDAVRDPQTLEILDITPCSFGGVSVITPGTNTSNQVAVLYQDVNCTEVPVAIHADQLTPTWRVYSTGSNVFQTRAGCLIGAEHVNNSYECDIPIGAGICASYQTQTNSPRRARSVASQSIIAYTMSLGAENSVAYSNNSIAICTNFTISVTTEILPVSMTKTSVDCTMYICGDSTECSNLLLQYGSFCTQLNRALTGIAVEQDKNTQEVFAQVKQIYKTPPIKDFGGFNFSQILPDPSKPSKRSFIEDLLFNKVTLADAGFIKQYGDCLGDIAARDLICAQKFNGLTVLPPLLTDEMIAQYTSALLAGTITSGWTFGAGAALQIPFAMQMAYRFNGIGVTQNVLYENQKLIANQFNSAIGKIQDSLSSTASALGKLQDVVNQNAQALNTLVKQLSSNFGAISSVLNDILSRLDKVEAEVQIDRLITGRLQSLQTYVTQQLIRAAEIRASANLAATKMSECVLGQSKRVDFCGKGYHLMSFPQSAPHGVVFLHVTYVCAQEKNFTTAPAICHDGKAHFPREGVFVSNGTHWFVTQRNFYEPQIITTDNTFVSGNCDVVIGIVNNTVYDPLQPELDS

SEQ ID NO: 3095 - protein, 1147 aa, Artificial Sequence
  SARS-CoV-2/Australia/VIC01/2020__EPI_ISL_406844 spike protein (1-1147)(P715C_P1069C)
MFVFLVLLPLVSSQCVNLTTRTQLPPAYTNSFTRGVYYPDKVFRSSVLHSTQDLFLPFFSNVTWFHAIHVSGTNGTKRFDNPVLPFNDGVYFASTEKSNIIRGWIFGTTLDSKTQSLLIVNNATNVVIKVCEFQFCNDPFLGVYYHKNNKSWMESEFRVYSSANNCTFEYVSQPFLMDLEGKQGNFKNLREFVFKNIDGYFKIYSKHTPINLVRDLPQGFSALEPLVDLPIGINITRFQTLLALHRRYLTPGDSSSGWTAGAAAYYVGYLQPRTFLLKYNENGTITDAVDCALDPLSETKCTLKSFTVEKGIYQTSNFRVQPTESIVRFPNITNLCPFGEVFNATRFASVYAWNRKRISNCVADYSVLYNSASFSTFKCYGVSPTKLNDLCFTNVYADSFVIRGDEVRQIAPGQTGKIADYNYKLPDDFTGCVIAWNSNNLDSKVGGNYNYLYRLFRKSNLKPFERDISTEIYQAGSTPCNGVEGFNCYFPLQSYGFQPTNGVGYQPYRVVVLSFELLHAPATVCGPKKSTNLVKNKCVNFNFNGLTGTGVLTESNKKFLPFQQFGRDIADTTDAVRDPQTLEILDITPCSFGGVSVITPGTNTSNQVAVLYQDVNCTEVPVAIHADQLTPTWRVYSTGSNVFQTRAGCLIGAEHVNNSYECDIPIGAGICASYQTQTNSPRRARSVASQSIIAYTMSLGAENSVAYSNNSIAICTNFTISVTTEILPVSMTKTSVDCTMYICGDSTECSNLLLQYGSFCTQLNRALTGIAVEQDKNTQEVFAQVKQIYKTPPIKDFGGFNFSQILPDPSKPSKRSFIEDLLFNKVTLADAGFIKQYGDCLGDIAARDLICAQKFNGLTVLPPLLTDEMIAQYTSALLAGTITSGWTFGAGAALQIPFAMQMAYRFNGIGVTQNVLYENQKLIANQFNSAIGKIQDSLSSTASALGKLQDVVNQNAQALNTLVKQLSSNFGAISSVLNDILSRLDKVEAEVQIDRLITGRLQSLQTYVTQQLIRAAEIRASANLAATKMSECVLGQSKRVDFCGKGYHLMSFPQSAPHGVVFLHVTYVCAQEKNFTTAPAICHDGKAHFPREGVFVSNGTHWFVTQRNFYEPQIITTDNTFVSGNCDVVIGIVNNTVYDPLQPELDS

SEQ ID NO: 3096 - protein, 1147 aa, Artificial Sequence
  SARS-CoV-2/Germany/BavPat1/2020__EPI_ISL_406862 spike protein (1-1147)(P715C_P1069C)
MFVFLVLLPLVSSQCVNLTTRTQLPPAYTNSFTRGVYYPDKVFRSSVLHSTQDLFLPFFSNVTWFHAIHVSGTNGTKRFDNPVLPFNDGVYFASTEKSNIIRGWIFGTTLDSKTQSLLIVNNATNVVIKVCEFQFCNDPFLGVYYHKNNKSWMESEFRVYSSANNCTFEYVSQPFLMDLEGKQGNFKNLREFVFKNIDGYFKIYSKHTPINLVRDLPQGFSALEPLVDLPIGINITRFQTLLALHRSYLTPGDSSSGWTAGAAAYYVGYLQPRTFLLKYNENGTITDAVDCALDPLSETKCTLKSFTVEKGIYQTSNFRVQPTESIVRFPNITNLCPFGEVFNATRFASVYAWNRKRISNCVADYSVLYNSASFSTFKCYGVSPTKLNDLCFTNVYADSFVIRGDEVRQIAPGQTGKIADYNYKLPDDFTGCVIAWNSNNLDSKVGGNYNYLYRLFRKSNLKPFERDISTEIYQAGSTPCNGVEGFNCYFPLQSYGFQPTNGVGYQPYRVVVLSFELLHAPATVCGPKKSTNLVKNKCVNFNFNGLTGTGVLTESNKKFLPFQQFGRDIADTTDAVRDPQTLEILDITPCSFGGVSVITPGTNTSNQVAVLYQGVNCTEVPVAIHADQLTPTWRVYSTGSNVFQTRAGCLIGAEHVNNSYECDIPIGAGICASYQTQTNSPRRARSVASQSIIAYTMSLGAENSVAYSNNSIAICTNFTISVTTEILPVSMTKTSVDCTMYICGDSTECSNLLLQYGSFCTQLNRALTGIAVEQDKNTQEVFAQVKQIYKTPPIKDFGGFNFSQILPDPSKPSKRSFIEDLLFNKVTLADAGFIKQYGDCLGDIAARDLICAQKFNGLTVLPPLLTDEMIAQYTSALLAGTITSGWTFGAGAALQIPFAMQMAYRFNGIGVTQNVLYENQKLIANQFNSAIGKIQDSLSSTASALGKLQDVVNQNAQALNTLVKQLSSNFGAISSVLNDILSRLDKVEAEVQIDRLITGRLQSLQTYVTQQLIRAAEIRASANLAATKMSECVLGQSKRVDFCGKGYHLMSFPQSAPHGVVFLHVTYVCAQEKNFTTAPAICHDGKAHFPREGVFVSNGTHWFVTQRNFYEPQIITTDNTFVSGNCDVVIGIVNNTVYDPLQPELDS

SEQ ID NO: 3097 - protein, 1147 aa, Artificial Sequence
  SARS-CoV-2/Wuhan/HBCDC-HB-02/2020__EPI_ISL_412978 spike protein (1-1147)(P715C_P1069C)
MFVFLVLLPLVSSQCVNLTTRTQLPPAYTNSFTRGVYYPDKVFRSSVLHSTQDLFLPFFSNVTWFHAIHVSGTNGTKRFDNPVLPFNDGVYFASTEKSNIIRGWIFGTTLDSKTQSLLIVNNATNVVIKVCEFQFCNDPFLGVYYHKNNKSWMESEFRVYSSANNCTFEYVSQPFLMDLEGKQGNFKNLREFVFKNIDGYFKIYSKHTPINLVRDLPQGFSALEPLVDLPIGINITRFQTLLALHRSYLTPGDSSSGWTAGAAAYYVGYLQPRTFLLKYNENGTITDAVDCALDPLSETKCTLKSFTVEKGIYQTSNFRVQPTESIVRFPNITNLCPFGEVFNATRFASVYAWNRKRISNCVADYSVLYNSASFSTFKCYGVSPTKLNDLCFTNVYADSFVIRGDEVRQIAPGQTGKIADYNYKLPDDFTGCVIAWNSNNLDSKVGGNYNYLYRLFRKSNLKPFERDISTEIYQAGSTPCNGVEGFNCYFPLQSYGFQPTNGVGYQPYRVVVLSFELLHAPATVCGPKKSTNLVKNKCVNFNFNGLTGTGVLTESNKKFLPFQQFGRDIADTTDAVRDPQTLEILDITPCSFGGVSVITPGTNTSNQVAVLYQDVNCTEVPVAIHADQLTPTWRVYSTGSNVFQTRAGCLIGAEHVNNSYECDIPIGAGICASYQTQTNSPRRARSVASQSIIAYTMSLGAENSVAYSNNSIAICTNFTISVTTEILPVSMTKTSVDCTMYICGDSTECSNFLLQYGSFCTQLNRALTGIAVEQDKNTQEVFAQVKQIYKTPPIKDFGGFNFSQILPDPSKPSKRSFIEDLLFNKVTLADAGFIKQYGDCLGDIAARDLICAQKFNGLTVLPPLLTDEMIAQYTSALLAGTITSGWTFGAGAALQIPFAMQMAYRFNGIGVTQNVLYENQKLIANQFNSAIGKIQDSLSSTASALGKLQDVVNQNAQALNTLVKQLSSNFGAISSVLNDILSRLDKVEAEVQIDRLITGRLQSLQTYVTQQLIRAAEIRASANLAATKMSECVLGQSKRVDFCGKGYHLMSFPQSAPHGVVFLHVTYVCAQEKNFTTAPAICHDGKAHFPREGVFVSNGTHWFVTQRNFYEPQIITTDNTFVSGNCDVVIGIVNNTVYDPLQPELDS

SEQ ID NO: 3098 - protein, 1147 aa, Artificial Sequence
  SARS-CoV-2/Australia/QLD02/2020__EPI_ISL_407896 spike protein (1-1147)(P715C_P1069C)
MFVFLVLLPLVSSQCVNLTTRTQLPPAYTNSFTRGVYYPDKVFRSSVLHSTQDLFLPFFSNVTWFHAIHVSGTNGTKRFDNPVLPFNDGVYFASTEKSNIIRGWIFGTTLDSKTQSLLIVNNATNVVIKVCEFQFCNDPFLGVYYHKNNKSWMESEFRVYSSANNCTFEYVSQPFLMDLEGKQGNFKNLREFVFKNIDGYFKIYSKHTPINLVRDLPQGFSALEPLVDLPIGINITRFQTLLALHRSYLTPGDSSSGWTAGAAAYYVGYLQPRTFLLKYNENGTITDAVDCALDPLSETKCTLKSFTVEKGIYQTSNFRVQPTESIVRFPNITNLCPFGEVFNATRFASVYAWNRKRISNCVADYSVLYNSASFSTFKCYGVSPTKLNDLCFTNVYADSFVIRGDEVRQIAPGQTGKIADYNYKLPDDFTGCVIAWNSNNLDSKVGGNYNYLYRLFRKSNLKPFERDISTEIYQAGSTPCNGVEGFNCYFPLQSYGFQPTNGVGYQPYRVVVLSFELLHAPATVCGPKKSTNLVKNKCVNFNFNGLTGTGVLTESNKKFLPFQQFGRDIADTTDAVRDPQTLEILDITPCSFGGVSVITPGTNTSNQVAVLYQDVNCTEVPVAIHADQLTPTWRVYSTGSNVFQTRAGCLIGAEHVNNSYECDIPIGAGICASYQTQTNSPRRARSVASQSIIAYTMSLGAENSVAYSNNSIAICTNFTISVTTEILPVSMTKTSVDCTMYICGDSTECSNLLLQYGSFCTQLNRALTGIAVEQDKNTQEVFAQVKQIYKTPPIKDFGGFNFSQILPDPSKPSKRSFIEDLLFNKVTLADAGFIKQYGDCLGDIAARDLICAQKFNGLTVLPPLLTDEMIAQYTSALLAGTITSGWTFGAGAALQIPFAMQMAYRFNGIGVTQNVLYENQKLIANQFNSAIGKIQDSLSSTASALGKLQDVVNQNAQALNTLVKQLSSNFGAISSVLNDILSRLDKVEAEVQIDRLITGRLQSLQTYVTQQLIRAAEIRASANLAATKMSECVLGQSKRVDFCGKGYHLMSFPQSAPHGVVFLHVTYVCAQEKNFTTAPAICHDGKAHFPREGVFVSNGTHWFVTQRNFYEPQIITTDNTFVSGNCDVVIGIVNNTVYDPLQLELDS

SEQ ID NO: 3099 - protein, 1147 aa, Artificial Sequence
  SARS-CoV-2/India/1-31/2020__EPI_ISL_413523 spike protein (1-1147)(P715C_P1069C)
MFVFLVLLPLVSSQCVNLTTRTQLPPAYTNSFTRGVYYPDKVFRSSVLHSTQDLFLPFFSNVTWFHAIHVSGTNGTKRFDNPVLPFNDGVYFASTEKSNIIRGWIFGTTLDSKTQSLLIVNNATNVVIKVCEFQFCNDPFLGVYYHKNNKSWMESEFRVYSSANNCTFEYVSQPFLMDLEGKQGNFKNLREFVFKNIDGYFKIYSKHTPINLVRDLPQGFSALEPLVDLPIGINITRFQTLLALHRSYLTPGDSSSGWTAGAAAYYVGYLQPRTFLLKYNENGTITDAVDCALDPLSETKCTLKSFTVEKGIYQTSNFRVQPTESIVRFPNITNLCPFGEVFNATRFASVYAWNRKRISNCVADYSVLYNSASFSTFKCYGVSPTKLNDLCFTNVYADSFVIRGDEVRQIAPGQTGKIADYNYKLPDDFTGCVIAWNSNNLDSKVGGNYNYLYRLFRKSNLKPFERDISTEIYQAGSTPCNGVEGFNCYFPLQSYGFQPTNGVGYQPYRVVVLSFELLHAPATVCGPKKSTNLVKNKCVNFNFNGLTGTGVLTESNKKFLPFQQFGRDIADTTDAVRDPQTLEILDITPCSFGGVSVITPGTNTSNQVAVLYQDVNCTEVPVAIHADQLTPTWRVYSTGSNVFQTRAGCLIGAEHVNNSYECDIPIGAGICASYQTQTNSPRRARSVASQSIIAYTMSLGAENSVAYSNNSIAICTNFTISVTTEILPVSMTKTSVDCTMYICGDSTECSNLLLQYGSFCTQLNRALTGIAVEQDKNTQEVFAQVKQIYKTPPIKDFGGFNFSQILPDPSKPSKRSFIEDLLFNKVTLADAGFIKQYGDCLGDIAARDLICAQKFNGLTVLPPLLTDEMIAQYTSALLAGTITSGWTFGAGAALQIPFAMQMAYRFNGIGVTQNVLYENQKLIANQFNSVIGKIQDSLSSTASALGKLQDVVNQNAQALNTLVKQLSSNFGAISSVLNDILSRLDKVEAEVQIDRLITGRLQSLQTYVTQQLIRAAEIRASANLAATKMSECVLGQSKRVDFCGKGYHLMSFPQSAPHGVVFLHVTYVCAQEKNFTTAPAICHDGKAHFPREGVFVSNGTHWFVTQRNFYEPQIITTDNTFVSGNCDVVIGIVNNTVYDPLQPELDS

SEQ ID NO: 3100 - protein, 1147 aa, Artificial Sequence
  SARS-CoV-2/Guangdong/GD2020087-P0008/2020__EPI_ISL_413863 spike protein (1-1147)(P715C_P1069C)
MFVFLVLLPLVSSQCVNLTTRTQLPPAYTNSFTRGVYYPDKVFRSSVLHSTQDLFLPFFSNVTWFHAIHVSGTNGTKRFDNPVLPFNDGVYFASTEKSNIIRGWIFGTTLDSKTQSLLIVNNATNVVIKVCEFQFCNDPFLGVYYHKNNKSWMESEFRVYSSANNCTFEYVSQPFLMDLEGKQGNFKNLREFVFKNIDGYFKIYSKHTPINLVRDLPQGFSALEPLVDLPIGINITRFQTLLALHRSYLTPGDSSSGWTAGAAAYYVGYLQPRTFLLKYNENGTITDAVDCALDPLSETKCTLKSFTVEKGIYQTSNFRVQPTESIVRFPNITNLCPFGEVFNATRFASVYAWNRKRISNCVADYSVLYNSASFSTFKCYGVSPTKLNDLCFTNVYADSFVIRGDEVREIAPGQTGKIADYNYKLPDDFTGCVIAWNSNNLDSKVGGNYNYLYRLFRKSNLKPFERDISTEIYQAGSTPCNGVEGFNCYFPLQSYGFQPTNGVGYQPYRVVVLSFELLHAPATVCGPKKSTNLVKNKCVNFNFNGLTGTGVLTESNKKFLPFQQFGRDIADTTDAVRDPQTLEILDITPCSFGGVSVITPGTNTSNQVAVLYQDVNCTEVPVAIHADQLTPTWRVYSTGSNVFQTRAGCLIGAEHVNNSYECDIPIGAGICASYQTQTNSPRRARSVASQSIIAYTMSLGAENSVAYSNNSIAICTNFTISVTTEILPVSMTKTSVDCTMYICGDSTECSNLLLQYGSFCTQLNRALTGIAVEQDKNTQEVFAQVKQIYKTPPIKDFGGFNFSQILPDPSKPSKRSFIEDLLFNKVTLADAGFIKQYGDCLGDIAARDLICAQKFNGLTVLPPLLTDEMIAQYTSALLAGTITSGWTFGAGAALQIPFAMQMAYRFNGIGVTQNVLYENQKLIANQFNSAIGKIQDSLSSTASALGKLQDVVNQNAQALNTLVKQLSSNFGAISSVLNDILSRLDKVEAEVQIDRLITGRLQSLQTYVTQQLIRAAEIRASANLAATKMSECVLGQSKRVDFCGKGYHLMSFPQSAPHGVVFLHVTYVCAQEKNFTTAPAICHDGKAHFPREGVFVSNGTHWFVTQRNFYEPQIITTDNTFVSGNCDVVIGIVNNTVYDPLQPELDS

SEQ ID NO: 3101 - protein, 1147 aa, Artificial Sequence
  SARS-CoV-2/Sweden/01/2020__EPI_ISL_411951 spike protein (1-1147)(P715C_P1069C)
MFVFLVLLPLVSSQCVNLTTRTQLPPAYTNSFTRGVYYPDKVFRSSVLHSTQDLFLPFFSNVTWFHAIHVSGTNGTKRFDNPVLPFNDGVYFASTEKSNIIRGWIFGTTLDSKTQSLLIVNNATNVVIKVCEFQFCNDPFLGVYYHKNNKSWMESEFRVYSSANNCTFEYVSQPFLMDLEGKQGNFKNLREFVFKNIDGYFKIYSKHTPINLVRDLPQGFSALEPLVDLPIGINITRFQTLLALHRSYLTPGDSSSGWTAGAAAYYVGYLQPRTFLLKYNENGTITDAVDCALDPLSETKCTLKSFTVEKGIYQTSNFRVQPTESIVRFPNITNLCPFGEVFNATRFASVYAWNRKRISNCVADYSVLYNSASFSTFKCYGVSPTKLNDLCFTNVYADSFVIRGDEVRQIAPGQTGKIADYNYKLPDDFTGCVIAWNSNNLDSKVGGNYNYLYRLFRKSNLKPFERDISTEIYQAGSTPCNGVEGFNCYFPLQSYGFQPTNGVGYQPYRVVVLSFELLHAPATVCGPKKSTNLVKNKCVNFNFNGLTGTGVLTESNKKFLPFQQFGRDIADTTDAVRDPQTLEILDITPCSFGGVSVITPGTNTSNQVAVLYQDVNCTEVPVAIHADQLTPTWRVYSTGSNVFQTRAGCLIGAEHVNNSYECDIPIGAGICASYQTQTNSPRRARSVASQSIIAYTMSLGAENSVAYSNNSIAICTNFTISVTTEILPVSMTKTSVDCTMYICGDSTECSNLLLQYGSFCTQLNRALTGIAVEQDKNTQEVFAQVKQIYKTPPIKDCGGFNFSQILPDPSKPSKRSFIEDLLFNKVTLADAGFIKQYGDCLGDIAARDLICAQKFNGLTVLPPLLTDEMIAQYTSALLAGTITSGWTFGAGAALQIPFAMQMAYRFNGIGVTQNVLYENQKLIANQFNSAIGKIQDSLSSTASALGKLQDVVNQNAQALNTLVKQLSSNFGAISSVLNDILSRLDKVEAEVQIDRLITGRLQSLQTYVTQQLIRAAEIRASANLAATKMSECVLGQSKRVDFCGKGYHLMSFPQSAPHGVVFLHVTYVCAQEKNFTTAPAICHDGKAHFPREGVFVSNGTHWFVTQRNFYEPQIITTDNTFVSGNCDVVIGIVNNTVYDPLQPELDS

SEQ ID NO: 3102 - protein, 1147 aa, Artificial Sequence
  SARS-CoV-2/Tianmen/HBCDC-HB-07/2020__EPI_ISL_412983 spike protein (1-1147)(P715C_P1069C)
MFVFLVLLPLVSSQCVNLTTRTQLPPAYTNSFTRGVYYPDKVFRSSVLHSTQDLFLPFFSNVTWFHAIHVSGTNGTKRFDNPVLPFNDGVYFASTEKSNIIRGWIFGTTLDSKTQSLLIVNNATNVVIKVCEFQFCNDPFLGVYYHKNNKSWMESEFRVYSSANNCTFEYVSQPFLMDLEGKQGNFKNLREFVFKNIDGYFKIYSKHTPINLVRDLPQGFSALEPLVDLPIGINITRFQTLLALHRSYLTPGDSSSGWTAGAAAYYVGYLQPRTFLLKYNENGTITDAVDCALDPLSETKCTLKSFTVEKGIYQTSNFRVQPTESIVRFPNITNLCPFGEVFNATRFASVYAWNRKRISNCVADYSVLYNSASFSTFKCYGVSPTKLNDLCFTNVYADSFVIRGDEVRQIAPGQTGKIADYNYKLPDDFTGCVIAWNSNNLDSKVGGNYNYLYRLFRKSNLKPFERDISTEIYQAGSTPCNGVEGFNCYFPLQSYGFQPTNGVGYQPYRVVVLSFELLHAPATVCGPKKSTNLVKNKCVNFNFNGLTGTGVLTESNKKFLPFQQFGRDIADTTDAVRDPQTLEILDITPCSFGGVSVITPGTNTSNQVAVLYQDLNCTEVPVAIHADQLTPTWRVYSTGSNVFQTRAGCLIGAEHVNNSYECDIPIGAGICASYQTQTNSPRRARSVASQSIIAYTMSLGAENSVAYSNNSIAICTNFTISVTTEILPVSMTKTSVDCTMYICGDSTECSNLLLQYGSFCTQLNRALTGIAVEQDKNTQEVFAQVKQIYKTPPIKDFGGFNFSQILPDPSKPSKRSFIEDLLFNKVTLADAGFIKQYGDCLGDIAARDLICAQKFNGLTVLPPLLTDEMIAQYTSALLAGTITSGWTFGAGAALQIPFAMQMAYRFNGIGVTQNVLYENQKLIANQFNSAIGKIQDSLSSTASALGKLQDVVNQNAQALNTLVKQLSSNFGAISSVLNDILSRLDKVEAEVQIDRLITGRLQSLQTYVTQQLIRAAEIRASANLAATKMSECVLGQSKRVDFCGKGYHLMSFPQSAPHGVVFLHVTYVCAQEKNFTTAPAICHDGKAHFPREGVFVSNGTHWFVTQRNFYEPQIITTDNTFVSGNCDVVIGIVNNTVYDPLQPELDS

SEQ ID NO: 3103 - protein, 1147 aa, Artificial Sequence
  SARS-CoV-2/Hong Kong/case42_VM20002493/2020__EPI_ISL_414527 spike protein (1-1147)(P715C_P1069C)
MFVFLVLLPLVSSQCVNLTTRTQLPPAYTNSFTRGVYYPDKVFRSSVLHSTQDLFLPFFSNVTWFHAIHVSGTNGTKRFDNPVLPFNDGVYFASTEKSNIIRGWIFGTTLDSKTQSLLIVNNATNVVIKVCEFQFCNDPFLGVYYHKNNKSWMESEFRVYSSANNCTFEYVSQPFLMDLEGKQGNFKNLREFVFKNIDGYFKIYSKHTPINLVRDLPQGFSALEPLVDLPIGINITRFQTLLALHRSYLTPGDSSSGWTAGAAAYYVGYLQPRTFLLKYNENGTITDAVDCALDPLSETKCTLKSFTVEKGIYQTSNFRVQPTESIVRFPNITNLCPFGEVFNATRFASVYAWNRKRISNCVADYSVLYNSASFSTFKCYGVSPTKLNDLCFTNVYADSFVIRGDEVRQIAPGQTGKIADYNYKLPDDFTGCVIAWNSNNLDSKVGGNYNYLYRLFRKSNLKPFERDISTEIYQAGSTPCNGVEGFNCYFPLQSYGFQPTNGVGYQPYRVVVLSFELLHAPATVCGPKKSTNLVKNKCVNFNFNGLTGTGVLTESNKKFLPFQQFGRDIADTTDAVRDPQTLEILDITPCSFGGVSVITPGTNTSNQVAVLYQDVNCTEVPVAIHADQLTPTWRVYSTGSNVFQTRAGCLIGAEHVNNSYECDIPIGAGICASYQTQTNSPRRARSVASQSIIAYTMSLGAENSVAYSNNSIAICTNFAISVTTEILPVSMTKTSVDCTMYICGDSTECSNLLLQYGSFCTQLNRALTGIAVEQDKNTQEVFAQVKQIYKTPPIKDFGGFNFSQILPDPSKPSKRSFIEDLLFNKVTLADAGFIKQYGDCLGDIAARDLICAQKFNGLTVLPPLLTDEMIAQYTSALLAGTITSGWTFGAGAALQIPFAMQMAYRFNGIGVTQNVLYENQKLIANQFNSAIGKIQDSLSSTASALGKLQDVVNQNAQALNTLVKQLSSNFGAISSVLNDILSRLDKVEAEVQIDRLITGRLQSLQTYVTQQLIRAAEIRASANLAATKMSECVLGQSKRVDFCGKGYHLMSFPQSAPHGVVFLHVTYVCAQEKNFTTAPAICHDGKAHFPREGVFVSNGTHWFVTQRNFYEPQIITTDNTFVSGNCDVVIGIVNNTVYDPLQPELDS

SEQ ID NO: 3104 - protein, 1147 aa, Artificial Sequence
  SARS-CoV-2/USA/CruiseA-23/2020__EPI_ISL_414482 spike protein (1-1147)(P715C_P1069C)
MFVFLVLLPLVSSQCVNLTTRTQLPPAYTNSFTRGVYYPDKVFRSSVLHSTQDLFLPFFSNVTWFHAIHVSGTNGTKRFDNPVLPFNDGVYFASTEKSNIIRGWIFGTTLDSKTQSLLIVNNATNVVIKVCEFQFCNDPFLGVYYHKNNKSWMESEFRVYSSANNCTFEYVSQPFLMDLEVKQGNFKNLREFVFKNIDGYFKIYSKHTPINLVRDLPQGFSALEPLVDLPIGINITRFQTLLALHRSYLTPGDSSSGWTAGAAAYYVGYLQPRTFLLKYNENGTITDAVDCALDPLSETKCTLKSFTVEKGIYQTSNFRVQPTESIVRFPNITNLCPFGEVFNATRFASVYAWNRKRISNCVADYSVLYNSASFSTFKCYGVSPTKLNDLCFTNVYADSFVIRGDEVRQIAPGQTGKIADYNYKLPDDFTGCVIAWNSNNLDSKVGGNYNYLYRLFRKSNLKPFERDISTEIYQAGSTPCNGVEGFNCYFPLQSYGFQPTNGVGYQPYRVVVLSFELLHAPATVCGPKKSTNLVKNKCVNFNFNGLTGTGVLTESNKKFLPFQQFGRDIADTTDAVRDPQTLEILDITPCSFGGVSVITPGTNTSNQVAVLYQDVNCTEVPVAIHADQLTPTWRVYSTGSNVFQTRAGCLIGAEHVNNSYECDIPIGAGICASYQTQTNSPRRARSVASQSIIAYTMSLGAENSVAYSNNSIAICTNFTISVTTEILPVSMTKTSVDCTMYICGDSTECSNLLLQYGSFCTQLNRALTGIAVEQDKNTQEVFAQVKQIYKTPPIKDFGGFNFSQILPDPSKPSKRSFIEDLLFNKVTLADAGFIKQYGDCLGDIAARDLICAQKFNGLTVLPPLLTDEMIAQYTSALLAGTITSGWTFGAGAALQIPFAMQMAYRFNGIGVTQNVLYENQKLIANQFNSAIGKIQDSLSSTASALGKLQDVVNQNAQALNTLVKQLSSNFGAISSVLNDILSRLDKVEAEVQIDRLITGRLQSLQTYVTQQLIRAAEIRASANLAATKMSECVLGQSKRVDFCGKGYHLMSFPQSAPHGVVFLHVTYVCAQEKNFTTAPAICHDGKAHFPREGVFVSNGTHWFVTQRNFYEPQIITTDNTFVSGNCDVVIGIVNNTVYDPLQPELDS

SEQ ID NO: 3105 - protein, 1147 aa, Artificial Sequence
  SARS-CoV-2/Hong Kong/case85_VM20002868/2020__EPI_ISL_414519 spike protein (1-1147)(P715C_P1069C)
MFVFLVLVPLVSSQCVNLTTRTQLPPAYTNSFTRGVYYPDKVFRSSVLHSTQDLFLPFFSNVTWFHAIHVSGTNGTKRFDNPVLPFNDGVYFASTEKSNIIRGWIFGTTLDSKTQSLLIVNNATNVVIKVCEFQFCNDPFLGVYYHKNNKSWMESEFRVYSSANNCTFEYVSQPFLMDLEGKQGNFKNLREFVFKNIDGYFKIYSKHTPINLVRDLPQGFSALEPLVDLPIGINITRFQTLLALHRSYLTPGDSSSGWTAGAAAYYVGYLQPRTFLLKYNENGTITDAVDCALDPLSETKCTLKSFTVEKGIYQTSNFRVQPTESIVRFPNITNLCPFGEVFNATRFASVYAWNRKRISNCVADYSVLYNSASFSTFKCYGVSPTKLNDLCFTNVYADSFVIRGDEVRQIAPGQTGKIADYNYKLPDDFTGCVIAWNSNNLDSKVGGNYNYLYRLFRKSNLKPFERDISTEIYQAGSTPCNGVEGFNCYFPLQSYGFQPTNGVGYQPYRVVVLSFELLHAPATVCGPKKSTNLVKNKCVNFNFNGLTGTGVLTESNKKFLPFQQFGRDIADTTDAVRDPQTLEILDITPCSFGGVSVITPGTNTSNQVAVLYQDVNCTEVPVAIHADQLTPTWRVYSTGSNVFQTRAGCLIGAEHVNNSYECDIPIGAGICASYQTQTNSPRRARSVASQSIIAYTMSLGAENSVAYSNNSIAICTNFTISVTTEILPVSMTKTSVDCTMYICGDSTECSNLLLQYGSFCTQLNRALTGIAVEQDKNTQEVFAQVKQIYKTPPIKDFGGFNFSQILPDPSKPSKRSFIEDLLFNKVTLADAGFIKQYGDCLGDIAARDLICAQKFNGLTVLPPLLTDEMIAQYTSALLAGTITSGWTFGAGAALQIPFAMQMAYRFNGIGVTQNVLYENQKLIANQFNSAIGKIQDSLSSTASALGKLQDVVNQNAQALNTLVKQLSSNFGAISSVLNDILSRLDKVEAEVQIDRLITGRLQSLQTYVTQQLIRAAEIRASANLAATKMSECVLGQSKRVDFCGKGYHLMSFPQSAPHGVVFLHVTYVCAQEKNFTTAPAICHDGKAHFPREGVFVSNGTHWFVTQRNFYEPQIITTDNTFVSGNCDVVIGIVNNTVYDPLQPELDS

SEQ ID NO: 3106 - protein, 1147 aa, Artificial Sequence; identical to SEQ ID NO: 3096
  SARS-CoV-2/England/200990660/2020__EPI_ISL_414523 spike protein (1-1147)(P715C_P1069C)

SEQ ID NO: 3107 - protein, 1147 aa, Artificial Sequence
  SARS-CoV-2/Australia/NSW09/2020__EPI_ISL_413595 spike protein (1-1147)(P715C_P1069C)
MFVFLVLLPLVSSQCVNLTTRTQLPPAYTNSFTRGVYYPDKVFRSSVLHSTQDLFLPFFSNVTWFHAIHVSGTNGTKRFDNPVLPFNDGVYFASTEKSNIIRGWIFGTTLDSKTQSLLIVNNATNVVIKVCEFQFCNDPFLGVYYHKNNKSWMESEFRVYSSANNCTFEYVSQPFLMDLEGKQGNFKNLREFVFKNIDGYFKIYSKHTPINLVRDLPQGFSALEPLVDLPIGINITRFQTLLALHRSYLTPGDSSSGWTAGAAAYYVGYLQPRTFLLKYNENGTITDAVDCALDPLSETKCTLKSFTVEKGIYQTSNFRVQPTESIVRFPNITNLCPFGEVFNATRFASVYAWNRKRISNCVADYSVLYNSASFSTFKCYGVSPTKLNDLCFTNVYADSFVIRGDEVRQIAPGQTGKIADYNYKLPDDFTGCVIAWNSNNLDSKVGGNYNYLYRLFRKSNLKPFERDISTEIYQAGSTPCNGVEGFNCYFPLQSYGFQPTNGVGYQPYRVVVLSFELLHAPATVCGPKKSTNLVKNKCVNFNFNGLTGTGVLTESNKKFLPFQQFGRDIADTTDAVRDPQTLEILDITPCSFGGVSVITPGTNTSNQVAVLYQDVNCTEVPVAIHADQLTPTWRVYSTGSNVFQTRAGCLIGAEHVNNSYECDIPIGAGICASYQTQTNSPRRARSVASQSIIAYTMSLGAENSVAYSNNSIAICTNFTISVTTEILPVSMTKTSVDCTMYICGDSTECSNLLLQYGSFCTQLNRALTGIAVEQDKNTQEVFAQVKQIYKTPPIKDFGGFNFSQILPDPSKPSKRSFIEDLLFNKVTLADAGFIKQYGDCLGDIAARDLICAQKFNGLTVLPPLLTDEMIAQYTSALLAGTITSGWTFGAGAALQIPFAMQMAYRFNGIGVTQNVLYENQKLIANQFNSAIGKIQDSLSFTASALGKLQDVVNQNAQALNTLVKQLSSNFGAISSVLNDILSRLDKVEAEVQIDRLITGRLQSLQTYVTQQLIRAAEIRASANLAATKMSECVLGQSKRVDFCGKGYHLMSFPQSAPHGVVFLHVTYVCAQEKNFTTAPAICHDGKAHFPREGVFVSNGTHWFVTQRNFYEPQIITTDNTFVSGNCDVVIGIVNNTVYDPLQPELDS

SEQ ID NO: 3108 - protein, 1147 aa, Artificial Sequence; identical to SEQ ID NO: 3088
  SARS-CoV-2/Australia/NSW10/2020__EPI_ISL_413596 spike protein (1-1147)(P715C_P1069C)

SEQ ID NO: 3109 - protein, 1147 aa, Artificial Sequence
  SARS-CoV-2/Switzerland/1000477797/2020__EPI_ISL_413023 spike protein (1-1147)(P715C_P1069C)
MFVFLVLLPLVSSQCVNLTTRTQLPPAYTNSFTRGVYYPDKVFRSSVLHSTQDLFLPFFSNVTWFHAIHVSGTNGTKRFDNPVLPFNDGVYFASTEKSNIIRGWIFGTTLDSKTQSLLIVNNATNVVIKVCEFQFCNDPFLGVYYHKNNKSWMESEFRVYSSANNCTFEYVSQPFLMDLEGKQGNFKNLREFVFKNIDGYFNIYSKHTPINLVRDLPQGFSALEPLVDLPIGINITRFQTLLALHRSYLTPGDSSSGWTAGAAAYYVGYLQPRTFLLKYNENGTITDAVDCALDPLSETKCTLKSFTVEKGIYQTSNFRVQPTESIVRFPNITNLCPFGEVFNATRFASVYAWNRKRISNCVADYSVLYNSASFSTFKCYGVSPTKLNDLCFTNVYADSFVIRGDEVRQIAPGQTGKIADYNYKLPDDFTGCVIAWNSNNLDSKVGGNYNYLYRLFRKSNLKPFERDISTEIYQAGSTPCNGVEGFNCYFPLQSYGFQPTNGVGYQPYRVVVLSFELLHAPATVCGPKKSTNLVKNKCVNFNFNGLTGTGVLTESNKKFLPFQQFGRDIADTTDAVRDPQTLEILDITPCSFGGVSVITPGTNTSNQVAVLYQGVNCTEVPVAIHADQLTPTWRVYSTGSNVFQTRAGCLIGAEHVNNSYECDIPIGAGICASYQTQTNSPRRARSVASQSIIAYTMSLGAENSVAYSNNSIAICTNFTISVTTEILPVSMTKTSVDCTMYICGDSTECSNLLLQYGSFCTQLNRALTGIAVEQDKNTQEVFAQVKQIYKTPPIKDFGGFNFSQILPDPSKPSKRSFIEDLLFNKVTLADAGFIKQYGDCLGDIAARDLICAQKFNGLTVLPPLLTDEMIAQYTSALLAGTITSGWTFGAGAALQIPFAMQMAYRFNGIGVTQNVLYENQKLIANQFNSAIGKIQDSLSSTASALGKLQDVVNQNAQALNTLVKQLSSNFGAISSVLNDILSRLDKVEAEVQIDRLITGRLQSLQTYVTQQLIRAAEIRASANLAATKMSECVLGQSKRVDFCGKGYHLMSFPQSAPHGVVFLHVTYVCAQEKNFTTAPAICHDGKAHFPREGVFVSNGTHWFVTQRNFYEPQIITTDNTFVSGNCDVVIGIVNNTVYDPLQPELDS

SEQ ID NO: 3110 - protein, 1147 aa, Artificial Sequence
  SARS-CoV-2/Belgium/BA-02291/2020__EPI_ISL_415159 spike protein (1-1147)(P715C_P1069C)
MFVFLVLLPLVSSQCVNLTTRTQLPPAYTNSFTRGVYYPDKVFRSSVLHSTQDLFLPFFSNVTWFHAIHVSGTNGTKRFDNPVLPFNDGVYFASTEKSNIIRGWIFGTTLDSKTQSLLIVNNATNVVIKVCEFQFCNDPFLGVYYHKNNKSWMESEFRVYSSANNCTFEYVSQPFLMDLEGKQGNFKNLREFVFKNIDGYFKIYSKHTPINLVRDLPQGFSALEPLVDLPIGINITRFQTLLALHRSYLTPGDSSSGWTAGAAAYYVGYLQPRTFLLKYNENGTITDAVDCALDPLSETKCTLKSFTVEKGIYQTSNFRVQPTESIVRFPNITNLCPFGEVFNATRFASVYAWNRKRISNCVADYSVLYNSASFSTFKCYGVSPTKLNDLCFTNVYADSFVIRGDEVRQIAPGQTGKIADYNYKLPDDFTGCVIAWNSNNLDSKVGGNYNYLYRLFRRSNLKPFERDISTEIYQAGSTPCNGVEGFNCYFPLQSYGFQPTNGVGYQPYRVVVLSFELLPAPATVCGPKKSTNLVKNKCVNFNFNGLTGTGVLTESNKKFLPFQQFGRDIADTTDAVRDPQTLEILDITPCSFGGVSVITPGTNTSNQVAVLYQGVNCTEVPVAIHADQLTPTWRVYSTGSNVFQTRAGCLIGAEHVNNSYECDIPIGAGICASYQTQTNSPRRARSVASQSIIAYTMSLGAENSVAYSNNSIAICTNFTISVTTEILPVSMTKTSVDCTMYICGDSTECSNLLLQYGSFCTQLNRALTGIAVEQDKNTQEVFAQVKQIYKTPPIKDFGGFNFSQILPDPSKPSKRSFIEDLLFNKVTLADAGFIKQYGDCLGDIAARDLICAQKFNGLTVLPPLLTDEMIAQYTSALLAGTITSGWTFGAGAALQIPFAMQMAYRFNGIGVTQNVLYENQKLIANQFNSAIGKIQDSLSSAAPALGKLQDVVNQNAQALNTLVKQLSSNFGAISSVLNDILSRLDKVEAEVQIDRLITGRLQSLQTYVTQQLIRAAEIRASANLAATKMSECVLGQSKRVDFCGKGYHLMSFPQSAPHGVVFLHVTYVCAQEKNFTTAPAICHDGKAHFPREGVFVSNGTHWFVTQRNFYEPQIITTDNTFVSGNCDVVIGIVNNTVYDPLQPELDS

SEQ ID NO: 3111 - protein, 1147 aa, Artificial Sequence
  SARS-CoV-2/USA/WA8-UW5/2020__EPI_ISL_413486 spike protein (1-1147)(P715C_P1069C)
MFVFLVLLPLVSSQCVNLTTRTQLPPAYTNSFTRGVYYPDKVFRSSVLHSTQDLFLPFFSNVTWFHAIHVSGTNGTKRFDNPVLPFNDGVYFASTEKSNIIRGWIFGTTLDSKTQSLLIVNNATNVVIKVCEFQFCNDPFLGVYYHKNNKSWMESEFRVYSSANNCTFEYVSQPFLMDLEGKQGNFKNLREFVFKNIDGYFKIYSKHTPINLVRDLPQGFSALEPLVDLPIGINITRFQTLLALHRSYLTPGDSSSGWTAGAAAYYVGYLQPRTFLLKYNENGTITDAVDCALDPLSETKCTLKSFTVEKGIYQTSNFRVQPTESIVRFPNITNLCPFGEVFNATRFASVYAWNRKRISNCVADYSVLYNSASFSTFKCYGVSPTKLNDLCFTNVYADSFVIRGDEVRQIAPGQTGKIADYNYKLPDDFTGCVIAWNSNNLDSKVGGNYNYLYRLFRKSNLKPFERDISTEIYQAGSTPCNGVEGFNCYFPLQSYGFQPTNGVGYQPYRVVVLSFELLHAPATVCGPKKSTNLVKNKCVNFNFNGLTGTGVLTESNKKFLPFQQFGRDIADTTDAVRDPQTLEILDITPCSFGGVSVITPGTNTSNQVAVLYQDVNCTEVPVAIHADQLTPTWRVYSTGSNVFQTRAGCLIGAEYVNNSYECDIPIGAGICASYQTQTNSPRRARSVASQSIIAYTMSLGAENSVAYSNNSIAICTNFTISVTTEILPVSMTKTSVDCTMYICGDSTECSNLLLQYGSFCTQLNRALTGIAVEQDKNTQEVFAQVKQIYKTPPIKDFGGFNFSQILPDPSKPSKRSFIEDLLFNKVTLADAGFIKQYGDCLGDIAARDLICAQKFNGLTVLPPLLTDEMIAQYTSALLAGTITSGWTFGAGAALQIPFAMQMAYRFNGIGVTQNVLYENQKLIANQFNSAIGKIQDSLSSTASALGKLQDVVNQNAQALNTLVKQLSSNFGAISSVLNDILSRLDKVEAEVQIDRLITGRLQSLQTYVTQQLIRAAEIRASANLAATKMSECVLGQSKRVDFCGKGYHLMSFPQSAPHGVVFLHVTYVCAQEKNFTTAPAICHDGKAHFPREGVFVSNGTHWFVTQRNFYEPQIITTDNTFVSGNCDVVIGIVNNTVYDPLQPELDS

SEQ ID NO: 3112 - protein, 1147 aa, Artificial Sequence
  SARS-CoV-2/England/20102000506/2020__EPI_ISL_415147 spike protein (1-1147)(P715C_P1069C)
MFVFLVLLPLVSSQCVNLTTRTQLPPAYTNSFTRGVYYPDKVFRSSVLHSTQDLFLPFFSNVTWFHAIHVSGTNGTKRFDNPVLPFNDGVYFASTEKSNIIRGWIFGTTLDSKTQSLLIVNNATNVVIKVCEFQFCNDPFLGVYYHKNNKSWMESEFRVYSSANNCTFEYVSQPFLMDLEGKQGNFKNLREFVFKNIDGYFKIYSKHTPINLVRDLPQGFSALEPLVDLPIGINITRFQTLLALHRSYLTPGDSSSGWTAGAAAYYVGYLQPRTFLLKYNENGTITDAVDCALDPLSETKCTLKSFTVEKGIYQTSNFRVQPTESIVRFPNITNLCPFGEVFNATRFASVYAWNRKRISNCVADYSVLYNSASFSTFKCYGVSPTKLNDLCFTNVYADSFVIRGDEVRQIAPGQTGKIADYNYKLPDDFTGCVIAWNSNNLDSKVGGNYNYLYRLFRKSNLKPFERDISTEIYQAGSTPCNGVEGFNCYFPLQSYGFQPTNGVGYQPYRVVVLSFELLHAPATVCGPKKSTNLVKNKCVNFNFNGLTGTGVLTESNKKFLPFQQFGRDIADTTDAVRDPQTLEILDITPCSFGGVSVITPGTNTSNQVAVLYQGVNCTEVPVAIHADQLTPTWRVYSTGSNVFQTRAGCLIGAEHVNNSYECDIPIGAGICASYQTQTNSPRRARSVASQSIIAYTMSLGAENSVAYSNNSIAICTNFTISVTTEILPVSMTKTSVDCTMYICGDSTECSNLLLQYGSFCTQLNRALTGIAVEQDKNTQEVFAQVKQIYKTPPIKDFGGFNFSQILPDPSKPSKRSFIEDLLFNKVTLADAGFIKQYGYCLGDIAARDLICAQKFNGLTVLPPLLTDEMIAQYTSALLAGTITSGWTFGAGAALQIPFAMQMAYRFNGIGVTQNVLYENQKLIANQFNSAIGKIQDSLSSTASALGKLQDVVNQNAQALNTLVKQLSSNFGAISSVLNDILSRLDKVEAEVQIDRLITGRLQSLQTYVTQQLIRAAEIRASANLAATKMSECVLGQSKRVDFCGKGYHLMSFPQSAPHGVVFLHVTYVCAQEKNFTTAPAICHDGKAHFPREGVFVSNGTHWFVTQRNFYEPQIITTDNTFVSGNCDVVIGIVNNTVYDPLQPELDS

SEQ ID NO: 3113 - protein, 1147 aa, Artificial Sequence
  SARS-CoV-2/Belgium/VAG-03013/2020__EPI_ISL_415155 spike protein (1-1147)(P715C_P1069C)
MFVFLVLLPLVSSQCVNLTTRTQLPPAYTNSFTRGVYYPDKVFRSSVLHSTQDLFLPFFSNVTWFHAIHVSGTNGTKRFDNPVLPFNDGVYFASTEKSNIIRGWIFGTTLDSKTQSLLIVNNATNVVIKVCEFQFCNDPFLGVYYHKNNKSWMESEFRVYSSANNCTFEYVSQPFLMDLEGKQGNFKNLREFVFKNIDGYFKIYSKHTPINLVRDLPQGFSALEPLVDLPIGINITRFQTLLALHRSYLTPGDSSSGWTAGAAAYYVGYLQPRTFLLKYNENGTITDAVDCALDPLSETKCTLKSFTVEKGIYQTSNFRVQPTESIVRFPNITNLCPFGEVFNATRFASVYAWNRKRISNCVADYSVLYNSASFSTFKCYGVSPTKLNDLCFTNVYADSFVIRGDEVRQIAPGQTGKIADYNYKLPDDFTGCVIAWNSNNLDSKVGGNYNYLYRLFRKSNLKPFERDISTEIYQAGSTPCNGVEGFNCYFPLQSYGFQPTNGVGYQPYRVVVLSFELLHAPATVCGPKKSTNLVKNKCVNFNFNGLTGTGVLTESNKKFLPFQQFGRDIADTTDAVRDPQTLEILDITPCSFGGVSVITPGTNTSNQVAVLYQGVNCTEVPVAIHADQLTPTWRVYSTGSNVFQTRAGCLIGAEHVNNSYECDIPIGAGICASYQTQTNSPRRARSVASQSIIAYTMSLGAENSVAYSNNSIAICTNFTISVTTEILPVSMTKTSVDCTMYICGDSTECSNLLLQYGSFCTQLNRALTGIAVEQDKNTQEVFAQVKQIYKTPPIKDFGGFNFSQILPDPSKPSKRSFIEDLLFNKVTLADAGFIKQYGDCLGDIAARDLICAQKFNGLTVLPPLLTDEMIAQYTSALLAGTITSGWTFGAGAALQIPFAMQMAYRFNGIGVTQNVLYENQKLIANQFNSAIGKIQDSLSSTATALGKLQDVVNQNAQALNTLVKQLSSNFGAISSVLNDILSRLDKVEAEVQIDRLITGRLQSLQTYVTQQLIRAAEIRASANLAATKMSECVLGQSKRVDFCGKGYHLMSFPQSAPHGVVFLHVTYVCAQEKNFTTAPAICHDGKAHFPREGVFVSNGTHWFVTQRNFYEPQIITTDNTFVSGNCDVVIGIVNNTVYDPLQPELDS

SEQ ID NO: 3114 - protein, 1147 aa, Artificial Sequence
  SARS-CoV-2/Belgium/BC-03016/2020__EPI_ISL_415157 spike protein (1-1147)(P715C_P1069C)
MFVFLVLLPLVSSQCVNLTTRTQLPPAYTNSFTRGVYYPDKVFRSSVLHSTQDLFLPFFSNVTWFHAIHVSGTNGTKRFDNPVLPFNDGVYFASTEKSNIIRGWIFGTTLDSKTQSLLIVNNATNVVIKVCEFQFCNDPFLGVYYHKNNKSWMESEFRVYSSANNCTFEYVSQPFLMDLEGKQGNFKNLREFVFKNIDGYFKIYSKHTPINLVRDLPQGFSALEPLVDLPIGINITRFQTLLALHRSYLTPGDSSSGWTAGAAAYYVGYLQPRTFLLKYNENGTITDAVDCALDPLSETKCTLKSFTVEKGIYQTSNFRVQPTESIVRFPNITNLCPFGEVFNATRFASVYAWNRKRISNCVADYSVLYNSASFSTFKCYGVSPTKLNDLCFTNVYADSFVIRGDEVRQIAPGQTGKIADYNYKLPDDFTGCVIAWNSNNLDSKVGGNYNYLYRLFRKSNLKPFERDISTEIYQAGSTPCNGVEGFNCYFPLQSYGFQPTNGVGYQPYRVVVLSFELLHAPATVCGPKKSTNLVKNKCVNFNFNGLTGTGVLTESNKKFLPFQQFGRDIADTTDAVRDPQTLEILDITPCSFGGVSVITPGTNTSNQVAVLYQGVNCTEVPVAIHADQLTPTWRVYSTGSNVFQTRAGCLIGAEHVNNSYECDIPIGAGICASYQTQTNSPRRARSVASQSIIAYTMSLGAENSVAYSNNSIAICTNFTISVTTEILPVSMTKTSVDCTMYICGDSTECSNLLLQYGSFCTQLNRALTGIAVEQDKNTQEVFAQVKQIYKTPPIKDFGGFNFSQILPDPSKPSKRSFIEDLLFNKVTLADAGFIKQYGDCLGDIAARDLICAQKFNGLTVLPPLLTDEMIAQYTSALLAGTITSGWTFGAGAALQIPFAMQMAYRFNGIGVTQNVLYENQKLIANQFNSAIGKIQDSLSSTAPALGKLQDVVNQNAQALNTLVKQLSSNFGAISSVLNDILSRLDKVEAEVQIDRLITGRLQSLQTYVTQQLIRAAEIRASANLAATKMSECVLGQSKRVDFCGKGYHLMSFPQSAPHGVVFLHVTYVCAQEKNFTTAPAICHDGKAHFPREGVFVSNGTHWFVTQRNFYEPQIITTDNTFVSGNCDVVIGIVNNTVYDPLQPELDS

SEQ ID NO: 3115 - protein, 1147 aa, Artificial Sequence
  SARS-CoV-2/Germany/BavPat3/2020__EPI_ISL_414521 spike protein (1-1147)(P715C_P1069C)
MFVFLVLLPLVSSQCVNLTTRTQLPPAYTNSFTRGVYYPDKVFRSSVLHSTQDLFLPFFSNVTWFHAIHVSGTNGTKRFDNPVLPFNDGVYFASTEKSNIIRGWIFGTTLDSKTQSLLIVNNATNVVIKVCEFQFCNDPFLGVYYHKNNKSWMESEFRVYSSANNCTFEYVSQPFLMDLEGKQGNFKNLREFVFKNIDGYFKIYSKHTPINLVRDLPQGFSALEPLVDLPIGINITRFQTLLALHRSYLTPGDSSSGWTAGAAAYYVGYLQPRTFLLKYNENGTITDAVDCALDPLSETKCTLKSFTVEKGIYQTSNFRVQPTESIVRFPNITNLCPFGEVFNATRFASVYAWNRKRISNCVADYSVLYNSASFSTFKCYGVSPTKLNDLCFTNVYADSFVIRGDEVRQIAPGQTGKIADYNYKLPDDFTGCVIAWNSNNLDSKVGGNYNYLYRLFRKSNLKPFERDISTEIYQAGSTPCNGVEGFNCYFPLQSYGFQPTNGVGYQPYRVVVLSFELLHAPATVCGPKKSTNLVKNKCVNFNFNGLTGTGVLTESNKKFLPFQQFGRDIADTTDAVRDPQTLEILDITPCSFGGVSVITPGTNTSNQVAVLYQDVNCTEVPVAIHADQLTPTWRVYSTGSNVFQTRAGCLIGAEHVNNSYECDIPIGAGICASYQTQTNSPRRARSVASQSIIAYTMSLGAENSVAYSNNSIAICTNFTISVTTEILPVSMTKTSVDCTMYICGDSTECSNLLLQYGSFCTQLNRALTGIAVEQDKNTQQVFAQVKQIYKTPPIKDFGGFNFSQILPDPSKPSKRSFIEDLLFNKVTLADAGFIKQYGDCLGDIAARDLICAQKFNGLTVLPPLLTDEMIAQYTSALLAGTITSGWTFGAGAALQIPFAMQMAYRFNGIGVTQNVLYENQKLIANQFNSAIGKIQDSLSSTASALGKLQDVVNQNAQALNTLVKQLSSNFGAISSVLNDILSRLDKVEAEVQIDRLITGRLQSLQTYVTQQLIRAAEIRASANLAATKMSECVLGQSKRVDFCGKGYHLMSFPQSAPHGVVFLHVTYVCAQEKNFTTAPAICHDGKAHFPREGVFVSNGTHWFVTQRNFYEPQIITTDNTFVSGNCDVVIGIVNNTVYDPLQPELDS

SEQ ID NO: 3116 - protein, 1147 aa, Artificial Sequence
  SARS-CoV-2/France/HF1805/2020__EPI_ISL_414628 spike protein (1-1147)(P715C_P1069C)
MFVFLVLLPLVSSQCVNLTTRTQLPPAYTNSFTRGVYYPDKVFRSSVLHSTQDLFLPFFSNVTWFHAIHVSGTNGTKRFDNPVLPFNDGVYFASTEKSNIIRGWIFGTTLDSKTQSLLIVNNATNVVIKVCEFQFCNDPFLGVYYHKNNKSWMESEFRVYSSANNCTFEYVSQPFLMDLEGKQGNFKNLREFVFKNIDGYFKIYSKHTPINLVRDLPQGFSALEPLVDLPIGINITRFQTLLALHRSYLTPGDSSSGWTAGAAAYYVGYLQPRTFLLKYNENGTITDAVDCALDPLSETKCTLKSFTVEKGIYQTSNFRVQPTESIVRFPNITNLCPFGEVFNATRFASVYAWNRKRISNCVADYSVLYNSASFSTFKCYGVSPTKLNDLCFTNVYADSFVIRGDEVRQIAPGQTGKIADYNYKLPDDFTGCVIAWNSNNLDSKVGGNYNYLYRLFRKSNLKPFERDISTEIYQAGSTPCNGVEGFNCYFPLQSYGFQPTNGVGYQPYRVVVLSFELLHAPATVCGPKKSTNLVKNKCVNFNFNGLTGTGVLTESNKKFLPFQQFGRDIADTTDAVRDPQTLEILDITPCSFGGVSVITPGTNTSNQVAVLYQGVNCTEVPVAIHADQLTPTWRVYSTGSNVFQTRAGCLIGAEHVNNSYECDIPIGAGICASYQTQTNSPRRARSVASQSIIAYTMSLGAENSVAYSNNSIAICTNFTISVTTEILPVSMTKTSVDCTMYICGDSTECSNLLLQYGSFCTQLNRALTGIAVEQDKNTQEVFAQVKQIYKTPPIKDFGGFNFSQILPDPSKPSKRSFIEDLLFNKVTLADAGFIKQYGDCLGDIAARDLICAQKFNGLTVLPPLLTDEMIAQYTSALLAGTITSGWTFGAGAALQIPFAMQMAYRFNGIGVTQNVLYENQKLIANQFNSAIGKIQDSLSSTASALGKLQDVVNQNAQALNTLVKQLSSNFGAISSVLNDILSRLDKVEAEVQIDRLITGRLQSLQTYVTQQLIRAAEIRASANLAATKMSECVLGQSKRVDFCGKGYHLMSFPQSAPHGVVFLHVTYVCAQEKNFTTAPAICHDGKAHFPREGVFVSNGTHWFVTQRNFYEPQIITTDNTFVSGNCDVVIGVVNNTVYDPLQPELDS

SEQ ID NO: 3117 - protein, 1147 aa, Artificial Sequence
  SARS-CoV-2/Netherlands/ZuidHolland_9/2020__EPI_ISL_414445 spike protein (1-1147)(P715C_P1069C)
MFVFLVLLPLVSSQCVNLTTRTQLPPAYTNSFTRGVYYPDKVFRSSVLHSTQDLFLPFFSNVTWFHAIHVSGTNGTKRFDNPVLPFNDGVYFASTEKSNIIRGWIFGTTLDSKTQSLLIVNNATNVVIKVCEFQFCNDPFLGVYYHKNNKSWMESEFRVYSSANNCTFEYVSQPFLMDLEGKQGNFKNLREFVFKNIDGYFKIYSKHTPINLVRDLPQGFSALEPLVDLPIGINITRFQTLLALHRSYLTPGDSSSGWTAGAAAYYVGYLQPRTFLLKYNENGTITDAVDCALDPLSETKCTLKSFTVEKGIYQTSNFRVQPTESIVRFPNITNLCPFGEVFNATRFASVYAWNRKRISNCVADYSVLYNSASFSTFKCYGVSPTKLNDLCFTNVYADSFVIRGDEVRQIAPGQTGKIADYNYKLPDDFTGCVIAWNSNNLDSKVGGNYNYLYRLFRKSNLKPFERDISTEIYQAGSTPCNGVEGFNCYFPLQSYGFQPTNGVGYQPYRVVVLSFELLHAPATVCGPKKSTNLVKNKCVNFNFNGLTGTGVLTESNKKFLPFQQFGRDIADTTDAVRDPQTLEILDITPCSFGGVSVITPGTNTSNQVAVLYQGVNCTEVPVAIHADQLTPTWRVYSTGSNVFQTRAGCLIGAEHVNNSYECDIPIGAGICASYQTQTNSPRRARSVASQSIIAYTMSLGAENSVAYSNNSIAICTNFTISVTTEILPVSMTKTSVDCTMYICGDSTECSNLLLQYGSFCTQLNRALTGIAVEQDKNTQEVFAQVKQIYKTPPIKDFGGFNFSQILPDPSKPSKRSFIEDLLFNKVTLADAGFIKQYGDCLGDIAARDLICVQKFNGLTVLPPLLTDEMIAQYTSALLAGTITSGWTFGAGAALQIPFAMQMAYRFNGIGVTQNVLYENQKLIANQFNSAIGKIQDSLSSTASALGKLQDVVNQNAQALNTLVKQLSSNFGAISSVLNDILSRLDKVEAEVQIDRLITGRLQSLQTYVTQQLIRAAEIRASANLAATKMSECVLGQSKRVDFCGKGYHLMSFPQSAPHGVVFLHVTYVCAQEKNFTTAPAICHDGKAHFPREGVFVSNGTHWFVTQRNFYEPQIITTDNTFVSGNCDVVIGIVNNTVYDPLQPELDS

SEQ ID NO: 3118 - protein, 1147 aa, Artificial Sequence
  SARS-CoV-2/Finland/FIN03032020A/2020__EPI_ISL_413602 spike protein (1-1147)(P715C_P1069C)
MFVFLVLLPLVSSQCVNLTTRTQLPPAYTNSFTRGVYYPDKVFRSSVLHSTQDLFLPFFSNVTWFHAIHVSGTNGTKRFDNPVLPFNDGVYFASTEKSNIIRGWIFGTTLDSKTQSLLIVNNATNVVIKVCEFQFCNDPFLGVYYHKNNKSWMESEFRVYSSANNCTFEYVSQPFLMDLEGKQGNFKNLREFVFKNIDGYFKIYSKHTPINLVRDLPQGFSALEPLVDLPIGINITRFQTLLALHRSYLTPGDSSSGWTAGAAAYYVGYLQPRTFLLKYNENGTITDAVDCALDPLSETKCTLKSFTVEKGIYQTSNFRVQPTESIVRFPNITNLCPFGEVFNATRFASVYAWNRKRISNCVADYSVLYNSASFSTFKCYGVSPTKLNDLCFTNVYADSFVIRGDEVRQIAPGQTGKIADYNYKLPDDFTGCVISWNSNNLDSKVGGNYNYLYRLFRKSNLKPFERDISTEIYQAGSTPCNGVEGFNCYFPLQSYGFQPTNGVGYQPYRVVVLSFELLHAPATVCGPKKSTNLVKNKCVNFNFNGLTGTGVLTESNKKFLPFQQFGRDIADTTDAVRDPQTLEILDITPCSFGGVSVITPGTNTSNQVAVLYQGVNCTEVPVAIHADQLTPTWRVYSTGSNVFQTRAGCLIGAEHVNNSYECDIPIGAGICASYQTQTNSPRRARSVASQSIIAYTMSLGAENSVAYSNNSIAICTNFTISVTTEILPVSMTKTSVDCTMYICGDSTECSNLLLQYGSFCTQLNRALTGIAVEQDKNTQEVFAQVKQIYKTPPIKDFGGFNFSQILPDPSKPSKRSFIEDLLFNKVTLADAGFIKQYGDCLGDIAARDLICAQKFNGLTVLPPLLTDEMIAQYTSALLAGTITSGWTFGAGAALQIPFAMQMAYRFNGIGVTQNVLYENQKLIANQFNSAIGKIQDSLSSTASALGKLQDVVNQNAQALNTLVKQLSSNFGAISSVLNDILSRLDKVEAEVQIDRLITGRLQSLQTYVTQQLIRAAEIRASANLAATKMSECVLGQSKRVDFCGKGYHLMSFPQSAPHGVVFLHVTYVCAQEKNFTTAPAICHDGKAHFPREGVFVSNGTHWFVTQRNFYEPQIITTDNTFVSGNCDVVIGIVNNTVYDPLQPELDS

SEQ ID NO: 3119 - protein, 1147 aa, Artificial Sequence
  SARS-CoV-2/France/GE1977/2020__EPI_ISL_414632 spike protein (1-1147)(P715C_P1069C)
MFVFLVLLPLVSSQCVNLTTRTQLPPAYTNSFTRGVYYPDKVFRSSVLHSTQDLFLPFFSNVTWFHAIHVSGTNGTKRFDNPVLPFNDGVYFASTEKSNIIRGWIFGTTLDSKTQSLLIVNNATNVVIKVCEFQFCNDPFLGVYYHKNNKSWMESEFRVYSSANNCTFEYVSQPFLMDLEGKQGNFKNLREFVFKNIDGYFKIYSKHTPINLVRDLPQGFSALEPLVDLPIGINITRFQTLLALHRSYLTPGDSSSGWTAGAAAYYVGYLQPRTFLLKYNENGTITDAVDCALDPLSETKCTLKSFTVEKGIYQTSNFRVQPTESIVRFPNITNLCPFGEVFNATRFASVYAWNRKRISNCVADYSVLYNSASFSTFKCYGVSPTKLNDLCFTNVYADSFVIRGDEVRQIAPGQTGKIADYNYKLPDDFTGCVIAWNSNNLDSKVGGNYNYLYRLFRKSNLKPFERDISTEIYQAGSTPCNGVEGFNCYFPLQSYGFQPTNGVGYQPYRVVVLSFELLHAPATVCGPKKSTNLVKNKCVNFNFNGLTGTGVLTESNKKFLPFQQFGRDIADTTDAVRDPQTLEILDITPCSFGGVSVITPGTNTSNQVAVLYQGVNCTEVPVAIHADQLTPTWRVYSTGSNVFQTRAGCLIGAEHVNNSYECDIPIGAGICASYQTQTNSPRRARSVASQSIIAYTMSLGAENSVAYSNNSIAICTNFTISVTTEILPVSMTKTSVDCTMYICGDSTECSNLLLQYGSFCTQLNRALTGIAVEQDKNTQEVFAQVKQIYKTPPIKDFGGFNFSQILPDPSKPSKRSFIEDLLFNKVTLADAGFIKQYGDCLGDIAARDLICAQKFNGLTVLPPLLTDEMIAQYTSALLAGTITSGWTFGAGAALQIPFAMQMAYRFNGIGVTQNVLYENQKLIANQFNSAIGKIQDSLFSTASALGKLQDVVNQNAQALNTLVKQLSSNFGAISSVLNDILSRLDKVEAEVQIDRLITGRLQSLQTYVTQQLIRAAEIRASANLAATKMSECVLGQSKRVDFCGKGYHLMSFPQSAPHGVVFLHVTYVCAQEKNFTTAPAICHDGKAHFPREGVFVSNGTHWFVTQRNFYEPQIITTDNTFVSGNCDVVIGIVNNTVYDPLQPELDS

SEQ ID NO: 3120 - protein, 1147 aa, Artificial Sequence
  SARS-CoV-2/Finland/FIN-313/2020__EPI_ISL_414641 spike protein (1-1147)(P715C_P1069C)
MFVFLVLLPLVSSQCVNLTTRTQLPPAYTNSFTRGVYYPDKVFRSSVLHSTQDLFLPFFSNVTWFHAIHVSGTNGTKRFDNPVLPFNDGVYFASTEKSNIIRGWIFGTTLDSKTQSLLIVNNATNVVIKVCEFQFCNDPFLGVYYHKNNKSWMESEFRVYSSANNCTFEYVSQPFLMDLEGKQGNFKNLREFVFKNIDGYFKIYSKHTPINLVRDLPQGFSALEPLVDLPIGINITRFKTLLALHRSYLTPGDSSSGWTAGAAAYYVGYLQPRTFLLKYNENGTITDAVDCALDPLSETKCTLKSFTVEKGIYQTSNFRVQPTESIVRFPNITNLCPFGEVFNATRFASVYAWNRKRISNCVADYSVLYNSASFSTFKCYGVSPTKLNDLCFTNVYADSFVIRGDEVRQIAPGQTGKIADYNYKLPDDFTGCVIAWNSNNLDSKVGGNYNYLYRLFRKSNLKPFERDISTEIYQAGSTPCNGVEGFNCYFPLQSYGFQPTNGVGYQPYRVVVLSFELLHAPATVCGPKKSTNLVKNKCVNFNFNGLTGTGVLTESNKKFLPFQQFGRDIADTTDAVRDPQTLEILDITPCSFGGVSVITPGTNTSNQVAVLYQGVNCTEVPVAIHADQLTPTWRVYSTGSNVFQTRAGCLIGAEHVNNSYECDIPIGAGICASYQTQTNSPRRARSVASQSIIAYTMSLGAENSVAYSNNSIAICTNFTISVTTEILPVSMTKTSVDCTMYICGDSTECSNLLLQYGSFCTQLNRALTGIAVEQDKNTQEVFAQVKQIYKTPPIKDFGGFNFSQILPDPSKPSKRSFIEDLLFNKVTLADAGFIKQYGDCLGDIAARDLICAQKFNGLTVLPPLLTDEMIAQYTSALLAGTITSGWTFGAGAALQIPFAMQMAYRFNGIGVTQNVLYENQKLIANQFNSAIGKIQDSLSSTASALGKLQDVVNQNAQALNTLVKQLSSNFGAISSVLNDILSRLDKVEAEVQIDRLITGRLQSLQTYVTQQLIRAAEIRASANLAATKMSECVLGQSKRVDFCGKGYHLMSFPQSAPHGVVFLHVTYVCAQEKNFTTAPAICHDGKAHFPREGVFVSNGTHWFVTQRNFYEPQIITTDNTFVSGNCDVVIGIVNNTVYDPLQPELDS

SEQ ID NO: 3121 - protein, 1147 aa, Artificial Sequence
  SARS-CoV-2/Netherlands/ZuidHolland_2/2020__EPI_ISL_414556 spike protein (1-1147)(P715C_P1069C)
MFVFLVLLPLVSSQCVNLTTRTQLPPAYTNSFTRGVYYPDKVFRSSVLHSTQDLFLPFFSNVTWFHAIHVSGTNGTKRFDNPVLPFNDGVYFASTEKSNIIRGWIFGTTLDSKTQSLLIVNNATNVVIKVCEFQFCNDPFLGVYYHKNNKSWMESEFRVYSSANNCTFEYVSQPFLMDLEGKQGNFKNLREFVFKNIDGYFKIYSKHTPINLVRDLPQGFSALEPLVDLPIGINITRFQTLLALHRSYLTPGDSSSGWTAGAAAYYVGYLQPRTFLLKYNENGTITDAVDCALDPLSETKCTLKSFTVEKGIYQTSNFRVQPTESIVRFPNITNLCPFGEVFNATRFASVYAWNRKRISNCVADYSVLYNSASFSTFKCYGVSPTKLNDLCFTNVYADSFVIRGDEVRQIAPGQTGKIADYNYKLPDDFTGCVIAWNSNNLDSKVGGNYNYLYRLFRKSNLKPFERDISTEIYQAGSTPCNGVEGFNCYFPLQSYGFQPTNGVGYQPYRVVVLSFELLHAPATVCGPKKSTNLVKNKCVNFNFNGLTGTGVLTESNKKFLPFQQFGRDIADTTDAVRDPQTLEILDITPCSFGGVSVITPGTNTSNQVAVLYQGVNCTEVPVAIHADQLTPTWRVYSTGSNVFQTRAGCLIGAEHVNNSYECDIPIGAGICASYQTQTNSPRRARSVASQSIIAYTMSLGAENSVAYSNNSIAICTNFTISVTTEILPVSMTKTSVDCTMYICGDSTECSNLLLQYGSFCTQLNRALTGIALEQDKNTQEVFAQVKQIYKTPPIKDFGGFNFSQILPDPSKPSKRSFIEDLLFNKVTLADAGFIKQYGDCLGDIAARDLICAQKFNGLTVLPPLLTDEMIAQYTSALLAGTITSGWTFGAGAALQIPFAMQMAYRFNGIGVTQNVLYENQKLIANQFNSAIGKIQDSLSSTASALGKLQDVVNQNAQALNTLVKQLSSNFGAISSVLNDILSRLDKVEAEVQIDRLITGRLQSLQTYVTQQLIRAAEIRASANLAATKMSECVLGQSKRVDFCGKGYHLMSFPQSAPHGVVFLHVTYVCAQEKNFTTAPAICHDGKAHFPREGVFVSNGTHWFVTQRNFYEPQIITTDNTFVSGNCDVVIGIVNNTVYDPLQPELDS

SEQ ID NO: 3122 - protein, 1147 aa, Artificial Sequence
  SARS-CoV-2/USA/WA-UW31/2020__EPI_ISL_414618 spike protein (1-1147)(P715C_P1069C)
MFVFLVLLPLVSSQCVNLTTRTQLPPAYTNSFTRGVYYPDKVFRSSVLHSTQDLFLPFFSNVTWFHAIHVSGTNGTKRFDNPVLPFNDGVYFASTEKSNIIRGWIFGTTLDSKTQSLLIVNNATNVVIKVCEFQFCNDPFLGVYYHKNNKSWMESEFRVYSSANNCTFEYVSQPFLMDLEGKQGNFKNLREFVFKNIDGYFKIYSKHTPINLVRDLPQGFSALEPLVDLPIGINITRFQTLLALHRSYLTPGDSSSGWTAGAAAYYVGYLQPRTFLLKYNENGTITDAVDCALDPLSETKCTLKSFTVEKGIYQTSNFRVQPTESIVRFPNITNLCPFGEVFNATRFASVYAWNRKRISNCVADYSVLYNSASFSTFKCYGVSPTKLNDLCFTNVYADSFVIRGDEVRQIAPGQTGKIADYNYKLPDDFTGCVIAWNSNNLDSKVGGNYNYLYRLFRKSNLKPFERDISTEIYQAGSTPCNGAEGFNCYFPLQSYGFQPTNGVGYQPYRVVVLSFELLHAPATVCGPKKSTNLVKNKCVNFNFNGLTGTGVLTESNKKFLPFQQFGRDIADTTDAVRDPQTLEILDITPCSFGGVSVITPGTNTSNQVAVLYQDVNCTEVPVAIHADQLTPTWRVYSTGSNVFQTRAGCLIGAEHVNNSYECDIPIGAGICASYQTQTNSPRRARSVASQSIIAYTMSLGAENSVAYSNNSIAICTNFTISVTTEILPVSMTKTSVDCTMYICGDSTECSNLLLQYGSFCTQLNRALTGIAVEQDKNTQEVFAQVKQIYKTPPIKDFGGFNFSQILPDPSKPSKRSFIEDLLFNKVTLADAGFIKQYGDCLGDIAARDLICAQKFNGLTVLPPLLTDEMIAQYTSALLAGTITSGWTFGAGAALQIPFAMQMAYRFNGIGVTQNVLYENQKLIANQFNSAIGKIQDSLSSTASALGKLQDVVNQNAQALNTLVKQLSSNFGAISSVLNDILSRLDKVEAEVQIDRLITGRLQSLQTYVTQQLIRAAEIRASANLAATKMSECVLGQSKRVDFCGKGYHLMSFPQSAPHGVVFLHVTYVCAQEKNFTTAPAICHDGKAHFPREGVFVSNGTHWFVTQRNFYEPQIITTDNTFVSGNCDVVIGIVNNTVYDPLQPELDS

SEQ ID NO: 3123 - protein, 1147 aa, Artificial Sequence
  SARS-CoV-2/South Korea/SNU01/2020__EPI_ISL_411929 spike protein (1-1147)(P715C_P1069C)
MFVFLVLLPLVSSQCVNLTTRTQLPPAYTNSFTRGVYYPDKVFRSSVLHSTQDLFLPFFSNVTWFHAIHVSGTNGTKRFDNPVLPFNDGVYFASTEKSNIIRGWIFGTTLDSKTQSLLIVNNATNVVIKVCEFQFCNDPFLGVYYHKNNKSWMESEFRVYSSANNCTFEYVSQPFLMDLEGKQGNFKNLREFVFKNIDGYFKIYSKHTPINLVRDLPQGFWALEPLVDLPIGINITRFQTLLALHRSYLTPGDSSSGWTAGAAAYYVGYLQPRTFLLKYNENGTITDAVDCALDPLSETKCTLKSFTVEKGIYQTSNFRVQPTESIVRFPNITNLCPFGEVFNATRFASVYAWNRKRISNCVADYSVLYNSASFSTFKCYGVSPTKLNDLCFTNVYADSFVIRGDEVRQIAPGQTGKIADYNYKLPDDFTGCVIAWNSNNLDSKVGGNYNYLYRLFRKSNLKPFERDISTEIYQAGSTPCNGVEGFNCYFPLQSYGFQPTNGVGYQPYRVVVLSFELLHAPATVCGPKKSTNLVKNKCVNFNFNGLTGTGVLTESNKKFLPFQQFGRDIADTTDAVRDPQTLEILDITPCSFGGVSVITPGTNTSNQVAVLYQDVNCTEVPVAIHADQLTPTWRVYSTGSNVFQTRAGCLIGAEHVNNSYECDIPIGAGICASYQTQTNSPRRARSVASQSIIAYTMSLGAENSVAYSNNSIAICTNFTISVTTEILPVSMTKTSVDCTMYICGDSTECSNLLLQYGSFCTQLNRALTGIAVEQDKNTQEVFAQVKQIYKTPPIKDFGGFNFSQILPDPSKPSKRSFIEDLLFNKVTLADAGFIKQYGDCLGDIAARDLICAQKFNGLTVLPPLLTDEMIAQYTSALLAGTITSGWTFGAGAALQIPFAMQMAYRFNGIGVTQNVLYENQKLIANQFNSAIGKIQDSLSSTASALGKLQDVVNQNAQALNTLVKQLSSNFGAISSVLNDILSRLDKVEAEVQIDRLITGRLQSLQTYVTQQLIRAAEIRASANLAATKMSECVLGQSKRVDFCGKGYHLMSFPQSAPHGVVFLHVTYVCAQEKNFTTAPAICHDGKAHFPREGVFVSNGTHWFVTQRNFYEPQIITTDNTFVSGNCDVVIGIVNNTVYDPLQPELDS

SEQ ID NO: 3124 - protein, 1147 aa, Artificial Sequence
  SARS-CoV-2/China/WF0004/2020__EPI_ISL_413694 spike protein (1-1147)(P715C_P1069C)
MFVFLVLLPLVSSQCVNLTTRTQLPPAYTNSFTRGVYYPDKVFRSSVLHSTQDLFLPFFSNVTWFHAIHVSGTNGTKRFDNPVLPFNDGVYFASTEKSNIIRGWIFGTTLDSKTQSLLIVNNATNVVIKVCEFQFCNDPFLGVYYHKNNKSWTESEFRVYSSANNCTFEYVSQPFLMDLEGKQGNFKNLREFVFKNIDGYFKIYSKHTPINLVRDLPQGFSALEPLVDLPIGINITRFQTLLALHRSYLTPGDSSSGWTAGAAAYYVGYLQPRTFLLKYNENGTITDAVDCALDPLSETKCTLKSFTVEKGIYQTSNFRVQPTESIVRFPNITNLCPFGEVFNATRFASVYAWNRKRISNCVADYSVLYNSASFSTFKCYGVSPTKLNDLCFTNVYADSFVIRGDEVRQIAPGQTGKIADYNYKLPDDFTGCVIAWNSNNLDSKVGGNYNYLYRLFRKSNLKPFERDISTEIYQAGSTPCNGVEGFNCYFPLQSYGFQPTNGVGYQPYRVVVLSFELLHAPATVCGPKKSTNLVKNKCVNFNFNGLTGTGVLTESNKKFLPFQQFGRDIADTTDAVRDPQTLEILDITPCSFGGVSVITPGTNTSNQVAVLYQDVNCTEVPVAIHADQLTPTWRVYSTGSNVFQTRAGCLIGAEHVNNSYECDIPIGAGICASYQTQTNSPRRARSVASQSIIAYTMSLGAENSVAYSNNSIAICTNFTISVTTEILPVSMTKTSVDCTMYICGDSTECSNLLLQYGSFCTQLNRALTGIAVEQDKNTQEVFAQVKQIYKTPPIKDFGGFNFSQILPDPSKPSKRSFIEDLLFNKVTLADAGFIKQYGDCLGDIAARDLICAQKFNGLTVLPPLLTDEMIAQYTSALLAGTITSGWTFGAGAALQIPFAMQMAYRFNGIGVTQNVLYENQKLIANQFNSAIGKIQDSLSSTASALGKLQDVVNQNAQALNTLVKQLSSNFGAISSVLNDILSRLDKVEAEVQIDRLITGRLQSLQTYVTQQLIRAAEIRASANLAATKMSECVLGQSKRFDFCGKGYHLMSFPQSAPHGVVFLHVTYVCAQEKNFTTAPAICHDGKAHFPREGVFVSNGTHWFVTQRNFYEPQIITTDNTFVSGNCDVVIGIVNNTVYDPLQPELDS

SEQ ID NO: 3125 - protein, 1147 aa, Artificial Sequence
  SARS-CoV-2/China/WF0028/2020__EPI_ISL_413791 spike protein (1-1147)(P715C_P1069C)
MFVFLVLLPLVSSQCVNLTTRTQLPPAYTNSFTRGVYYPDKVFRSSVLHSTQDLFLPFFSNVTWFHAIHVSGTNGTKRFDNPVLPFNDGVYFASTEKSNIIRGWIFGTTLDSKTQSLLIVNNATNVVIKVCEFQFCNDPFLGVYYHKNNKSWMESEFRVYSSANNCTFEYVSQPFLMDLEGKQGNFKNLREFVFKNIDGYFKIYSKHTPINLVRDLPQGFSALEPLVDLPIGINITRFQTLLALHRSYLTPGDSSSGWTAGAAAYYVGYLQPRTFLLKYNENGTITDAVDCALDPLSETKCTLKSFTVEKGIYQTSNFRVQPTESIVRFPNITNLCPFGEVFNATRFASVYAWNRKRISNCVADYSVLYNSASFSTFKCYGVSPTKLNDLCFTNVYADSFVIRGDEVRQIAPGQTGKIADYNYKLPDDFTGCVIAWNSNNLDSKVGGNYNYLYRLFRKSNLKPFERDISTEIYQAGSTPCNGVEGFNCYFPLQSYGFQPTNGVGYQPYRVVVLSFELLHAPATVCGPKKSTNLVKNKCVNFNFNGLTGTGVLTESNKKFLPFQQFGRDIADTTDAVRDPQTLEILDITPCSFGGVSVITPGTNTSNQVAVLYQDVNCTEVPVAIHADQLTPTWRVYSTGSNVFQTRAGCLIGAEHVNNSYECDIPIGAGICASYQTQTNSPRRARSVASQSIIAYTMSLGAENSVAYSNNSIAICTNFTISVTTEILPVSMTKTSVDCTMYICGDSTECSNLLLQYGSFCTQLNRALTGIAVEQDKNTQEVFAQVKQIYKTPPIKDFGGFNFSQILPDPSKPSKRSFIEDLLFNKVTLADAGFIKQYGDCLGDIAARDLICAQKFNGLTVLPPLLTDEMIAQYTSALLAGTITSGWTFGAGAALQIPFAMQMAYRFNGIGVTQNVLYENQKLIANQFNSAIGKIQDSLSSTASALGKLQDVVNQNAQALNTLVKQLSSNFGAISSVLNDILSRLDKVEAEVQIDRLITGRLQSLQTYVTQQLIRAAEIRASANLAATKMSECVLGQSKRVDFCGKGYHLMSFPQSAPHGVVFLHVTYVCAQEKNFTTAPAICHDGKAHFPREGVFVSNGTHWFVTQRNFYEPQIITTDNTFVSGNCDVVIGIVNNTVYDPLQPELES

SEQ ID NO: 3126 - protein, 1147 aa, Artificial Sequence
  SARS-CoV-2/2019-nCoV/USA-CruiseA-18/2020__MT159716.1 spike protein (1-1147)(P715C_P1069C)
MFVFLVLLPLVSSQCVNLTTRTQLPPAYTNSFTRGVYYPDKVFRSSVLHSTQDLFLPFFSNVTWFHAIHVSGTNGTKRFDNPVLPFNDGVYFASTEKSNIIRGWIFGTTLDSKTQSLLIVNNATNVVIKVCEFQFCNDPFLGVYYHKNNKSWMESELRVYSSANNCTFEYVSQPFLMDLEGKQGNFKNLREFVFKNIDGYFKIYSKHTPINLVRDLPQGFSALEPLVDLPIGINITRFQTLLALHRSYLTPGDSSSGWTAGAAAYYVGYLQPRTFLLKYNENGTITDAVDCALDPLSETKCTLKSFTVEKGIYQTSNFRVQPTESIVRFPNITNLCPFGEVFNATRFASVYAWNRKRISNCVADYSVLYNSASFSTFKCYGVSPTKLNDLCFTNVYADSFVIRGDEVRQIAPGQTGKIADYNYKLPDDFTGCVIAWNSNNLDSKVGGNYNYLYRLFRKSNLKPFERDISTEIYQAGSTPCNGVEGFNCYFPLQSYGFQPTNGVGYQPYRVVVLSFELLHAPATVCGPKKSTNLVKNKCVNFNFNGLTGTGVLTESNKKFLPFQQFGRDIADTTDAVRDPQTLEILDITPCSFGGVSVITPGTNTSNQVAVLYQDVNCTEVPVAIHADQLTPTWRVYSTGSNVFQTRAGCLIGAEHVNNSYECDIPIGAGICASYQTQTNSPRRARSVASQSIIAYTMSLGAENSVAYSNNSIAICTNFTISVTTEILPVSMTKTSVDCTMYICGDSTECSNLLLQYGSFCTQLNRALTGIAVEQDKNTQEVFAQVKQIYKTPPIKDFGGFNFSQILPDPSKPSKRSFIEDLLFNKVTLADAGFIKQYGDCLGDIAARDLICAQKFNGLTVLPPLLTDEMIAQYTSALLAGTITSGWTFGAGAALQIPFAMQMAYRFNGIGVTQNVLYENQKLIANQFNSAIGKIQDSLSSTASALGKLQDVVNQNAQALNTLVKQLSSNFGAISSVLNDILSRLDKVEAEVQIDRLITGRLQSLQTYVTQQLIRAAEIRASANLAATKMSECVLGQSKRVDFCGKGYHLMSFPQSAPHGVVFLHVTYVCAQEKNFTTAPAICHDGKAHFPREGVFVSNGTHWFVTQRNFYEPQIITTDNTFVSGNCDVVIGIVNNTVYDPLQPELDS

SEQ ID NO: 3127 - protein, 1147 aa, Artificial Sequence
  SARS-CoV-2/SARS-CoV-2/Yunnan-01/human/2020/CHN__MT049951.1 spike protein (1-1147)(P715C_P1069C)
MFVFLVLLPLVSSQCVNLTTRTQLPPANTNSFTRGVYYPDKVFRSSVLHSTQDLFLPFFSNVTWFHAIHVSGTNGTKRFDNPVLPFNDGVYFASTEKSNIIRGWIFGTTLDSKTQSLLIVNNATNVVIKVCEFQFCNDPFLGVYYHKNNKSWMESEFRVYSSANNCTFEYVSQPFLMDLEGKQGNFKNLREFVFKNIDGYFKIYSKHTPINLVRDLPQGFSALEPLVDLPIGINITRFQTLLALHRSYLTPGDSSSGWTAGAAAYYVGYLQPRTFLLKYNENGTITDAVDCALDPLSETKCTLKSFTVEKGIYQTSNFRVQPTESIVRFPNITNLCPFGEVFNATRFASVYAWNRKRISNCVADYSVLYNSASFSTFKCYGVSPTKLNDLCFTNVYADSFVIRGDEVRQIAPGQTGKIADYNYKLPDDFTGCVIAWNSNNLDSKVGGNYNYLYRLFRKSNLKPFERDISTEIYQAGSTPCNGVEGFNCYFPLQSYGFQPTNGVGYQPYRVVVLSFELLHAPATVCGPKKSTNLVKNKCVNFNFNGLTGTGVLTESNKKFLPFQQFGRDIADTTDAVRDPQTLEILDITPCSFGGVSVITPGTNTSNQVAVLYQDVNCTEVPVAIHADQLTPTWRVYSTGSNVFQTRAGCLIGAEHVNNSYECDIPIGAGICASYQTQTNSPRRARSVASQSIIAYTMSLGAENSVAYSNNSIAICTNFTISVTTEILPVSMTKTSVDCTMYICGDSTECSNLLLQYGSFCTQLNRALTGIAVEQDKNTQEVFAQVKQIYKTPPIKDFGGFNFSQILPDPSKPSKRSFIEDLLFNKVTLADAGFIKQYGDCLGDIAARDLICAQKFNGLTVLPPLLTDEMIAQYTSALLAGTITSGWTFGAGAALQIPFAMQMAYRFNGIGVTQNVLYENQKLIANQFNSAIGKIQDSLSSTASALGKLQDVVNQNAQALNTLVKQLSSNFGAISSVLNDILSRLDKVEAEVQIDRLITGRLQSLQTYVTQQLIRAAEIRASANLAATKMSECVLGQSKRVDFCGKGYHLMSFPQSAPHGVVFLHVTYVCAQEKNFTTAPAICHDGKAHFPREGVFVSNGTHWFVTQRNFYEPQIITTDNTFVSGNCDVVIGIVNNTVYDPLQPELDS

SEQ ID NO: 3128 - protein, 1147 aa, Artificial Sequence
  SARS-CoV-2/USA/WA-UW292/2020__EPI_ISL_418077 spike protein (1-1147)(P715C_P1069C)
MFVFLVLLPLVSSQCVNLTTRTQLPPAYTNSFTRGVYYPDKVFRSSVLHSTQDLFLPFFSNVTWFHAIHVSGTNGTKRFDNPVLPFNDGVYFASTEKSNIIRGWIFGTTLDSKTQSLLIVNNATNVVIKVCEFQFCNDPFLGVYYHKNNKSWMESEFRVYSSANNCTFEYVSQPFLMDLEGKQGNFKNLREFVFKNIDGYFKIYSKHTPINLVRDLPQGFSALEPLVDLPIGINITRFQTLLALHRSYLTPGDSSSGWTAGAAAYYVGYLQPRTFLLKYNENGTITDAVDCALDPLSETKCTLKSFTVEKGIYQTSNFRVQPTESIVRFPNITNLCPFGEVFNATRFASVYAWNRKRISNCVADYSVLYNSASFSTFKCYGVSPTKLNDLCFTNVYADSFVIRGDEVRQIAPGQTGKIADYNYKLPDDFTGCVIAWNSNNLDSKVGGNYNYLYRLFRKSNLKPFERDISTEIYQASSTPCNGVEGFNCYFPLQSYGFQPTNGVGYQPYRVVVLSFELLHAPATVCGPKKSTNLVKNKCVNFNFNGLTGTGVLTESNKKFLPFQQFGRDIADTTDAVRDPQTLEILDITPCSFGGVSVITPGTNTSNQVAVLYQDVNCTEVPVAIHADQLTPTWRVYSTGSNVFQTRAGCLIGAEHVNNSYECDIPIGAGICASYQTQTNSPRRARSVASQSIIAYTMSLGAENSVAYSNNSIAICTNFTISVTTEILPVSMTKTSVDCTMYICGDSTECSNLLLQYGSFCTQLNRALTGIAVEQDKNTQEVFAQVKQIYKTPPIKDFGGFNFSQILPDPSKPSKRSFIEDLLFNKVTLADAGFIKQYGDCLGDIAARDLICAQKFNGLTVLPPLLTDEMIAQYTSALLAGTITSGWTFGAGAALQIPFAMQMAYRFNGIGVTQNVLYENQKLIANQFNSAIGKIQDSLSSTASALGKLQDVVNQNAQALNTLVKQLSSNFGAISSVLNDILSRLDKVEAEVQIDRLITGRLQSLQTYVTQQLIRAAEIRASANLAATKMSECVLGQSKRVDFCGKGYHLMSFPQSAPHGVVFLHVTYVCAQEKNFTTAPAICHDGKAHFPREGVFVSNGTHWFVTQRNFYEPQIITTDNTFVSGNCDVVIGIVNNTVYDPLQPELDS

SEQ ID NO: 3129 - protein, 1147 aa, Artificial Sequence
  SARS-CoV-2/Iceland/192/2020__EPI_ISL_417819 spike protein (1-1147)(P715C_P1069C)
MFVFFVLLPLVSSQCVNLTTRTQLPPAYTNSFTRGVYYPDKVFRSSVLHSTQDLFLPFFSNVTWFHAIHVSGTNGTKRFDNPVLPFNDGVYFASTEKSNIIRGWIFGTTLDSKTQSLLIVNNATNVVIKVCEFQFCNDPFLGVYYHKNNKSWMESEFRVYSSANNCTFEYVSQPFLMDLEGKQGNFKNLREFVFKNIDGYFKIYSKHTPINLVRDLPQGFSALEPLVDLPIGINITRFQTLLALHRSYLTPGDSSSGWTAGAAAYYVGYLQPRTFLLKYNENGTITDAVDCALDPLSETKCTLKSFTVEKGIYQTSNFRVQPTESIVRFPNITNLCPFGEVFNATRFASVYAWNRKRISNCVADYSVLYNSASFSTFKCYGVSPTKLNDLCFTNVYADSFVIRGDEVRQIAPGQTGKIADYNYKLPDDFTGCVIAWNSNNLDSKVGGNYNYLYRLFRKSNLKPFERDISTEIYQAGSTPCNGVEGFNCYFPLQSYGFQPTNGVGYQPYRVVVLSFELLHAPATVCGPKKSTNLVKNKCVNFNFNGLTGTGVLTESNKKFLPFQQFGRDIADTTDAVRDPQTLEILDITPCSFGGVSVITPGTNTSNQVAVLYQGVNCTEVPVAIHADQLTPTWRVYSTGSNVFQTRAGCLIGAEHVNNSYECDIPIGAGICASYQTQTNSPRRARSVASQSIIAYTMSLGAENSVAYSNNSIAICTNFTISVTTEILPVSMTKTSVDCTMYICGDSTECSNLLLQYGSFCTQLNRALTGIAVEQDKNTQEVFAQVKQIYKTPPIKDFGGFNFSQILPDPSKPSKRSFIEDLLFNKVTLADAGFIKQYGDCLGDIAARDLICAQKFNGLTVLPPLLTDEMIAQYTSALLAGTITSGWTFGAGAALQIPFAMQMAYRFNGIGVTQNVLYENQKLIANQFNSAIGKIQDSLSSTASALGKLQDVVNQNAQALNTLVKQLSSNFGAISSVLNDILSRLDKVEAEVQIDRLITGRLQSLQTYVTQQLIRAAEIRASANLAATKMSECVLGQSKRVDFCGKGYHLMSFPQSAPHGVVFLHVTYVCAQEKNFTTAPAICHDGKAHFPREGVFVSNGTHWFVTQRNFYEPQIITTDNTFVSGNCDVVIGIVNNTVYDPLQPELDS

SEQ ID NO: 3130 - protein, 1147 aa, Artificial Sequence
  SARS-CoV-2/Belgium/ULG-6939/2020__EPI_ISL_417020 spike protein (1-1147)(P715C_P1069C)
MFVFLVLLPLVSSQCVNLTTRTQLPPAYTNSFTRGVYYPDKVFRSSVLHSTQDLFLPFFSNVTWFHAIHVSGTNGTKRFDNPVLPFNDGVYFASTEKSNIIRGWIFGTTLDSKTQSLLIVNNATNVVIKVCEFQFCNDPFLGVYYHKNNKSWMESEFRVYSSANNCTFEYVSQPFLMDLEGKQGNFKNLREFVFKNIDGYFKIYSKHTPINLVRDLPQGFSALEPLVDLPIGINITRFQTLLALHRSYLTPGDSSSGWTAGAAAYYVGYLQPRTFLLKYNENGTITDAVDCALDPLSETKCTLKSFTVEKGIYQTSNFRVQPTESIVRFPNITNLCPFGEVFNATRFASVYAWNRKRISNCVADYSVLYNSASFSTFKCYGVSPTKLNDLCFTNVYADSFVIRGDEVRQIAPGQTGKIADYNYKLPDDFTGCVIAWNSNNLDSKVGGNYNYLYRLFRKSNLKPFERDISTEIYQAGSTPCNGVEGFNCYFPLQSYGFQPTNGVGYQPYRVVVLSFELLHAPATVCGPKKSTNLVKNKCVNFNFNGLTGTGVLTESNKKFLPFQQFGRDIADTTDAVRDPQTLEILDITPCSFGGVSVITPGTNTSNQVAVLYQGVNCTEVPVAIHADQLTPTWRVYSTGSNVFQTRAGCLIGAEHVNNSYECDIPIGAGICASYQTQTNSPRRARSVASQSIIAYTMSLGAENSVVYSNNSIAICTNFTISVTTEILPVSMTKTSVDCTMYICGDSTECSNLLLQYGSFCTQLNRALTGIAVEQDKNTQEVFAQVKQIYKTPPIKDFGGFNFSQILPDPSKPSKRSFIEDLLFNKVTLADAGFIKQYGDCLGDIAARDLICAQKFNGLTVLPPLLTDEMIAQYTSALLAGTITSGWTFGAGAALQIPFAMQMAYRFNGIGVTQNVLYENQKLIANQFNSAIGKIQDSLSSTASALGKLQDVVNQNAQALNTLVKQLSSNFGAISSVLNDILSRLDKVEAEVQIDRLITGRLQSLQTYVTQQLIRAAEIRASANLAATKMSECVLGQSKRVDFCGKGYHLMSFPQSAPHGVVFLHVTYVCAQEKNFTTAPAICHDGKAHFPREGVFVSNGTHWFVTQRNFYEPQIITTDNTFVSGNCDVVIGIVNNTVYDPLQPELDS

SEQ ID NO: 3131 - protein, 1147 aa, Artificial Sequence
  SARS-CoV-2/France/HF2496/2020__EPI_ISL_418231 spike protein (1-1147)(P715C_P1069C)
MFVFLVLLPLVSSQCVNLTTRTQLPPAYTNSFTRGVYYPDKVFRSSVLHSTQDLFLPFFSNVTWFHAIHVSGTNGTKRFDNPVLPFNDGVYFASTEKSNIIRGWIFGTTLDSKTQSLLIVNNATNVVIKVCEFQFCNDPFLGVYYHKNNKSWMESEFRVYSSANNCTFEYVSQPFLMDLEGKQGNFKNLREFVFKNIDGYFKIYSKHTPINLVRDLPQGFSALEPLVDLPIGINITRFQTLLALHRSYLTPGDSSSGWTAGAAAYYVGYLQPRTFLLKYNENGTITDAVDCALDPLSETKCTLKSFTVEKGIYQTSNFRVQPTESIVRFPNITNLCPFGEVFNATRFASVYAWNRKRISNCVADYSVLYNSASFSTFKCYGVSPTKLNDLCFTNVYADSFVIRGDEVRQIAPGQTGKIADYNYKLPDDFTGCVIAWNSNNLDSKVGGNYNYLYRLFRKSNLKPFERDISTEIYQAGSTPCNGVEGFNCYFPLQSYGFQPTNGVGYQPYRVVVLSFELLHAPATVCGPKKSTNLVKNKCVNFNFNGLTGTGVLTESNKKFLPFQQFGRDIADTTDAVRDPQTLEILDITPCSFGGVSVITPGTNTSNQVAVLYQGVNCTEVPVAIHADQLTPTWRVYSTGSNVFQTRAGCLIGAEHVNNSYECDIPIGAGICASYQTQTNSPRRARSVASQSIIAYTMSLGAENSVAYSNNSIAICTNFTISVTTEILPVSMTKTSVDCTMYICGDSTECSNLLLQYGSFCTQLNRALTGIAVEQDKNTQEVFAQVKQIYKTPPIKDFGGFNFSQILPDPSKPSKRSFIEDLLFNKVTLADAGFIKQYGDCLGDIVARDLICAQKFNGLTVLPPLLTDEMIAQYTSALLAGTITSGWTFGAGAALQIPFAMQMAYRFNGIGVTQNVLYENQKLIANQFNSAIGKIQDSLSSTASALGKLQDVVNQNAQALNTLVKQLSSNFGAISSVLNDILSRLDKVEAEVQIDRLITGRLQSLQTYVTQQLIRAAEIRASANLAATKMSECVLGQSKRVDFCGKGYHLMSFPQSAPHGVVFLHVTYVCAQEKNFTTAPAICHDGKAHFPREGVFVSNGTHWFVTQRNFYEPQIITTDNTFVSGNCDVVIGIVNNTVYDPLQPELDS

SEQ ID NO: 3132 - protein, 1147 aa, Artificial Sequence
  SARS-CoV-2/USA/WA-UW291/2020__EPI_ISL_418076 spike protein (1-1147)(P715C_P1069C)
MFVFLVLLPLVSSQCVNLTTRTQLPPAYTNSFTRGVYYPDKVFRSSVLHSTQDLFLPFFSNVTWFHAIHVSGTNGTKRFDNPVLPFNDGVYFASTEKSNIIRGWIFGTTLDSKTQSLLIVNNATNVVIKVCEFQFCNDPFLGVYYHKNNKSWMESEFRVYSSANNCTFEYVSQPFLMDLEGKQGNFKNLREFVFKNIDGYFKIYSKHTPINLVRDLPQGFSALEPLVDLPIGINITRFQTLLALHRSYLTPGDSSSGWTAGAAAYYVGYLQPRTFLLKYNENGTITDAVDCALDPLSETKCTLKSFTVEKGIYQTSNFRVQPTESIVRFPNITNLCPFGEVFNATRFASVYAWNRKRISNCVADYSVLYNSASFSTFKCYGVSPTKLNDLCFTNVYADSFVIRGDEVRQIAPGQTGKIADYNYKLPDDFTGCVIAWNSNNLDSKVGGNYNYLYRLFRKSNLKPFERDISTEIYQAGSTPCNGVEGFNCYFPLQSYGFQPTNGVGYQPYRVVVLSFELLHAPATVCGPKKSTNLVKNKCVNFNFNGLTGTGVLTESNKKFLPFQQFGRDIADTTDAVRDPQTLEILDITPCSFGGVSVITPGTNTSNQVAVLYQGVNCTEVPVAIHADQLTPTWRVYSTGSNVFQTRAGCLIGAEHVNNSYECDIPIGAGICASYQTQTNSPRRARSVASQSIIAYTMSLGAENSVAYSNNSIAICTNFTISVTTEILPVSMTKTSVDCTMYICGDSTECSNLLLQYGSFCTQLNRALTGIAVEQDKNTQEVFAQVKQIYKTPPIKDFGGFNFSQILPDPSKPSKRSFIEDLLFNKVTLADAGFIKQYGDCLGDIAARDLICAQKFNGLTVLPPLLTDEMIAQYTSALLAGTITSGWTFGAGAALQIPFAMQMAYRFNGIGVTQNVLYENQKLIANQFNSAIGKIQYSLSSTASALGKLQDVVNQNAQALNTLVKQLSSNFGAISSVLNDILSRLDKVEAEVQIDRLITGRLQSLQTYVTQQLIRAAEIRASANLAATKMSECVLGQSKRVDFCGKGYHLMSFPQSAPHGVVFLHVTYVCAQEKNFTTAPAICHDGKAHFPREGVFVSNGTHWFVTQRNFYEPQIITTDNTFVSGNCDVVIGIVNNTVYDPLQPELDS

SEQ ID NO: 3133 - protein, 1147 aa, Artificial Sequence; identical to SEQ ID NO: 3096
  SARS-CoV-2/Portugal/PT0034/2020__EPI_ISL_418019 spike protein (1-1147)(P715C_P1069C)

SEQ ID NO: 3134 - protein, 1147 aa, Artificial Sequence; identical to SEQ ID NO: 3088
  SARS-CoV-2/Iceland/202/2020__EPI_ISL_417750 spike protein (1-1147)(P715C_P1069C)

SEQ ID NO: 3135 - protein, 1147 aa, Artificial Sequence
  SARS-CoV-2/USA/WA-UW261/2020__EPI_ISL_418046 spike protein (1-1147)(P715C_P1069C)
MFVFLVLLPLVSSQCVNLTTRTQLPPAYTNSFTRGVYYPDKVFRSSVLHSTQDLFLPFFSNVTWFHAIHVSGTNGTKRFDNPVLPFNDGVYFASTEKSNIIRGWIFGTTLDSKTQSLLIVNNATNVVIKVCEFQFCNDPFLGVYYHKNNKSWMESEFRVYSSANNCTFEYVSQPFLMDLEGKQGNFKNLREFVFKNIDGYFKIYSKHTPINLVRDLPQGFSALEPLVDLPIGINITRFQTLLALHRSYLTPGDSSSGWTAGAAAYYVGYLQPRTFLLKYNENGTITDAVDCALDPLSETKCTLKSFTVEKGIYQTSNFRVQPTESIVRFPNITNLCPFGEVFNATRFTSVYAWNRKRISNCVADYSVLYNSASFSTFKCYGVSPTKLNDLCFTNVYADSFVIRGDEVRQIAPGQTGKIADYNYKLPDDFTGCVIAWNSNNLDSKVGGNYNYLYRLFRKSNLKPFERDISTEIYQAGSTPCNGVEGFNCYFPLQSYGFQPTNGVGYQPYRVVVLSFELLHAPATVCGPKKSTNLVKNKCVNFNFNGLTGTGVLTESNKKFLPFQQFGRDIADTTDAVRDPQTLEILDITPCSFGGVSVITPGTNTSNQVAVLYQDVNCTEVPVAIHADQLTPTWRVYSTGSNVFQTRAGCLIGAEHVNNSYECDIPIGAGICASYQTQTNSPRRARSVASQSIIAYTMSLGAENSVAYSNNSIAICTNFTISVTTEILPVSMTKTSVDCTMYICGDSTECSNLLLQYGSFCTQLNRALTGIAVEQDKNTQEVFAQVKQIYKTPPIKDFGGFNFSQILPDPSKPSKRSFIEDLLFNKVTLADAGFIKQYGDCLGDIAARDLICAQKFNGLTVLPPLLTDEMIAQYTSALLAGTITSGWTFGAGAALQIPFAMQMAYRFNGIGVTQNVLYENQKLIANQFNSAIGKIQDSLSSTASALGKLQDVVNQNAQALNTLVKQLSSNFGAISSVLNDILSRLDKVEAEVQIDRLITGRLQSLQTYVTQQLIRAAEIRASANLAATKMSECVLGQSKRVDFCGKGYHLMSFPQSAPHGVVFLHVTYVCAQEKNFTTAPAICHDGKAHFPREGVFVSNGTHWFVTQRNFYEPQIITTDNTFVSGNCDVVIGIVNNTVYDPLQPELDS

SEQ ID NO: 3136 - protein, 1147 aa, Artificial Sequence
  SARS-CoV-2/Portugal/PT0035/2020__EPI_ISL_418020 spike protein (1-1147)(P715C_P1069C)
MFVFLVLLPLVSSQCVNLTTRTQLPPAYTNSFTRGVYYPDKVFRSSVLHSTQDLFLPFFSNVTWFHAIHVSGTNGTKRFDNPVLPFNDGVYFASTEKSNIIRGWIFGTTLDSKTQSLLIVNNATNVVIKVCEFQFCNDPFLGVYYHKNNKSWMESEFRVYSSANNCTFEYVSQPFLMDLEGKQGNFKNLREFVFKNIDGYFKIYSKHTPINLVRDLPQGFSALEPLVDLPIGINITRFQTLLALHRSYLTPGDSSSGWTAGAAAYYVGYLQPRTFLLKYNENGTITDAVDCALDPLSETKCTLKSFTVEKGIYQTSNFRVQPTESIVRFPNITNLCPFGEVFNATRFASVYAWNRKRISNCVADYSVLYNSASFSTFKCYGVSPTKLNDLCFTNVYADSFVIRGDEVRQIAPGQTGKIADYNYKLPDDFTGCVIAWNSNNLDSKVGGNYNYLYRLFRKSNLKPFERDISTEIYQAGSTPCNGVEGFNCYFPLQSYGFQPTNGVGYQPYRVVVLSFELLHAPATVCGPKKSTNLVKNKCVNFNFNGLTGTGVLTESNKKFLPFQQFGRDIADTTDAVRDPQTLEILDITPCSFGGVSVITPGTNTSNQVAVLYQDVNCTEVPVAIHADQLTPTWRVYSTGSNVFQTRAGCLIGAEHVNNSYECDIPIGAGICASYQTQTNSPRRARSVASQSIIAYTMSLGAENSVAYSNNSIAICTNFTISVTTEILPVSMTKTSVDCTMYICGDSTECSNLLLQYGSFCTQLNRALTGIAVEQDKNTQEVFAQVKQIYKTPPIKDFGGFNFSQILPDPSKPSKRSFIEDLLFNKVTLADAGFIKQYGDCLGDISARDLICAQKFNGLTVLPPLLTDEMIAQYTSALLAGTITSGWTFGAGAALQIPFAMQMAYRFNGIGVTQNVLYENQKLIANQFNSAIGKIQDSLSSTASALGKLQDVVNQNAQALNTLVKQLSSNFGAISSVLNDILSRLDKVEAEVQIDRLITGRLQSLQTYVTQQLIRAAEIRASANLAATKMSECVLGQSKRVDFCGKGYHLMSFPQSAPHGVVFLHVTYVCAQEKNFTTAPAICHDGKAHFPREGVFVSNGTHWFVTQRNFYEPQIITTDNTFVSGNCDVVIGIVNNTVYDPLQPELDS

SEQ ID NO: 3137 - protein, 1147 aa, Artificial Sequence
  SARS-CoV-2/USA/NY-NYUMC7/2020__EPI_ISL_418192 spike protein (1-1147)(P715C_P1069C)
MFVFLVLLPLVSSQCVNLTTRTQLPPAYTNSFTRGVYYPDKVFRSSVLHSTQDLFLPFFSNVTWFHAIHVSGTNGTKRFDNPVLPFNDGVYFASTEKSNIIRGWIFGTTLDSKTQSLLIVNNATNVVIKVCEFQFCNDPFLGVYHHKNNKSWMESEFRVYSSANNCTFEYVSQPFLMDLEGKQGNFKNLREFVFKNIDGYFKIYSKHTPINLVRDLPQGFSALEPLVDLPIGINITRFQTLLALHRSYLTPGDSSSGWTAGAAAYYVGYLQPRTFLLKYNENGTITDAVDCALDPLSETKCTLKSFTVEKGIYQTSNFRVQPTESIVRFPNITNLCPFGEVFNATRFASVYAWNRKRISNCVADYSVLYNSASFSTFKCYGVSPTKLNDLCFTNVYADSFVIRGDEVRQIAPGQTGKIADYNYKLPDDFTGCVIAWNSNNLDSKVGGNYNYLYRLFRKSNLKPFERDISTEIYQAGSTPCNGVEGFNCYFPLQSYGFQPTNGVGYQPYRVVVLSFELLHAPATVCGPKKSTNLVKNKCVNFNFNGLTGTGVLTESNKKFLPFQQFGRDIADTTDAVRDPQTLEILDITPCSFGGVSVITPGTNTSNQVAVLYQGVNCTEVPVAIHADQLTPTWRVYSTGSNVFQTRAGCLIGAEHVNNSYECDIPIGAGICASYQTQTNSPRRARSVASQSIIAYTMSLGAENSVAYSNNSIAICTNFTISVTTEILPVSMTKTSVDCTMYICGDSTECSNLLLQYGSFCTQLNRALTGIAVEQDKNTQEVFAQVKQIYKTPPIKDFGGFNFSQILPDPSKPSKRSFIEDLLFNKVTLADAGFIKQYGDCLGDIAARDLICAQKFNGLTVLPPLLTDEMIAQYTSALLAGTITSGWTFGAGAALQIPFAMQMAYRFNGIGVTQNVLYENQKLIANQFNSAIGKIQDSLSSTASALGKLQDVVNQNAQALNTLVKQLSSNFGAISSVLNDILSRLDKVEAEVQIDRLITGRLQSLQTYVTQQLIRAAEIRASANLAATKMSECVLGQSKRVDFCGKGYHLMSFPQSAPHGVVFLHVTYVCAQEKNFTTAPAICHDGKAHFPREGVFVSNGTHWFVTQRNFYEPQIITTDNTFVSGNCDVVIGIVNNTVYDPLQPELDS

SEQ ID NO: 3138 - protein, 1147 aa, Artificial Sequence
  SARS-CoV-2/Iceland/189/2020__EPI_ISL_417709 spike protein (1-1147)(P715C_P1069C)
MFVFLVLLPLVSSQCVNLTTRTQLPPAYTNSFTRGVYYPDKVFRSSVLHSTQDLFLPFFSNVTWFHAIHVSGTNGTKRFDNPVLPFNDGVYFASTEKSNIIRGWIFGTTLDSKTQSLLIVNNATNVVIKVCEFQFCNDPFLGVYYHKNNKSWMESEFRVYSSANNCTFEYVSQPFLMDLEGKQGNFKNLREFVFKNIDGYFKIYSKHTPINLVRDLPQGFSALEPLVDLPIGINITRFQTLLALHRSYLTPGDSSSGWTAGAAAYYVGYLQPRTFLLKYNENGTITDAVDCALDPLSETKCTLKSFTVEKGIYQTSNFRVQPTESIVRFPNITNLCPFGEVFNATRFASVYAWNRKRISNCVADYSVLYNSASFSTFKCYGVSPTKLNDLCFTNVYADSFVIRGDEVRQIAPGQTGKIADYNYKLPDDFTGCVIAWNSNNLDSKVGGNYNYLYRLFRKSNLKPFERDISTEIYQAGSTPCNGVEGFNCYFPLQSYGFQPTNGVGYQPYRVVVLSFELLHAPATVCGPKKSTNLVKNKCVNFNFNGLTGTGVLTESNKKFLPFQQFGRDIADTTDAVRDPQTLEILDITPCSFGGVSVITPGTNTSNQVAVLYQGVNCTEVPVAIHADQLTPTWRVYSTGSNVFQTRAGCLIGAEHVNNSYECDIPIGAGICASYQTQTNSPRRARSVASQSIIAYTMSLGAENSVAYSNNSIAICTNFTISVTTEILPVSMTKTSVDCTMYICGDSTECSNLLLQYGSFCTQLNRALTGIAVEQDKNTQEVFAQVKQIYKTPPIKDFGGFNFSQILPDPSKPSKRSFIEDLLFNKVTLADAGFTKQYGDCLGDIAARDLICAQKFNGLTVLPPLLTDEMIAQYTSALLAGTITSGWTFGAGAALQIPFAMQMAYRFNGIGVTQNVLYENQKLIANQFNSAIGKIQDSLSSTASALGKLQDVVNQNAQALNTLVKQLSSNFGAISSVLNDILSRLDKVEAEVQIDRLITGRLQSLQTYVTQQLIRAAEIRASANLAATKMSECVLGQSKRVDFCGKGYHLMSFPQSAPHGVVFLHVTYVCAQEKNFTTAPAICHDGKAHFPREGVFVSNGTHWFVTQRNFYEPQIITTDNTFVSGNCDVVIGIVNNTVYDPLQPELDS

SEQ ID NO: 3139 - protein, 1147 aa, Artificial Sequence
  SARS-CoV-2/Australia/NSW56/2020__EPI_ISL_417408 spike protein (1-1147)(P715C_P1069C)
MFVFLVLLPLVSSQCVNLTTRTQLPPAYTNSFTRGVYYPDKVFRSSVLHSTQDLFLPFFSNVTWFHAIHVSGTNGTKRFDNPVLPFNDGVYFASTEKSNIIRGWIFGTTLDSKTQSLLIVNNATNVVIKVCEFQFCNDPFLGVYYHKNNKSWMESEFRVYSSANNCTFEYVSQPFLMDLEGKQGNFKNLREFVFKNIDGYFKIYSKHTPINLVRDLPQGFSALEPLVDLPIGINITRFQTLLALHRSYLTPGDSSSGWTAGAAAYYVGYLQPRTFLLKYNENGTITDAVDCALDPLSETKCTLKSFTVEKGIYQTSNFRVQPTESIVRFPNITNLCPFGEVFNATRFASVYAWNRKRISNCVADYSVLYNSASFSTFKCYGVSPTKLNDLCFTNVYADSFVIRGDEVRQIAPGQTGKIADYNYKLPDDFTGCVIAWNSNNLDSKVGGNYNYLYRLFRKSNLKPFERDISTEIYQAGSTPCNGVEGFNCYFPLQSYGFQPTNGVGYQPYRVVVLSFELLHAPATVCGPKKSTNLVKNKCVNFNFNGLTGTGVLTESNKKFLPFQQFGRDIADTTDAVRDPQTLEILDITPCSFGGVSVITPGTNTSNQVAVLYQDVNCTEVPVAIHADQLTPTWRVYSTGSNVFQTRAGCLIGAEHVNNSYECDIPIGAGICASYQTQTNSPRRARSVASQSIIAYTMSLGAENSVAYSNNSIAICTNFTISVTTEILPVSMTKTSVDCTMYICGDSTECSNLLLQYGSFCTQLNRALTGIAVEQDKNTQEVFAQVKQIYKTPPIKDFGGFNFSQILPDSSKPSKRSFIEDLLFNKVTLADAGFIKQYGDCLGDIAARDLICAQKFNGLTVLPPLLTDEMIAQYTSALLAGTITSGWTFGAGAALQIPFAMQMAYRFNGIGVTQNVLYENQKLIANQFNSAIGKIQDSLSSTASALGKLQDVVNQNAQALNTLVKQLSSNFGAISSVLNDILSRLDKVEAEVQIDRLITGRLQSLQTYVTQQLIRAAEIRASANLAATKMSECVLGQSKRVDFCGKGYHLMSFPQSAPHGVVFLHVTYVCAQEKNFTTAPAICHDGKAHFPREGVFVSNGTHWFVTQRNFYEPQIITTDNTFVSGNCDVVIGIVNNTVYDPLQPELDS

SEQ ID NO: 3140 - protein, 1147 aa, Artificial Sequence
  SARS-CoV-2/Iceland/280/2020__EPI_ISL_417608 spike protein (1-1147)(P715C_P1069C)
MFVFLVLLPLVSSQCVNLTTRTQLPPAYTNSFTRGVYYPDKVFRSSVLHSTQDLFLPFFSNVTWFHAIHVSGTNGTKRFDNPVLPFNDGVYFASTEKSNIIRGWIFGTTLDSKTQSLLIVNNATNVVIKVCEFQFCNDPFLGVYYHKNNKSWMESEFRVYSSANNCTFEYVSQPFLMDLEGKQGNFKNLREFVFKNIDGYFKIYSKHTPINLVRDLPQGFSALEPLVDLPIGINITRFQTLLALHRSYLTPGDSSSGWTAGAAAYYVGYLQPRTFLLKYNENGTITDAVDCALDPLSETKCTLKSFTVEKGIYQTSNFRVQPTESIVRFPNITNLCPFGEVFNATRFASVYAWNRKRISNCVADYSVLYNSASFSTFKCYGVSPTKLNDLCFTNVYADSFVIRGDEVRQIAPGQTGKIADYNYKLPDDFTGCVIAWNSNNLDSKVGGNYNYLYRLFRKSNLKPFERDISTEIYQAGSTPCNGVEGFNCYFPLQSYGFQPTNGVGYQPYRVVVLSFELLHAPATVCGPKKSTNLVKNKCVNFNFNGLTGTGVLTESNKKFLPFQQFGRDIADTTDAVRDPQTLEILDITPCSFGGVSVITPGTNTSNQVAVLYQGVNCTEVPVAIHADQLTPTWRVYSTGSNVFQTRAGCLIGAEHVNNSYECDIPIGAGICASYHTQTNSPRRARSVASQSIIAYTMSLGAENSVAYSNNSIAICTNFTISVTTEILPVSMTKTSVDCTMYICGDSTECSNLLLQYGSFCTQLNRALTGIAVEQDKNTQEVFAQVKQIYKTPPIKDFGGFNFSQILPDPSKPSKRSFIEDLLFNKVTLADAGFIKQYGDCLGDIAARDLICAQKFNGLTVLPPLLTDEMIAQYTSALLAGTITSGWTFGAGAALQIPFAMQMAYRFNGIGVTQNVLYENQKLIANQFNSAIGKIQDSLSSTASALGKLQDVVNQNAQALNTLVKQLSSNFGAISSVLNDILSRLDKVEAEVQIDRLITGRLQSLQTYVTQQLIRAAEIRASANLAATKMSECVLGQSKRVDFCGKGYHLMSFPQSAPHGVVFLHVTYVCAQEKNFTTAPAICHDGKAHFPREGVFVSNGTHWFVTQRNFYEPQIITTDNTFVSGNCDVVIGIVNNTVYDPLQPELDS

SEQ ID NO: 3141 - protein, 1147 aa, Artificial Sequence; identical to SEQ ID NO: 3096
  SARS-CoV-2/Iceland/247/2020__EPI_ISL_417575 spike protein (1-1147)(P715C_P1069C)

SEQ ID NO: 3142 - protein, 1147 aa, Artificial Sequence
  SARS-CoV-2/Iceland/238/2020__EPI_ISL_417566 spike protein (1-1147)(P715C_P1069C)
MFVFLVLLPLVSSQCVNLTTRTQLPPAYTNSFTRGVYYPDKVFRSSVLHSTQDLFLPFFSNVTWFHAIHVSGTNGTKRFDNPVLPFNDGVYFASTEKSNIIRGWIFGTTLDSKTQSLLIVNNATNVVIKVCEFQFCNDPFLGVYYHKNNKSWMESEFRVYSSANNCTFEYVSQPFLMDLEGKQGNFKNLREFVFKNIDGYFKIYSKHTPINLVRDLPQGFSALEPLVDLPIGINITRFQTLLALHRSYLTPGDSSSGWTAGAAAYYVGYLQPRTFLLKYNENGTITDAVDCALDPLSETKCTLKSFTVEKGIYQTSNFRVQPTESIVRFPNITNLCPFGEVFNATRFASVYAWNRKRISNCVADYSVLYNSASFSTFKCYGVSPTKLNDLCFTNVYADSFVIRGDEVRQIAPGQTGKIADYNYKLPDDFTGCVIAWNSNNLDSKVGGNYNYLYRLFRKSNLKPFERDISTEIYQAGSTPCNGVEGFNCYFPLQSYGFQPTNGVGYQPYRVVVLSFELLHAPATVCGPKKSTNLVKNKCVNFNFNGLTGTGVLTESNKKFLPFQQFGRDIADTTDAVRDPQTLEILDITPCSFGGVSVITPGTNTSNQVAVLYQGVNCTEVPVAIHADQLTPTWRVYSTGSNVFQTRAGCLIGAEHVNNSYECDIPIGAGICASYQTQTNSPRRARSVASQSIIAYTMSLGAENSVAYSNNSIAICTNFTISVTTEILPVSMTKTSVDCTMYICGDSTECSNLLLQYGSFCTQLNRALTGIAVEQDKNTQEVFAQVKQIYKTPPIKDFGGFNFSQILPDPSKPSKRSFIEDLLFNKVTLADVGFIKQYGDCLGDIAARDLICAQKFNGLTVLPPLLTDEMIAQYTSALLAGTITSGWTFGAGAALQIPFAMQMAYRFNGIGVTQNVLYENQKLIANQFNSAIGKIQDSLSSTASALGKLQDVVNQNAQALNTLVKQLSSNFGAISSVLNDILSRLDKVEAEVQIDRLITGRLQSLQTYVTQQLIRAAEIRASANLAATKMSECVLGQSKRVDFCGKGYHLMSFPQSAPHGVVFLHVTYVCAQEKNFTTAPAICHDGKAHFPREGVFVSNGTHWFVTQRNFYEPQIITTDNTFVSGNCDVVIGIVNNTVYDPLQPELDS

SEQ ID NO: 3143 - protein, 1147 aa, Artificial Sequence
  SARS-CoV-2/Greece/16/2020__EPI_ISL_418265 spike protein (1-1147)(P715C_P1069C)
MFVFLVLLPLVSSQCVNLTTRTQLPPAYTNSFTRGVYYPDKVFRSSVLHSTQDLFLPFFSNVTWFHAIHVSGTNGTKRFDNPVLPFNDGVYFASTEKSNIIRGWIFGTTLDSKTQSLLIVNNATNVVIKVCEFQFCNDPFLGVYYHKNNKSWMESEFRVYSSANNCTFEYVSQPFLMDLEGKQGNFKNLREFVFKNVDGYFKIYSKHTPINLVRDLPQGFSALEPLVDLPIGINITRFQTLLALHRSYLTPGDSSSGWTAGAAAYYVGYLQPRTFLLKYNENGTITDAVDCALDPLSETKCTLKSFTVEKGIYQTSNFRVQPTESIVRFPNITNLCPFGEVFNATRFASVYAWNRKRISNCVADYSVLYNSASFSTFKCYGVSPTKLNDLCFTNVYADSFVIRGDEVRQIAPGQTGKIADYNYKLPDDFTGCVIAWNSNNLDSKVGGNYNYLYRLFRKSNLKPFERDISTEIYQAGSTPCNGVEGFNCYFPLQSYGFQPTNGVGYQPYRVVVLSFELLHAPATVCGPKKSTNLVKNKCVNFNFNGLTGTGVLTESNKKFLPFQQFGRDIADTTDAVRDPQTLEILDITPCSFGGVSVITPGTNTSNQVAVLYQDVNCTEVPVAIHADQLTPTWRVYSTGSNVFQTRAGCLIGAEHVNNSYECDIPIGAGICASYQTQTNSPRRARSVASQSIIAYTMSLGAENSVAYSNNSIAICTNFTISVTTEILPVSMTKTSVDCTMYICGDSTECSNLLLQYGSFCTQLNRALTGIAVEQDKNTQEVFAQVKQIYKTPPIKDFGGFNFSQILPDPSKPSKRSFIEDLLFNKVTLADAGFIKQYGDCLGDIAARDLICAQKFNGLTVLPPLLTDEMIAQYTSALLAGTITSGWTFGAGAALQIPFAMQMAYRFNGIGVTQNVLYENQKLIANQFNSAIGKIQDSLSSTASALGKLQDVVNQNAQALNTLVKQLSSNFGAISSVLNDILSRLDKVEAEVQIDRLITGRLQSLQTYVTQQLIRAAEIRASANLAATKMSECVLGQSKRVDFCGKGYHLMSFPQSAPHGVVFLHVTYVCAQEKNFTTAPAICHDGKAHFPREGVFVSNGTHWFVTQRNFYEPQIITTDNTFVSGNCDVVIGIVNNTVYDPLQPELDS

SEQ ID NO: 3144 - protein, 1147 aa, Artificial Sequence
  SARS-CoV-2/Iceland/319/2020__EPI_ISL_417648 spike protein (1-1147)(P715C_P1069C)
MFVFLVLLPLVSSQCVNLTTRTQLPPAYTNSFTRGVYYPDKVFRSSVLHSTQDLFLPFFSNVTWFHAIHVSGTNGTKRFDNPVLPFNDGVYFASTEKSNIIRGWIFGTTLDSKTQSLLIVNNATNVVIKVCEFQFCNDPFLGVYYHKNNKSWMESEFRVYSSANNCTFEYVSQPFLIDLEGKQGNFKNLREFVFKNIDGYFKIYSKHTPINLVRDLPQGFSALEPLVDLPIGINITRFQTLLALHRSYLTPGDSSSGWTAGAAAYYVGYLQPRTFLLKYNENGTITDAVDCALDPLSETKCTLKSFTVEKGIYQTSNFRVQPTESIVRFPNITNLCPFGEVFNATRFASVYAWNRKRISNCVADYSVLYNSASFSTFKCYGVSPTKLNDLCFTNVYADSFVIRGDEVRQIAPGQTGKIADYNYKLPDDFTGCVIAWNSNNLDSKVGGNYNYLYRLFRKSNLKPFERDISTEIYQAGSTPCNGVEGFNCYFPLQSYGFQPTNGVGYQPYRVVVLSFELLHAPATVCGPKKSTNLVKNKCVNFNFNGLTGTGVLTESNKKFLPFQQFGRDIADTTDAVRDPQTLEILDITPCSFGGVSVITPGTNTSNQVAVLYQGVNCTEVPVAIHADQLTPTWRVYSTGSNVFQTRAGCLIGAEHVNNSYECDIPIGAGICASYQTQTNSPRRARSVASQSIIAYTMSLGAENSVAYSNNSIAICTNFTISVTTEILPVSMTKTSVDCTMYICGDSTECSNLLLQYGSFCTQLNRALTGIAVEQDKNTQEVFAQVKQIYKTPPIKDFGGFNFSQILPDPSKPSKRSFIEDLLFNKVTLADAGFIKQYGDCLGDIAARDLICAQKFNGLTVLPPLLTDEMIAQYTSALLAGTITSGWTFGAGAALQIPFAMQMAYRFNGIGVTQNVLYENQKLIANQFNSAIGKIQDSLSSTASALGKLQDVVNQNAQALNTLVKQLSSNFGAISSVLNDILSRLDKVEAEVQIDRLITGRLQSLQTYVTQQLIRAAEIRASANLAATKMSECVLGQSKRVDFCGKGYHLMSFPQSAPHGVVFLHVTYVCAQEKNFTTAPAICHDGKAHFPREGVFVSNGTHWFVTQRNFYEPQIITTDNTFVSGNCDVVIGIVNNTVYDPLQPELDS

SEQ ID NO: 3145 - protein, 1147 aa, Artificial Sequence
  SARS-CoV-2/Congo/94/2020__EPI_ISL_417947 spike protein (1-1147)(P715C_P1069C)
MFVFLVLLPLVSSQCVNLTTRTQLPPAYTNSFTRGVYYPDKVFRSSVLHSTQDLFLPFFSNVTWFHAIHVSGTNGTKRFDNPVLPFNDGVYFASTEKSNIIRGWIFGTTLDSKTQSLLIVNNATNVVIKVCEFQFCNDPFLGVYYHKNNKSWMESEFRVYSSANNCTFEYVSQPFLMDLEGKQGNFKNLREFVFKNIDGYFKIYSKHTPINLVRDLPQGFSALEPLVDLPIGINITRFQTLLALHRSYLTPGDSSSGWTAGAAAYYVGYLQPRTFLLKYNENGTITDAVDCALDPLSETKCTLKSFTVEKGIYQTSNFRVQPTESIVRFPNITNLCPFGEVFNATRFASVYAWNRKRISNCVADYSVLYNSASFSTFKCYGVSPTKLNDLCFTNVYADSFVIRGDEVRQIAPGQTGKIADYNYKLPDDFTGCVIAWNSNNLDSKVGGNYNYLYRLFRKSNLKPFERDISTEIYQAGSTPCNGVEGFNCYFPLQSYGFQPTNGVGYQPYRVVVLSFELLHAPATVCGPKKSTNLVKNKCVNFNFNGLTGTGVLTESNKKFLPFQQFGRDIADTTDAVRDPQTLEILDITPCSFGGVSVITPGTNTSNQVAVLYQGVNCTEVPVAIHADQLTPTWRVYSTGSNVFQTRAGCLIGAEHVNNSYECDIPIGAGICASYQTQTNSPRRARSVASQSIIAYTMSLGAENSVAYSNNSIAICTNFTISVTTEILPVSMTKTSVDCTMYICGDSTECSNLLLQYGSFCTQLNRALTGIAVEQDKNTQEVFAQVKQIYKTPPIKDFGGFNFSQILPDPSKPSKRSFIEDILFNKVTLADAGFIKQYGDCLGDIAARDLICAQKFNGLTVLPPLLTDEMIAQYTSALLAGTITSGWTFGAGAALQIPFAMQMAYRFNGIGVTQNVLYENQKLIANQFNSAIGKIQDSLSSTASALGKLQDVVNQNAQALNTLVKQLSSNFGAISSVLNDILSRLDKVEAEVQIDRLITGRLQSLQTYVTQQLIRAAEIRASANLAATKMSECVLGQSKRVDFCGKGYHLMSFPQSAPHGVVFLHVTYVCAQEKNFTTAPAICHDGKAHFPREGVFVSNGTHWFVTQRNFYEPQIITTDNTFVSGNCDVVIGIVNNTVYDPLQPELDS

SEQ ID NO: 3146 - protein, 1147 aa, Artificial Sequence
  SARS-CoV-2/Congo/158/2020__EPI_ISL_417950 spike protein (1-1147)(P715C_P1069C)
MFVFLVLLPLVSSQCVNLTTRTQLPPAYTNSFTRGVYYPDKVFRSSVLHSTQDLFLPFFSNVTWFHAIHVSGTNGTKRFDNPVLPFNDGVYFASTEKSNIIRGWIFGTTLDSKTQSLLIVNNATNVVIKVCEFQFCNDPFLGVYYHKNNKSWMESEFRVYSSANNCTFEYVSQPFLMDLEGKQGNFKNLREFVFKNIDGYFKIYSKHTPINLVRDLPQGFSALEPLVDLPIGINITRFQTLLALHRSYLTPGDSSSGWTAGAAAYYVGYLQPRTFLLKYNENGTITDAVDCALDPLSETKCTLKSFTVEKGIYQTSNFRVQPTESIVRFPNITNLCPFGEVFNATRFASVYAWNRKRISNCVADYSVLYNSASFSTFKCYGVSPTKLNDLCFTNVYADSFVIRGDEVRQIAPGQTGKIADYNYKLPDDFTGCVIAWNSNNLDSKVGGNYNYLYRLFRKSNLKPFERDISTEIYQAGSTPCNGVEGFNCYFPLQSYGFQPTNGVGYQPYRVVVLSFELLHAPATVCGPKKSTNLVKNKCVNFNFNGLTGTGVLTESNKKFLPFQQFGRDIADTTDAVRDPQTLEILDITPCSFGGVSVITPGTNTSNQVAVLYQDVNCTEVPVAIHADQLTPTWRVYSTGSNVFQTRAGCLIGAEHVNNSYECDIPIGAGICASYQTQTNSPRRARSVASQSIIAYTMSLGAENSVAYSNNSIAICTNFTISVTTEILPVSMTKTSVDCTMYICGDSTECSNLLLQYGSFCTQLNRALTGIAVEQDKNTQEVFAQVKQIYKTPPIKDFGGFNFSQILPDPSKPSKRSFIEDLLFNKVTLADAGFIKQYGDCLGDIAARDLICAQKFNGLTVLPPLLTDEMIAQYTSALLAGTITSGWTFGAGAALQIPFAMQMAYRFNGIGVTQNVLYENQKLIANQFNSAIGKIQDSLSSTASALGKLQDVVNQNAQALNTLVKQLSSNFGAISSVLNDILSRLDKVEAEVQIDRLITGRLQSLQTYVTQQLIRAAEIRASANLAATKMSECVLGQSKRVDFCGKGYHLMSFPQSAPHGVVFLHVTYVCAQEKNFTTAPAICHDGKAHFPREGVFVSNGTHWFVTQRNFYEPQIITTDNTFLSGNCDVVIGIVNNTVYDPLQPELDS

SEQ ID NO: 3147 - protein, 1147 aa, Artificial Sequence
  SARS-CoV-2/USA/UT-00034/2020__EPI_ISL_417977 spike protein (1-1147)(P715C_P1069C)
MFVFLVLLPLVSSQCVNLTTRTQLPPAYTNSFTRGVYYPDKVFRSSVLHSTQDLFLPFFSNVTWFHAIHVSGTNGTKRFDNPVLPFNDGVYFASTEKSNIIRGWIFGTTLDSKTQSLLIVNNATNVVIKVCEFQFCNDPFLGVYYYKNNKSWMESEFRVYSSANNCTFEYVSQPFLMDLEGKQGNFKNLREFVFKNIDGYFKIYSKHTPINLVRDLPQGFSALEPLVDLPIGINITRFQTLLALHRSYLTPGDSSSGWTAGAAAYYVGYLQPRTFLLKYNENGTITDAVDCALDPLSETKCTLKSFTVEKGIYQTSNFRVQPTESIVRFPNITNLCPFGEVFNATRFASVYAWNRKRISNCVADYSVLYNSASFSTFKCYGVSPTKLNDLCFTNVYADSFVIRGDEVRQIAPGQTGKIADYNYKLPDDFTGCVIAWNSNNLDSKVGGNYNYLYRLFRKSNLKPFERDISTEIYQAGSTPCNGVEGFNCYFPLQSYGFQPTNGVGYQPYRVVVLSFELLHAPATVCGPKKSTNLVKNKCVNFNFNGLTGTGVLTESNKKFLPFQQFGRDIADTTDAVRDPQTLEILDITPCSFGGVSVITPGTNTSNQVAVLYQGVNCTEVPVAIHADQLTPTWRVYSTGSNVFQTRAGCLIGAEHVNNSYECDIPIGAGICASYQTQTNSPRRARSVASQSIIAYTMSLGAENSVAYSNNSIAICTNFTISVTTEILPVSMTKTSVDCTMYICGDSTECSNLLLQYGSFCTQLNRALTGIAVEQDKNTQEVFAQVKQIYKTPPIKDFGGFNFSQILPDPSKPSKRSFIEDLLFNKVTLADAGFIKQYGDCLGDIAARDLICAQKFNGLTVLPPLLTDEMIAQYTSALLAGTITSGWTFGAGAALQIPFAMQMAYRFNGIGVTQNVLYENQKLIANQFNSAIGKIQDSLSSTASALGKLQDVVNQNAQALNTLVKQLSSNFGAISSVLNDILSRLDKVEAEVQIDRLITGRLQSLQTYVTQQLIRAAEIRASANLAATKMSECVLGQSKRVDFCGKGYHLMSFPQSAPHGVVFLHVTYVCAQEKNFTTAPAICHDGKAHFPREGVFVSNGTHWFVTQRNFYEPQIITTDNTFVSGNCDVVIGIVNNTVYDPLQPELDS

SEQ ID NO: 3148 - protein, 1147 aa, Artificial Sequence
  SARS-CoV-2/USA/UT-00033/2020__EPI_ISL_417976 spike protein (1-1147)(P715C_P1069C)
MFVFLVLLPLVSSQCVNLTTRTQLPPAYTNSFTRGVYYPDKVFRSSVLHSTQDLFLPFFSNVTWFHAIHVSGTNGTKRFDNPVLPFNDGVYFASTEKSNIIRGWIFGTTLDSKTQSLLIVNNATNVVIKVCEFQFCNDPFLGVYYHKNNKSWMESEFRVYSSANNCTFEYVSQPFLMDLEGKQGNFKNLREFVFKNIDGYFKIYSKHTPINLVRDLPQGFSALEPLVDLPIGINITRFQTLLALHRSYLTPGDSSSGLTAGAAAYYVGYLQPRTFLLKYNENGTITDAVDCALDPLSETKCTLKSFTVEKGIYQTSNFRVQPTESIVRFPNITNLCPFGEVFNATRFASVYAWNRKRISNCVADYSVLYNSASFSTFKCYGVSPTKLNDLCFTNVYADSFVIRGDEVRQIAPGQTGKIADYNYKLPDDFTGCVIAWNSNNLDSKVGGNYNYLYRLFRKSNLKPFERDISTEIYQAGSTPCNGVEGFNCYFPLQSYGFQPTNGVGYQPYRVVVLSFELLHAPATVCGPKKSTNLVKNKCVNFNFNGLTGTGVLTESNKKFLPFQQFGRDIADTTDAVRDPQTLEILDITPCSFGGVSVITPGTNTSNQVAVLYQGVNCTEVPVAIHADQLTPTWRVYSTGSNVFQTRAGCLIGAEHVNNSYECDIPIGAGICASYQTQTNSPRRARSVASQSIIAYTMSLGAENSVAYSNNSIAICTNFTISVTTEILPVSMTKTSVDCTMYICGDSTECSNLLLQYGSFCTQLNRALTGIAVEQDKNTQEVFAQVKQIYKTPPIKDFGGFNFSQILPDPSKPSKRSFIEDLLFNKVTLADAGFIKQYGDCLGDIAARDLICAQKFNGLTVLPPLLTDEMIAQYTSALLAGTITSGWTFGAGAALQIPFAMQMAYRFNGIGVTQNVLYENQKLIANQFNSAIGKIQDSLSSTASALGKLQDVVNQNAQALNTLVKQLSSNFGAISSVLNDILSRLDKVEAEVQIDRLITGRLQSLQTYVTQQLIRAAEIRASANLAATKMSECVLGQSKRVDFCGKGYHLMSFPQSAPHGVVFLHVTYVCAQEKNFTTAPAICHDGKAHFPREGVFVSNGTHWFVTQRNFYEPQIITTDNTFVSGNCDVVIGIVNNTVYDPLQPELDS

SEQ ID NO: 3149 - protein, 1147 aa, Artificial Sequence
  SARS-CoV-2/USA/WI-13/2020__EPI_ISL_417516 spike protein (1-1147)(P715C_P1069C)
MFVFLVLLPLVSSQCVNLTTRTQLPPAYTNSFTRGVYYPDKVFRSSVLHSTQDLFLPFFSNVTWFHAIHVSGTNGTKRFDNPVLPFNDGVYFASTEKSNIIRGWIFGTTLDSKTQSLLIVNNATNVVIKVCEFQFCNDPFLGVYYHKNNKSWMESEFRVYSSANNCTFEYVSQPFLMDLEGKQGNFKNLREFVFKNIDGYFKIYSKHTPINLVRDLPQGFSALEPLVDLPIGINITRFQTLLALHRSYLTPGDSSSGWTAGAAAYYVGYLQPRTFLLKYNENGTITDAVDCALDPLSETKCTLKSFTVEKGIYQTSNFRVLPTESIVRFPNITNLCPFGEVFNATRFASVYAWNRKRISNCVADYSVLYNSASFSTFKCYGVSPTKLNDLCFTNVYADSFVIRGDEVRQIAPGQTGKIADYNYKLPDDFTGCVIAWNSNNLDSKVGGNYNYLYRLFRKSNLKPFERDISTEIYQAGSTPCNGVEGFNCYFPLQSYGFQPTNGVGYQPYRVVVLSFELLHAPATVCGPKKSTNLVKNKCVNFNFNGLTGTGVLTESNKKFLPFQQFGRDIADTTDAVRDPQTLEILDITPCSFGGVSVITPGTNTSNQVAVLYQGVNCTEVPVAIHADQLTPTWRVYSTGSNVFQTRAGCLIGAEHVNNSYECDIPIGAGICASYQTQTNSPRRARSVASQSIIAYTMSLGAENSVAYSNNSIAICTNFTISVTTEILPVSMTKTSVDCTMYICGDSTECSNLLLQYGSFCTQLNRALTGIAVEQDKNTQEVFAQVKQIYKTPPIKDFGGFNFSQILPDPSKPSKRSFIEDLLFNKVTLADAGFIKQYGDCLGDIAARDLICAQKFNGLTVLPPLLTDEMIAQYTSALLAGTITSGWTFGAGAALQIPFAMQMAYRFNGIGVTQNVLYENQKLIANQFNSAIGKIQDSLSSTASALGKLQDVVNQNAQALNTLVKQLSSNFGAISSVLNDILSRLDKVEAEVQIDRLITGRLQSLQTYVTQQLIRAAEIRASANLAATKMSECVLGQSKRVDFCGKGYHLMSFPQSAPHGVVFLHVTYVCAQEKNFTTAPAICHDGKAHFPREGVFVSNGTHWFVTQRNFYEPQIITTDNTFVSGNCDVVIGIVNNTVYDPLQPELDS

SEQ ID NO: 3150 - protein, 1146 aa, Artificial Sequence
  SARS-CoV-2/India/1-27/2020__EPI_ISL_413522 spike protein (1-1146)(P714C_P1068C)
MFVFLVLLPLVSSQCVNLTTRTQLPPAYTNSFTRGVYYPDKVFRSSVLHSTQDLFLPFFSNVTWFHAIHVSGTNGTKRFDNPVLPFNDGVYFASTEKSNIIRGWIFGTTLDSKTQSLLIVNNATNVVIKVCEFQFCNDPFLGVYHKNNKSWMESEFRVYSSANNCTFEYVSQPFLMDLEGKQGNFKNLREFVFKNIDGYFKIYSKHTPINLVRDLPQGFSALEPLVDLPIGINITRFQTLLALHRSYLTPGDSSSGWTAGAAAYYVGYLQPRTFLLKYNENGTITDAVDCALDPLSETKCTLKSFTVEKGIYQTSNFRVQPTESIVRFPNITNLCPFGEVFNATRFASVYAWNRKRISNCVADYSVLYNSASFSTFKCYGVSPTKLNDLCFTNVYADSFVIRGDEVIQIAPGQTGKIADYNYKLPDDFTGCVIAWNSNNLDSKVGGNYNYLYRLFRKSNLKPFERDISTEIYQAGSTPCNGVEGFNCYFPLQSYGFQPTNGVGYQPYRVVVLSFELLHAPATVCGPKKSTNLVKNKCVNFNFNGLTGTGVLTESNKKFLPFQQFGRDIADTTDAVRDPQTLEILDITPCSFGGVSVITPGTNTSNQVAVLYQDVNCTEVPVAIHADQLTPTWRVYSTGSNVFQTRAGCLIGAEHVNNSYECDIPIGAGICASYQTQTNSPRRARSVASQSIIAYTMSLGAENSVAYSNNSIAICTNFTISVTTEILPVSMTKTSVDCTMYICGDSTECSNLLLQYGSFCTQLNRALTGIAVEQDKNTQEVFAQVKQIYKTPPIKDFGGFNFSQILPDPSKPSKRSFIEDLLFNKVTLADAGFIKQYGDCLGDIAARDLICAQKFNGLTVLPPLLTDEMIAQYTSALLAGTITSGWTFGAGAALQIPFAMQMAYRFNGIGVTQNVLYENQKLIANQFNSAIGKIQDSLSSTASALGKLQDVVNQNAQALNTLVKQLSSNFGAISSVLNDILSRLDKVEAEVQIDRLITGRLQSLQTYVTQQLIRAAEIRASANLAATKMSECVLGQSKRVDFCGKGYHLMSFPQSAPHGVVFLHVTYVCAQEKNFTTAPAICHDGKAHFPREGVFVSNGTHWFVTQRNFYEPQIITTDNTFVSGNCDVVIGIVNNTVYDPLQPELDS

SEQ ID NO: 3151 - protein, 1141 aa, Artificial Sequence
  SARS-CoV-2/pangolin/Guangxi/P4L/2017__EPI_ISL_410538 spike protein (1-1141)(P709C_P1063C)
MFVFLFVLPLVSSQCVNLTTRTGIPPGYTNSSTRGVYYPDKVFRSSILHLTQDLFLPFFSNVTWFNTINYQGGFKKFDNPVLPFNDGVYFASTEKSNIIRGWIFGTTLDARTQSLLIVNNATNVVIKVCEFQFCTDPFLGVYYHNNNKTWVENEFRVYSSANNCTFEYISQPFLMDLEGKQGNFKNLREFVFKNVDGYFKIYSKHTPIDLVRDLPRGFAALEPLVDLPIGINITRFQTLLALHRSYLTPGNLESGWTTGAAAYYVGYLQQRTFLLSYNQNGTITDAVDCSLDPLSETKCTLKSLTVEKGIYQTSNFRVQPTISIVRFPNITNLCPFGEVFNASKFASVYAWNRKRISNCVADYSVLYNSTSFSTFKCYGVSPTKLNDLCFTNVYADSFVVKGDEVRQIAPGQTGVIADYNYKLPDDFTGCVIAWNSVKQDALTGGNYGYLYRLFRKSKLKPFERDISTEIYQAGSTPCNGQVGLNCYYPLERYGFHPTTGVNYQPFRVVVLSFELLNGPATVCGPKLSTTLVKDKCVNFNFNGLTGTGVLTTSKKQFLPFQQFGRDISDTTDAVRDPQTLEILDITPCSFGGVSVITPGTNTSNQVAVLYQDVNCTEVPMAIHAEQLTPAWRVYSAGANVFQTRAGCLVGAEHVNNSYECDIPVGAGICASYHSMSSLRSVNQRSIIAYTMSLGAENSVAYSNNSIAICTNFTISVTTEILPVSMTKTSVDCTMYICGDSIECSNLLLQYGSFCTQLNRALTGIAVEQDKNTQEVFAQVKQIYKTPPIKDFGGFNFSQILPDPSKPSKRSFIEDLLFNKVTLADAGFIKQYGDCLGDIAARDLICAQKFNGLTVLPPLLTDEMIAQYTSALLAGTITSGWTFGAGAALQIPFAMQMAYRFNGIGVTQNVLYENQKLIANQFNSAIGKIQDSLSSTASALGKLQDVVNQNAQALNTLVKQLSSNFGAISSVLNDILSRLDKVEAEVQIDRLITGRLQSLQTYVTQQLIRAAEIRASANLAATKMSECVLGQSKRVDFCGKGYHLMSFPQSAPHGVVFLHVTYVCAQEKNFTTAPAICHEGKAHFPREGVFVSNGTHWFITQRNFYEPQIITTDNTFVSGSCDVVIGIVNNTVYDPLQPELDS

SEQ ID NO: 3152 - protein, 1141 aa, Artificial Sequence
  SARS-CoV-2/pangolin/Guangxi/P5L/2017__EPI_ISL_410540 spike protein (1-1141)(P709C_P1063C)
MFVFLFVLPLVSSQCVNLTTRTGIPPGYTNSSTRGVYYPDKVFRSSILHLTQDLFLPFFSNVTWFNTINYQGGFKKFDNPVLPFNDGVYFASTEKSNIIRGWIFGTTLDARTQSLLIVNNATNVVIKVCEFQFCTDPFLGVYYHNNNKTWVENEFRVYSSANNCTFEYISQPFLMDLEGKQGNFKNLREFVFKNVDGYFKIYSKHTPIDLVRDLPRGFAALEPLVDLPIGINITRFQTLLALHRSYLTPGKLESGWTTGAAAYYVGYLQQRTFLLSYNQNGTITDAVDCSLDPLSETKCTLKSLTVEKGIYQTSNFRVQPTISIVRFPNITNLCPFGEVFNASKFASVYAWNRKRISNCVADYSVLYNSTSFSTFKCYGVSPTKLNDLCFTNVYADSFVVKGDEVRQIAPGQTGVIADYNYKLPDDFTGCVIAWNSVKQDALTGGNYGYLYRLFRKSKLKPFERDISTEIYQAGSTPCNGQVGLNCYYPLERYGFHPTTGVNYQPFRVVVLSFELLNGPATVCGPKLSTTLVKDKCVNFNFNGLTGTGVLTTSKKQFLPFQQFGRDISDTTDAVRDPQTLEILDITPCSFGGVSVITPGTNTSNQVAVLYQDVNCTEVPMAIHAEQLTPAWRVYSAGANVFQTRAGCLVGAEHVNNSYECDIPVGAGICASYHSMSSFRSVNQRSIIAYTMSLGAENSVAYSNNSIAICTNFTISVTTEILPVSMTKTSVDCTMYICGDSIECSNLLLQYGSFCTQLNRALTGIAVEQDKNTQEVFAQVKQIYKTPPIKDFGGFNFSQILPDPSKPSKRSFIEDLLFNKVTLADAGFIKQYGDCLGDIAARDLICAQKFNGLTVLPPLLTDEMIAQYTSALLAGTITSGWTFGAGAALQIPFAMQMAYRFNGIGVTQNVLYENQKLIANQFNSAIGKIQDSLSSTASALGKLQDVVNQNAQALNTLVKQLSSNFGAISSVLNDILSRLDKVEAEVQIDRLITGRLQSLQTYVTQQLIRAAEIRASANLAATKMSECVLGQSKRVDFCGKGYHLMSFPQSAPHGVVFLHVTYVCAQEKNFTTAPAICHEGKAHFPREGVFVSNGTHWFITQRNFYEPQIITTDNTFVSGSCDVVIGIVNNTVYDPLQPELDS

SEQ ID NO: 3153 - protein, 1141 aa, Artificial Sequence
  SARS-CoV-2/pangolin/Guangxi/P5E/2017__EPI_ISL_410541 spike protein (1-1141)(P709C_P1063C)
MFVFLFVLPLVSSQCVNLTTRTGIPPGYTNSSTRGVYYPDKVFRSSILHLTQDLFLPFFSNVTWFNTITYQGGSKKFDNPVLPFNDGVYFASTEKSNIIRGWIFGTTLDARTQSLLIVNNATNVVIKVCEFQFCTDPFLGVYYHNNNKTWVENEFRVYSSANNCTFEYISQPFLMDLEGKQGNFKNLREFVFKNVDGYFKIYSKHTPIDLVRDLPRGFAALEPLVDLPIGINITRFQTLLALHRSYLTPGKLESGWTTGAAAYYVGYLQQRTFLLSYNQNGTITDAVDCSLDPLSETKCTLKSLTVEKGIYQTSNFRVQPTISIVRFPNITNLCPFGEVFNASKFASVYAWNRKRISNCVADYSVLYNSTSFSTFKCYGVSPTKLNDLCFTNVYADSFVVKGDEVRQIAPGQTGVIADYNYKLPDDFTGCVIAWNSVKQDALTGDNYGYLYRLFRKSKLKPFERDISTEIYQAGSTPCNGQVGLNCYYPLERYGFHPTTGVNYQPFRVVVLSFELLNGPATVCGPKLSTTLVKDKCVNFNFNGLTGTGVLTTSKKQFLPFQQFGRDISDTTDAVRDPQTLEILDITPCSFGGVSVITPGTNTSNQVAVLYQDVNCTEVPMAIHAEQLTPAWRVYSAGANVFQTRAGCLVGAEHVNNSYECDIPVGAGICASYHSMSSFRSVNQRSIIAYTMSLGAENSVAYSNNSIAICTNFTISVTTEILPVSMTKTSVDCTMYICGDSIECSNLLLQYGSFCTQLNRALTGIAVEQDKNTQEVFAQVKQIYKTPPIKDFGGFNFSQILPDPSKPSKRSFIEDLLFNKVTLADAGFIKQYGDCLGDIAARDLICAQKFNGLTVLPPLLTDEMIAQYTSALLAGTITSGWTFGAGAALQIPFAMQMAYRFNGIGVTQNVLYENQKLIANQFNSAIGKIQDSLSSTASALGKLQDVVNQNAQALNTLVKQLSSNFGAISSVLNDILSRLDKVEAEVQIDRLITGRLQSLQTYVTQQLIRAAEIRASANLAATKMSECVLGQSKRVDFCGKGYHLMSFPQSAPHGVVFLHVTYVCAQEKNFTTAPAICHEGKAHFPREGVFVSNGTHWFITQRNFYEPQIITTDNTFVSGSCDVVIGIVNNTVYDPLQPELDS

SEQ ID NO: 3154 - protein, 1139 aa, Artificial Sequence
  SARS-CoV-2/pangolin/Guangxi/P1E/2017__EPI_ISL_410539 spike protein (1-1139)(P707C_P1061C)
MFVFLFVLPLVSSQCVNLTTRTGIQPGYTNSSTRGVYYPDKVFRSSILHLTQDLFLPFFSNVTWFNTINYQGGFKKFDNPVLPFNDGVYFASTEKSNIIRGWIFGTTLDARTQSLLIVNNATNVVIKVCEFQFCTDPFLGVYYHNNNKTWVENEFRVYSSANNCTFEYISQPFLMDLEGKQGNFKNLREFVFKNVDGYFKIYSKHTPIDLVRDLPRGFAALEPLVDLPIGINITRFQTLLALHRSYLTPGKLESGWTTGAAAYYVGYLQQRTFLLSYNQNGTITDAVDCSLDPLSETKCTLKSLTVEKGIYQTSNFRVQPTISIVRFPNITNLCPFGEVFNASKFASVYAWNRKRISNCVADYSVLYNSTSFSTFKCYGVSPTKLNDLCFTNVYADSFVVKGDEVRQIAPGQTGVIADYNYKLPDDFTGCVIAWNSVKQDALTGGNYLYRLFRKSKLKPFERDISTEIYQAGSTPCNGQVGLNCYYPLERYGFHPTTGVNYQPFRVVVLSFELLNGPATVCGPKLSTTLVKDKCVNFNFNGLTGTGVLTTSKKQFLPFQQFGRDISDTTDAVRDPQTLEILDITPCSFGGVSVITPGTNTSNQVAVLYQDVNCTEVPMAIHAEQLTPAWRVYSAGANVFQTRAGCLVGAEHVNNSYECDIPVGAGICASYHSMSSLRSVNQRSIIAYTMSLGAENSVAYSNNSIAICTNFTISVTTEILPVSMTKTSVDCTMYICGDSIECSNLLLQYGSFCTQLNRALTGIAVEQDKNTQEVFAQVKQIYKTPPIKDFGGFNFSQILPDPSKPSKRSFIEDLLFNKVTLADAGFIKQYGDCLGDIAARDLICAQKFNGLTVLPPLLTDEMIAQYTSALLAGTITSGWTFGAGAALQIPFAMQMAYRFNGIGVTQNVLYENQKLIANQFNSAIGKIQDSLSSTASALGKLQDVVNQNAQALNTLVKQLSSNFGAISSVLNDILSRLDKVEAEVQIDRLITGRLQSLQTYVTQQLIRAAEIRASANLAATKMSECVLGQSKRVDFCGKGYHLMSFPQSAPHGVVFLHVTYVCAQEKNFTTAPAICHEGKAHFPREGVFVSNGTHWFITQRNFYEPQIITTDNTFVSGSCDVVIGIVNNTVYDPLQPELDS

SEQ ID NO: 3155 - protein, 1147 aa, Artificial Sequence
  SARS-CoV-2/Wuhan/WIV05/2019__EPI_ISL_402128 spike protein (1-1147)(G889C_L1034C)
MFVFLVLLPLVSSQCVNLTTRTQLPPAYTNSFTRGVYYPDKVFRSSVLHSTQDLFLPFFSNVTWFHAIHVSGTNGTKRFDNPVLPFNDGVYFASTEKSNIIRGWIFGTTLDSKTQSLLIVNNATNVVIKVCEFQFCNDPFLGVYYHKNNKSWMESEFRVYSSANNCTFEYVSQPFLMDLEGKQGNFKNLREFVFKNIDGYFKIYSKHTPINLVRDLPQGFSALEPLVDLPIGINITRFQTLLALHRSYLTPGDSSSGWTAGAAAYYVGYLQPRTFLLKYNENGTITDAVDCALDPLSETKCTLKSFTVEKGIYQTSNFRVQPTESIVRFPNITNLCPFGEVFNATRFASVYAWNRKRISNCVADYSVLYNSASFSTFKCYGVSPTKLNDLCFTNVYADSFVIRGDEVRQIAPGQTGKIADYNYKLPDDFTGCVIAWNSNNLDSKVGGNYNYLYRLFRKSNLKPFERDISTEIYQAGSTPCNGVEGFNCYFPLQSYGFQPTNGVGYQPYRVVVLSFELLHAPATVCGPKKSTNLVKNKCVNFNFNGLTGTGVLTESNKKFLPFQQFGRDIADTTDAVRDPQTLEILDITPCSFGGVSVITPGTNTSNQVAVLYQDVNCTEVPVAIHADQLTPTWRVYSTGSNVFQTRAGCLIGAEHVNNSYECDIPIGAGICASYQTQTNSPRRARSVASQSIIAYTMSLGAENSVAYSNNSIAIPTNFTISVTTEILPVSMTKTSVDCTMYICGDSTECSNLLLQYGSFCTQLNRALTGIAVEQDKNTQEVFAQVKQIYKTPPIKDFGGFNFSQILPDPSKPSKRSFIEDLLFNKVTLADAGFIKQYGDCLGDIAARDLICAQKFNGLTVLPPLLTDEMIAQYTSALLAGTITSGWTFCAGAALQIPFAMQMAYRFNGIGVTQNVLYENQKLIANQFNSAIGKIQDSLSSTASALGKLQDVVNQNAQALNTLVKQLSSNFGAISSVLNDILSRLDKVEAEVQIDRLITGRLQSLQTYVTQQLIRAAEIRASANLAATKMSECVCGQSKRVDFCGKGYHLMSFPQSAPHGVVFLHVTYVPAQEKNFTTAPAICHDGKAHFPREGVFVSNGTHWFVTQRNFYEPQIITTDNTFVSGNCDVVIGIVNNTVYDPLQPELDS

SEQ ID NO: 3156 - protein, 1143 aa, Artificial Sequence
  SARS-CoV-2/bat/Yunnan/RaTG13/2013__EPI_ISL_402131 spike protein (1-1143)(G885C_L1030C)
MFVFLVLLPLVSSQCVNLTTRTQLPPAYTNSSTRGVYYPDKVFRSSVLHLTQDLFLPFFSNVTWFHAIHVSGTNGIKRFDNPVLPFNDGVYFASTEKSNIIRGWIFGTTLDSKTQSLLIVNNATNVVIKVCEFQFCNDPFLGVYYHKNNKSWMESEFRVYSSANNCTFEYVSQPFLMDLEGKQGNFKNLREFVFKNIDGYFKIYSKHTPINLVRDLPPGFSALEPLVDLPIGINITRFQTLLALHRSYLTPGDSSSGWTAGAAAYYVGYLQPRTFLLKYNENGTITDAVDCALDPLSETKCTLKSFTVEKGIYQTSNFRVQPTDSIVRFPNITNLCPFGEVFNATTFASVYAWNRKRISNCVADYSVLYNSTSFSTFKCYGVSPTKLNDLCFTNVYADSFVITGDEVRQIAPGQTGKIADYNYKLPDDFTGCVIAWNSKHIDAKEGGNFNYLYRLFRKANLKPFERDISTEIYQAGSKPCNGQTGLNCYYPLYRYGFYPTDGVGHQPYRVVVLSFELLNAPATVCGPKKSTNLVKNKCVNFNFNGLTGTGVLTESNKKFLPFQQFGRDIADTTDAVRDPQTLEILDITPCSFGGVSVITPGTNASNQVAVLYQDVNCTEVPVAIHADQLTPTWRVYSTGSNVFQTRAGCLIGAEHVNNSYECDIPIGAGICASYQTQTNSRSVASQSIIAYTMSLGAENSVAYSNNSIAIPTNFTISVTTEILPVSMTKTSVDCTMYICGDSTECSNLLLQYGSFCTQLNRALTGIAVEQDKNTQEVFAQVKQIYKTPPIKDFGGFNFSQILPDPSKPSKRSFIEDLLFNKVTLADAGFIKQYGDCLGDIAARDLICAQKFNGLTVLPPLLTDEMIAQYTSALLAGTITSGWTFCAGAALQIPFAMQMAYRFNGIGVTQNVLYENQKLIANQFNSAIGKIQDSLSSTASALGKLQDVVNQNAQALNTLVKQLSSNFGAISSVLNDILSRLDKVEAEVQIDRLITGRLQSLQTYVTQQLIRAAEIRASANLAATKMSECVCGQSKRVDFCGKGYHLMSFPQSAPHGVVFLHVTYVPAQEKNFTTAPAICHDGKAHFPREGVFVSNGTHWFVTQRNFYEPQIITTDNTFVSGSCDVVIGIVNNTVYDPLQPELDS

SEQ ID NO: 3157 - protein, 1147 aa, Artificial Sequence
  SARS-CoV-2/Wuhan/HBCDC-HB-01/2019__EPI_ISL_402132 spike protein (1-1147)(G889C_L1034C)
MFVFLVLLPLVSSQCVNLTTRTQLPPAYTNSITRGVYYPDKVFRSSVLHSTQDLFLPFFSNVTWFHAIHVSGTNGTKRFDNPVLPFNDGVYFASTEKSNIIRGWIFGTTLDSKTQSLLIVNNATNVVIKVCEFQFCNDPFLGVYYHKNNKSWMESEFRVYSSANNCTFEYVSQPFLMDLEGKQGNFKNLREFVFKNIDGYFKIYSKHTPINLVRDLPQGFSALEPLVDLPIGINITRFQTLLALHRSYLTPGDSSSGWTAGAAAYYVGYLQPRTFLLKYNENGTITDAVDCALDPLSETKCTLKSFTVEKGIYQTSNFRVQPTESIVRFPNITNLCPFGEVFNATRFASVYAWNRKRISNCVADYSVLYNSASFSTFKCYGVSPTKLNDLCFTNVYADSFVIRGDEVRQIAPGQTGKIADYNYKLPDDFTGCVIAWNSNNLDSKVGGNYNYLYRLFRKSNLKPFERDISTEIYQAGSTPCNGVEGFNCYFPLQSYGFQPTNGVGYQPYRVVVLSFELLHAPATVCGPKKSTNLVKNKCVNFNFNGLTGTGVLTESNKKFLPFQQFGRDIADTTDAVRDPQTLEILDITPCSFGGVSVITPGTNTSNQVAVLYQDVNCTEVPVAIHADQLTPTWRVYSTGSNVFQTRAGCLIGAEHVNNSYECDIPIGAGICASYQTQTNSPRRARSVASQSIIAYTMSLGAENSVAYSNNSIAIPTNFTISVTTEILPVSMTKTSVDCTMYICGDSTECSNLLLQYGSFCTQLNRALTGIAVEQDKNTQEVFAQVKQIYKTPPIKDFGGFNFSQILPDPSKPSKRSFIEDLLFNKVTLADAGFIKQYGDCLGDIAARDLICAQKFNGLTVLPPLLTDEMIAQYTSALLAGTITSGWTFCAGAALQIPFAMQMAYRFNGIGVTQNVLYENQKLIANQFNSAIGKIQDSLSSTASALGKLQDVVNQNAQALNTLVKQLSSNFGAISSVLNDILSRLDKVEAEVQIDRLITGRLQSLQTYVTQQLIRAAEIRASANLAATKMSECVCGQSKRVDFCGKGYHLMSFPQSAPHGVVFLHVTYVPAQEKNFTTAPAICHDGKAHFPREGVFVSNGTHWFVTQRNFYEPQIITTDNTFVSGNCDVVIGIVNNTVYDPLQPELDS

SEQ ID NO: 3158 - protein, 1147 aa, Artificial Sequence
  SARS-CoV-2/Guangdong/20SF028/2020__EPI_ISL_403936 spike protein (1-1147)(G889C_L1034C)
MFVFLVLLPLVSSQCVNLTTRTQLPPAYTNSFTRGVYYPDKVFRSSVLYSTQDLFLPFFSNVTWFHAIHVSGTNGTKRFDNPVLPFNDGVYFASTEKSNIIRGWIFGTTLDSKTQSLLIVNNATNVVIKVCEFQFCNDPFLGVYYHKNNKSWMESEFRVYSSANNCTFEYVSQPFLMDLEGKQGNFKNLREFVFKNIDGYFKIYSKHTPINLVRDLPQGFSALEPLVDLPIGINITRFQTLLALHRSYLTPGDSSSGWTAGAAAYYVGYLQPRTFLLKYNENGTITDAVDCALDPLSETKCTLKSFTVEKGIYQTSNFRVQPTESIVRFPNITNLCPFGEVFNATRFASVYAWNRKRISNCVADYSVLYNSASFSTFKCYGVSPTKLNDLCFTNVYADSFVIRGDEVRQIAPGQTGKIADYNYKLPDDFTGCVIAWNSNNLDSKVGGNYNYLYRLFRKSNLKPFERDISTEIYQAGSTPCNGVEGFNCYFPLQSYGFQPTNGVGYQPYRVVVLSFELLHAPATVCGPKKSTNLVKNKCVNFNFNGLTGTGVLTESNKKFLPFQQFGRDIADTTDAVRDPQTLEILDITPCSFGGVSVITPGTNTSNQVAVLYQDVNCTEVPVAIHADQLTPTWRVYSTGSNVFQTRAGCLIGAEHVNNSYECDIPIGAGICASYQTQTNSPRRARSVASQSIIAYTMSLGAENSVAYSNNSIAIPTNFTISVTTEILPVSMTKTSVDCTMYICGDSTECSNLLLQYGSFCTQLNRALTGIAVEQDKNTQEVFAQVKQIYKTPPIKDFGGFNFSQILPDPSKPSKRSFIEDLLFNKVTLADAGFIKQYGDCLGDIAARDLICAQKFNGLTVLPPLLTDEMIAQYTSALLAGTITSGWTFCAGAALQIPFAMQMAYRFNGIGVTQNVLYENQKLIANQFNSAIGKIQDSLSSTASALGKLQDVVNQNAQALNTLVKQLSSNFGAISSVLNDILSRLDKVEAEVQIDRLITGRLQSLQTYVTQQLIRAAEIRASANLAATKMSECVCGQSKRVDFCGKGYHLMSFPQSAPHGVVFLHVTYVPAQEKNFTTAPAICHDGKAHFPREGVFVSNGTHWFVTQRNFYEPQIITTDNTFVSGNCDVVIGIVNNTVYDPLQPELDS

SEQ ID NO: 3159 - protein, 1147 aa, Artificial Sequence
  SARS-CoV-2/Shenzhen/SZTH-001/2020__EPI_ISL_406592 spike protein (1-1147)(G889C_L1034C)
MFVFLVLLPLVSSQCVNLTTRTQLPPAYTNSFTRGVYYPDKVFRSSVLHSTQDLFLPFFSNVTWFHAIHVSGTNGTKRFDNPVLPFNDGVYFASTEKSNIIRGWIFGTTLDSKTQSLLIVNNATNVVIKVCEFQFCNDPFLGVYYHKNNKSWMESEFRVYSSANNCTFEYVSQPFLMDLEGKQGNFKNLREFVFKNIDGYFKIYSKHTPINLVRDLPQGFSALEPLVDLPIGINITRFQTLLALHRSYLTPGDSSSGWTAGAAAYYVGYLQPRTFLLKYNENGTITDAVDCALDPLSETKCTLKSFTVEKGIYQTSNFRVQPTESIVRFPNITNLCPFGEVFNATRFASVYAWNRKRISNCVADYSVLYNSASFSTFKCYGVSPTKLNDLCFTNVYADSFVIRGDEVRQIAPGQTGKIADYNYKLPDDFTGCVIAWNSNNLDSKVGGNYNYLYRLFRKSNLKPFERDISTEIYQAGSTPCNGVEGFNCYFPLQSYGFQPTNGVGYQPYRVVVLSFELLHAPATVCGPKKSTNLVKNKCVNFNFNGLTGTGVLTESNKKFLPFQQFGRDIADTTDAVRDPQTLEILDITPCSFGGVSVITPGTNTSNQVAVLYQDVNCTEVPVAIHADQLTPTWRVYSTGSNVFQTRAGCLIGAEHVNNSYECDIPIGAGICASYQTQTNSPRRARSVASQSIIAYTMSLGAENSVAYSNNSIAIPTNFTISVTTEILPVSMTKTSVDCTMYICGDSTECSNLLLQYGSFCTQLNRALTGIAVEQDKNTQEVFAQVKQIYKTPPIKDFGGFNFSQILPDPSKPSKRSFIEDLLFNKVTLADAGFIKQYGDCLGDIAARDLICAQKFNGLTVLPPLLTDEMIAQYTSALLAGTITSGWTFCAGAALQIPFAMQMAYRFNGIGVTQNVLYENQKLIANQFNSAIGKIQDSLSSTASALGKLQDVVNQNAQALNTLVKQLSSNFGAISSVLNDILSRLDKVEAEVQIDRLITGRLQSLQTYVTQQLIRAAEIRASANLAATKMSECVCGQSKRVDFCGKGYHLMSFPQSAPHGVVFLHVTYVPAQEKNFTTAPAICHDGKAHFPREGVFVSNGTHWFVTQRNFYEPQIITTDNTFVSGNCDVLIGIVNNTVYDPLQPELDS

SEQ ID NO: 3160 - protein, 1147 aa, Artificial Sequence
  SARS-CoV-2/Shenzhen/SZTH-004/2020__EPI_ISL_406595 spike protein (1-1147)(G889C_L1034C)
MFVFLVLLPLVSSQCVNLTTRTQLPPAYTNSFTRGVYYPDKVFRSSVLHSTQDLFLPFFSNVTWFHAIHVSGTNGTKRFDNPVLPFNDGVYFASTEKSNIIRGWIFGTTLDSKTQSLLIVNNATNVVIKVCEFQFCNDPFLGVYYHKNNKSWMESEFRVYSSANNCTFEYVSQPFLMDLEGKQGNFKNLREFVFKNIDGYFKIYSKHTPINLVRDLPQGFSALEPLVDLPIGINITRFQTLLALHRSYLTPGDSSSGWTAGAAAYYVGYLQPRTFLLKYNENGTITDAVDCALDPLSETKCTLKSFTVEKGIYQTSNFRVQPTESIVRFPNITNLCPFGEVFNATRFASVYAWDRKRISNCVAYYSVLYNSASFSTFKCYGVSPTKLNDLCFTNVYADSFVIRGDEVRQIAPGQTGKIADYNYKLPDDFTGCVIAWNSNNLDSKVGGNYNYLYRLFRKSNLKPFERDISTEIYQAGSTPCNGVEGFNCYFPLQSYGFQPTNGVGYQPYRVVVLSFELLHAPATVCGPKKSTNLVKNKCVNFNFNGLTGTGVLTESNKKFLPFQQFGRDIADTTDAVRDPQTLEILDITPCSFGGVSVITPGTNTSNQVAVLYQDVNCTEVPVAIHADQLTPTWRVYSTGSNVFQTRAGCLIGAEHVNNSYECDIPIGAGICASYQTQTNSPRRARSVASQSIIAYTMSLGAENSVAYSNNSIAIPTNFTISVTTEILPVSMTKTSVDCTMYICGDSTECSNLLLQYGSFCTQLNRALTGIAVEQDKNTQEVFAQVKQIYKTPPIKDFGGFNFSQILPDPSKPSKRSFIEDLLFNKVTLADAGFIKQYGDCLGDIAARDLICAQKFNGLTVLPPLLTDEMIAQYTSALLAGTITSGWTFCAGAALQIPFAMQMAYRFNGIGVTQNVLYENQKLIANQFNSAIGKIQDSLSSTASALGKLQDVVNQNAQALNTLVKQLSSNFGAISSVLNDILSRLDKVEAEVQIDRLITGRLQSLQTYVTQQLIRAAEIRASANLAATKMSECVCGQSKRVDFCGKGYHLMSFPQSAPHGVVFLHVTYVPAQEKNFTTAPAICHDGKAHFPREGVFVSNGTHWFVTQRNFYEPQIITTDNTFVSGNCDVVIGIVNNTVYDPLQPELDS

SEQ ID NO: 3161 - protein, 1147 aa, Artificial Sequence
  SARS-CoV-2/France/IDF0372/2020__EPI_ISL_406596 spike protein (1-1147)(G889C_L1034C)
MFVFLVLLPLVSSQCVNLTTRTQLPPAYTNSFTRGVYYPDKVFRSSVLHSTQDLFLPFFSNVTWFHAIHVSGTNGTKRFDNPVLPFNDGVYFASTEKSNIIRGWIFGTTLDSKTQSLLIVNNATNVVIKVCEFQFCNDPFLGVYYHKNNKSWMESEFRVYSSANNCTFEYVSQPFLMDLEGKQGNFKNLREFVFKNIDGYFKIYSKHTPINLVRDLPQGFSALEPLVDLPIGINITRFQTLLALHRSYLTPGDSSSGWTAGAAAYYVGYLQPRTFLLKYNENGTITDAVDCALDPLSETKCTLKSFTVEKGIYQTSNFRVQPTESIVRFPNITNLCPFGEVFNATRFASVYAWNRKRISNCVADYSFLYNSASFSTFKCYGVSPTKLNDLCFTNVYADSFVIRGDEVRQIAPGQTGKIADYNYKLPDDFTGCVIAWNSNNLDSKVGGNYNYLYRLFRKSNLKPFERDISTEIYQAGSTPCNGVEGFNCYFPLQSYGFQPTNGVGYQPYRVVVLSFELLHAPATVCGPKKSTNLVKNKCVNFNFNGLTGTGVLTESNKKFLPFQQFGRDIADTTDAVRDPQTLEILDITPCSFGGVSVITPGTNTSNQVAVLYQDVNCTEVPVAIHADQLTPTWRVYSTGSNVFQTRAGCLIGAEHVNNSYECDIPIGAGICASYQTQTNSPRRARSVASQSIIAYTMSLGAENSVAYSNNSIAIPTNFTISVTTEILPVSMTKTSVDCTMYICGDSTECSNLLLQYGSFCTQLNRALTGIAVEQDKNTQEVFAQVKQIYKTPPIKDFGGFNFSQILPDPSKPSKRSFIEDLLFNKVTLADAGFIKQYGDCLGDIAARDLICAQKFNGLTVLPPLLTDEMIAQYTSALLAGTITSGWTFCAGAALQIPFAMQMAYRFNGIGVTQNVLYENQKLIANQFNSAIGKIQDSLSSTASALGKLQDVVNQNAQALNTLVKQLSSNFGAISSVLNDILSRLDKVEAEVQIDRLITGRLQSLQTYVTQQLIRAAEIRASANLAATKMSECVCGQSKRVDFCGKGYHLMSFPQSAPHGVVFLHVTYVPAQEKNFTTAPAICHDGKAHFPREGVFVSNGTHWFVTQRNFYEPQIITTDNTFVSGNCDVVIGIVNNTVYDPLQPELDS

SEQ ID NO: 3162 - protein, 1147 aa, Artificial Sequence
  SARS-CoV-2/Australia/VIC01/2020__EPI_ISL_406844 spike protein (1-1147)(G889C_L1034C)
MFVFLVLLPLVSSQCVNLTTRTQLPPAYTNSFTRGVYYPDKVFRSSVLHSTQDLFLPFFSNVTWFHAIHVSGTNGTKRFDNPVLPFNDGVYFASTEKSNIIRGWIFGTTLDSKTQSLLIVNNATNVVIKVCEFQFCNDPFLGVYYHKNNKSWMESEFRVYSSANNCTFEYVSQPFLMDLEGKQGNFKNLREFVFKNIDGYFKIYSKHTPINLVRDLPQGFSALEPLVDLPIGINITRFQTLLALHRRYLTPGDSSSGWTAGAAAYYVGYLQPRTFLLKYNENGTITDAVDCALDPLSETKCTLKSFTVEKGIYQTSNFRVQPTESIVRFPNITNLCPFGEVFNATRFASVYAWNRKRISNCVADYSVLYNSASFSTFKCYGVSPTKLNDLCFTNVYADSFVIRGDEVRQIAPGQTGKIADYNYKLPDDFTGCVIAWNSNNLDSKVGGNYNYLYRLFRKSNLKPFERDISTEIYQAGSTPCNGVEGFNCYFPLQSYGFQPTNGVGYQPYRVVVLSFELLHAPATVCGPKKSTNLVKNKCVNFNFNGLTGTGVLTESNKKFLPFQQFGRDIADTTDAVRDPQTLEILDITPCSFGGVSVITPGTNTSNQVAVLYQDVNCTEVPVAIHADQLTPTWRVYSTGSNVFQTRAGCLIGAEHVNNSYECDIPIGAGICASYQTQTNSPRRARSVASQSIIAYTMSLGAENSVAYSNNSIAIPTNFTISVTTEILPVSMTKTSVDCTMYICGDSTECSNLLLQYGSFCTQLNRALTGIAVEQDKNTQEVFAQVKQIYKTPPIKDFGGFNFSQILPDPSKPSKRSFIEDLLFNKVTLADAGFIKQYGDCLGDIAARDLICAQKFNGLTVLPPLLTDEMIAQYTSALLAGTITSGWTFCAGAALQIPFAMQMAYRFNGIGVTQNVLYENQKLIANQFNSAIGKIQDSLSSTASALGKLQDVVNQNAQALNTLVKQLSSNFGAISSVLNDILSRLDKVEAEVQIDRLITGRLQSLQTYVTQQLIRAAEIRASANLAATKMSECVCGQSKRVDFCGKGYHLMSFPQSAPHGVVFLHVTYVPAQEKNFTTAPAICHDGKAHFPREGVFVSNGTHWFVTQRNFYEPQIITTDNTFVSGNCDVVIGIVNNTVYDPLQPELDS

SEQ ID NO: 3163 - protein, 1147 aa, Artificial Sequence
  SARS-CoV-2/Germany/BavPat1/2020__EPI_ISL_406862 spike protein (1-1147)(G889C_L1034C)
MFVFLVLLPLVSSQCVNLTTRTQLPPAYTNSFTRGVYYPDKVFRSSVLHSTQDLFLPFFSNVTWFHAIHVSGTNGTKRFDNPVLPFNDGVYFASTEKSNIIRGWIFGTTLDSKTQSLLIVNNATNVVIKVCEFQFCNDPFLGVYYHKNNKSWMESEFRVYSSANNCTFEYVSQPFLMDLEGKQGNFKNLREFVFKNIDGYFKIYSKHTPINLVRDLPQGFSALEPLVDLPIGINITRFQTLLALHRSYLTPGDSSSGWTAGAAAYYVGYLQPRTFLLKYNENGTITDAVDCALDPLSETKCTLKSFTVEKGIYQTSNFRVQPTESIVRFPNITNLCPFGEVFNATRFASVYAWNRKRISNCVADYSVLYNSASFSTFKCYGVSPTKLNDLCFTNVYADSFVIRGDEVRQIAPGQTGKIADYNYKLPDDFTGCVIAWNSNNLDSKVGGNYNYLYRLFRKSNLKPFERDISTEIYQAGSTPCNGVEGFNCYFPLQSYGFQPTNGVGYQPYRVVVLSFELLHAPATVCGPKKSTNLVKNKCVNFNFNGLTGTGVLTESNKKFLPFQQFGRDIADTTDAVRDPQTLEILDITPCSFGGVSVITPGTNTSNQVAVLYQGVNCTEVPVAIHADQLTPTWRVYSTGSNVFQTRAGCLIGAEHVNNSYECDIPIGAGICASYQTQTNSPRRARSVASQSIIAYTMSLGAENSVAYSNNSIAIPTNFTISVTTEILPVSMTKTSVDCTMYICGDSTECSNLLLQYGSFCTQLNRALTGIAVEQDKNTQEVFAQVKQIYKTPPIKDFGGFNFSQILPDPSKPSKRSFIEDLLFNKVTLADAGFIKQYGDCLGDIAARDLICAQKFNGLTVLPPLLTDEMIAQYTSALLAGTITSGWTFCAGAALQIPFAMQMAYRFNGIGVTQNVLYENQKLIANQFNSAIGKIQDSLSSTASALGKLQDVVNQNAQALNTLVKQLSSNFGAISSVLNDILSRLDKVEAEVQIDRLITGRLQSLQTYVTQQLIRAAEIRASANLAATKMSECVCGQSKRVDFCGKGYHLMSFPQSAPHGVVFLHVTYVPAQEKNFTTAPAICHDGKAHFPREGVFVSNGTHWFVTQRNFYEPQIITTDNTFVSGNCDVVIGIVNNTVYDPLQPELDS

SEQ ID NO: 3164 - protein, 1147 aa, Artificial Sequence
  SARS-CoV-2/Wuhan/HBCDC-HB-02/2020__EPI_ISL_412978 spike protein (1-1147)(G889C_L1034C)
MFVFLVLLPLVSSQCVNLTTRTQLPPAYTNSFTRGVYYPDKVFRSSVLHSTQDLFLPFFSNVTWFHAIHVSGTNGTKRFDNPVLPFNDGVYFASTEKSNIIRGWIFGTTLDSKTQSLLIVNNATNVVIKVCEFQFCNDPFLGVYYHKNNKSWMESEFRVYSSANNCTFEYVSQPFLMDLEGKQGNFKNLREFVFKNIDGYFKIYSKHTPINLVRDLPQGFSALEPLVDLPIGINITRFQTLLALHRSYLTPGDSSSGWTAGAAAYYVGYLQPRTFLLKYNENGTITDAVDCALDPLSETKCTLKSFTVEKGIYQTSNFRVQPTESIVRFPNITNLCPFGEVFNATRFASVYAWNRKRISNCVADYSVLYNSASFSTFKCYGVSPTKLNDLCFTNVYADSFVIRGDEVRQIAPGQTGKIADYNYKLPDDFTGCVIAWNSNNLDSKVGGNYNYLYRLFRKSNLKPFERDISTEIYQAGSTPCNGVEGFNCYFPLQSYGFQPTNGVGYQPYRVVVLSFELLHAPATVCGPKKSTNLVKNKCVNFNFNGLTGTGVLTESNKKFLPFQQFGRDIADTTDAVRDPQTLEILDITPCSFGGVSVITPGTNTSNQVAVLYQDVNCTEVPVAIHADQLTPTWRVYSTGSNVFQTRAGCLIGAEHVNNSYECDIPIGAGICASYQTQTNSPRRARSVASQSIIAYTMSLGAENSVAYSNNSIAIPTNFTISVTTEILPVSMTKTSVDCTMYICGDSTECSNFLLQYGSFCTQLNRALTGIAVEQDKNTQEVFAQVKQIYKTPPIKDFGGFNFSQILPDPSKPSKRSFIEDLLFNKVTLADAGFIKQYGDCLGDIAARDLICAQKFNGLTVLPPLLTDEMIAQYTSALLAGTITSGWTFCAGAALQIPFAMQMAYRFNGIGVTQNVLYENQKLIANQFNSAIGKIQDSLSSTASALGKLQDVVNQNAQALNTLVKQLSSNFGAISSVLNDILSRLDKVEAEVQIDRLITGRLQSLQTYVTQQLIRAAEIRASANLAATKMSECVCGQSKRVDFCGKGYHLMSFPQSAPHGVVFLHVTYVPAQEKNFTTAPAICHDGKAHFPREGVFVSNGTHWFVTQRNFYEPQIITTDNTFVSGNCDVVIGIVNNTVYDPLQPELDS

SEQ ID NO: 3165 - protein, 1147 aa, Artificial Sequence
  SARS-CoV-2/Australia/QLD02/2020__EPI_ISL_407896 spike protein (1-1147)(G889C_L1034C)
MFVFLVLLPLVSSQCVNLTTRTQLPPAYTNSFTRGVYYPDKVFRSSVLHSTQDLFLPFFSNVTWFHAIHVSGTNGTKRFDNPVLPFNDGVYFASTEKSNIIRGWIFGTTLDSKTQSLLIVNNATNVVIKVCEFQFCNDPFLGVYYHKNNKSWMESEFRVYSSANNCTFEYVSQPFLMDLEGKQGNFKNLREFVFKNIDGYFKIYSKHTPINLVRDLPQGFSALEPLVDLPIGINITRFQTLLALHRSYLTPGDSSSGWTAGAAAYYVGYLQPRTFLLKYNENGTITDAVDCALDPLSETKCTLKSFTVEKGIYQTSNFRVQPTESIVRFPNITNLCPFGEVFNATRFASVYAWNRKRISNCVADYSVLYNSASFSTFKCYGVSPTKLNDLCFTNVYADSFVIRGDEVRQIAPGQTGKIADYNYKLPDDFTGCVIAWNSNNLDSKVGGNYNYLYRLFRKSNLKPFERDISTEIYQAGSTPCNGVEGFNCYFPLQSYGFQPTNGVGYQPYRVVVLSFELLHAPATVCGPKKSTNLVKNKCVNFNFNGLTGTGVLTESNKKFLPFQQFGRDIADTTDAVRDPQTLEILDITPCSFGGVSVITPGTNTSNQVAVLYQDVNCTEVPVAIHADQLTPTWRVYSTGSNVFQTRAGCLIGAEHVNNSYECDIPIGAGICASYQTQTNSPRRARSVASQSIIAYTMSLGAENSVAYSNNSIAIPTNFTISVTTEILPVSMTKTSVDCTMYICGDSTECSNLLLQYGSFCTQLNRALTGIAVEQDKNTQEVFAQVKQIYKTPPIKDFGGFNFSQILPDPSKPSKRSFIEDLLFNKVTLADAGFIKQYGDCLGDIAARDLICAQKFNGLTVLPPLLTDEMIAQYTSALLAGTITSGWTFCAGAALQIPFAMQMAYRFNGIGVTQNVLYENQKLIANQFNSAIGKIQDSLSSTASALGKLQDVVNQNAQALNTLVKQLSSNFGAISSVLNDILSRLDKVEAEVQIDRLITGRLQSLQTYVTQQLIRAAEIRASANLAATKMSECVCGQSKRVDFCGKGYHLMSFPQSAPHGVVFLHVTYVPAQEKNFTTAPAICHDGKAHFPREGVFVSNGTHWFVTQRNFYEPQIITTDNTFVSGNCDVVIGIVNNTVYDPLQLELDS

SEQ ID NO: 3166 - protein, 1147 aa, Artificial Sequence
  SARS-CoV-2/India/1-31/2020__EPI_ISL_413523 spike protein (1-1147)(G889C_L1034C)
MFVFLVLLPLVSSQCVNLTTRTQLPPAYTNSFTRGVYYPDKVFRSSVLHSTQDLFLPFFSNVTWFHAIHVSGTNGTKRFDNPVLPFNDGVYFASTEKSNIIRGWIFGTTLDSKTQSLLIVNNATNVVIKVCEFQFCNDPFLGVYYHKNNKSWMESEFRVYSSANNCTFEYVSQPFLMDLEGKQGNFKNLREFVFKNIDGYFKIYSKHTPINLVRDLPQGFSALEPLVDLPIGINITRFQTLLALHRSYLTPGDSSSGWTAGAAAYYVGYLQPRTFLLKYNENGTITDAVDCALDPLSETKCTLKSFTVEKGIYQTSNFRVQPTESIVRFPNITNLCPFGEVFNATRFASVYAWNRKRISNCVADYSVLYNSASFSTFKCYGVSPTKLNDLCFTNVYADSFVIRGDEVRQIAPGQTGKIADYNYKLPDDFTGCVIAWNSNNLDSKVGGNYNYLYRLFRKSNLKPFERDISTEIYQAGSTPCNGVEGFNCYFPLQSYGFQPTNGVGYQPYRVVVLSFELLHAPATVCGPKKSTNLVKNKCVNFNFNGLTGTGVLTESNKKFLPFQQFGRDIADTTDAVRDPQTLEILDITPCSFGGVSVITPGTNTSNQVAVLYQDVNCTEVPVAIHADQLTPTWRVYSTGSNVFQTRAGCLIGAEHVNNSYECDIPIGAGICASYQTQTNSPRRARSVASQSIIAYTMSLGAENSVAYSNNSIAIPTNFTISVTTEILPVSMTKTSVDCTMYICGDSTECSNLLLQYGSFCTQLNRALTGIAVEQDKNTQEVFAQVKQIYKTPPIKDFGGFNFSQILPDPSKPSKRSFIEDLLFNKVTLADAGFIKQYGDCLGDIAARDLICAQKFNGLTVLPPLLTDEMIAQYTSALLAGTITSGWTFCAGAALQIPFAMQMAYRFNGIGVTQNVLYENQKLIANQFNSVIGKIQDSLSSTASALGKLQDVVNQNAQALNTLVKQLSSNFGAISSVLNDILSRLDKVEAEVQIDRLITGRLQSLQTYVTQQLIRAAEIRASANLAATKMSECVCGQSKRVDFCGKGYHLMSFPQSAPHGVVFLHVTYVPAQEKNFTTAPAICHDGKAHFPREGVFVSNGTHWFVTQRNFYEPQIITTDNTFVSGNCDVVIGIVNNTVYDPLQPELDS

SEQ ID NO: 3167 - protein, 1147 aa, Artificial Sequence
  SARS-CoV-2/Guangdong/GD2020087-P0008/2020__EPI_ISL_413863 spike protein (1-1147)(G889C_L1034C)
MFVFLVLLPLVSSQCVNLTTRTQLPPAYTNSFTRGVYYPDKVFRSSVLHSTQDLFLPFFSNVTWFHAIHVSGTNGTKRFDNPVLPFNDGVYFASTEKSNIIRGWIFGTTLDSKTQSLLIVNNATNVVIKVCEFQFCNDPFLGVYYHKNNKSWMESEFRVYSSANNCTFEYVSQPFLMDLEGKQGNFKNLREFVFKNIDGYFKIYSKHTPINLVRDLPQGFSALEPLVDLPIGINITRFQTLLALHRSYLTPGDSSSGWTAGAAAYYVGYLQPRTFLLKYNENGTITDAVDCALDPLSETKCTLKSFTVEKGIYQTSNFRVQPTESIVRFPNITNLCPFGEVFNATRFASVYAWNRKRISNCVADYSVLYNSASFSTFKCYGVSPTKLNDLCFTNVYADSFVIRGDEVREIAPGQTGKIADYNYKLPDDFTGCVIAWNSNNLDSKVGGNYNYLYRLFRKSNLKPFERDISTEIYQAGSTPCNGVEGFNCYFPLQSYGFQPTNGVGYQPYRVVVLSFELLHAPATVCGPKKSTNLVKNKCVNFNFNGLTGTGVLTESNKKFLPFQQFGRDIADTTDAVRDPQTLEILDITPCSFGGVSVITPGTNTSNQVAVLYQDVNCTEVPVAIHADQLTPTWRVYSTGSNVFQTRAGCLIGAEHVNNSYECDIPIGAGICASYQTQTNSPRRARSVASQSIIAYTMSLGAENSVAYSNNSIAIPTNFTISVTTEILPVSMTKTSVDCTMYICGDSTECSNLLLQYGSFCTQLNRALTGIAVEQDKNTQEVFAQVKQIYKTPPIKDFGGFNFSQILPDPSKPSKRSFIEDLLFNKVTLADAGFIKQYGDCLGDIAARDLICAQKFNGLTVLPPLLTDEMIAQYTSALLAGTITSGWTFCAGAALQIPFAMQMAYRFNGIGVTQNVLYENQKLIANQFNSAIGKIQDSLSSTASALGKLQDVVNQNAQALNTLVKQLSSNFGAISSVLNDILSRLDKVEAEVQIDRLITGRLQSLQTYVTQQLIRAAEIRASANLAATKMSECVCGQSKRVDFCGKGYHLMSFPQSAPHGVVFLHVTYVPAQEKNFTTAPAICHDGKAHFPREGVFVSNGTHWFVTQRNFYEPQIITTDNTFVSGNCDVVIGIVNNTVYDPLQPELDS

SEQ ID NO: 3168 - protein, 1147 aa, Artificial Sequence
  SARS-CoV-2/Sweden/01/2020__EPI_ISL_411951 spike protein (1-1147)(G889C_L1034C)
MFVFLVLLPLVSSQCVNLTTRTQLPPAYTNSFTRGVYYPDKVFRSSVLHSTQDLFLPFFSNVTWFHAIHVSGTNGTKRFDNPVLPFNDGVYFASTEKSNIIRGWIFGTTLDSKTQSLLIVNNATNVVIKVCEFQFCNDPFLGVYYHKNNKSWMESEFRVYSSANNCTFEYVSQPFLMDLEGKQGNFKNLREFVFKNIDGYFKIYSKHTPINLVRDLPQGFSALEPLVDLPIGINITRFQTLLALHRSYLTPGDSSSGWTAGAAAYYVGYLQPRTFLLKYNENGTITDAVDCALDPLSETKCTLKSFTVEKGIYQTSNFRVQPTESIVRFPNITNLCPFGEVFNATRFASVYAWNRKRISNCVADYSVLYNSASFSTFKCYGVSPTKLNDLCFTNVYADSFVIRGDEVRQIAPGQTGKIADYNYKLPDDFTGCVIAWNSNNLDSKVGGNYNYLYRLFRKSNLKPFERDISTEIYQAGSTPCNGVEGFNCYFPLQSYGFQPTNGVGYQPYRVVVLSFELLHAPATVCGPKKSTNLVKNKCVNFNFNGLTGTGVLTESNKKFLPFQQFGRDIADTTDAVRDPQTLEILDITPCSFGGVSVITPGTNTSNQVAVLYQDVNCTEVPVAIHADQLTPTWRVYSTGSNVFQTRAGCLIGAEHVNNSYECDIPIGAGICASYQTQTNSPRRARSVASQSIIAYTMSLGAENSVAYSNNSIAIPTNFTISVTTEILPVSMTKTSVDCTMYICGDSTECSNLLLQYGSFCTQLNRALTGIAVEQDKNTQEVFAQVKQIYKTPPIKDCGGFNFSQILPDPSKPSKRSFIEDLLFNKVTLADAGFIKQYGDCLGDIAARDLICAQKFNGLTVLPPLLTDEMIAQYTSALLAGTITSGWTFCAGAALQIPFAMQMAYRFNGIGVTQNVLYENQKLIANQFNSAIGKIQDSLSSTASALGKLQDVVNQNAQALNTLVKQLSSNFGAISSVLNDILSRLDKVEAEVQIDRLITGRLQSLQTYVTQQLIRAAEIRASANLAATKMSECVCGQSKRVDFCGKGYHLMSFPQSAPHGVVFLHVTYVPAQEKNFTTAPAICHDGKAHFPREGVFVSNGTHWFVTQRNFYEPQIITTDNTFVSGNCDVVIGIVNNTVYDPLQPELDS

SEQ ID NO: 3169 - protein, 1147 aa, Artificial Sequence
  SARS-CoV-2/Tianmen/HBCDC-HB-07/2020__EPI_ISL_412983 spike protein (1-1147)(G889C_L1034C)
MFVFLVLLPLVSSQCVNLTTRTQLPPAYTNSFTRGVYYPDKVFRSSVLHSTQDLFLPFFSNVTWFHAIHVSGTNGTKRFDNPVLPFNDGVYFASTEKSNIIRGWIFGTTLDSKTQSLLIVNNATNVVIKVCEFQFCNDPFLGVYYHKNNKSWMESEFRVYSSANNCTFEYVSQPFLMDLEGKQGNFKNLREFVFKNIDGYFKIYSKHTPINLVRDLPQGFSALEPLVDLPIGINITRFQTLLALHRSYLTPGDSSSGWTAGAAAYYVGYLQPRTFLLKYNENGTITDAVDCALDPLSETKCTLKSFTVEKGIYQTSNFRVQPTESIVRFPNITNLCPFGEVFNATRFASVYAWNRKRISNCVADYSVLYNSASFSTFKCYGVSPTKLNDLCFTNVYADSFVIRGDEVRQIAPGQTGKIADYNYKLPDDFTGCVIAWNSNNLDSKVGGNYNYLYRLFRKSNLKPFERDISTEIYQAGSTPCNGVEGFNCYFPLQSYGFQPTNGVGYQPYRVVVLSFELLHAPATVCGPKKSTNLVKNKCVNFNFNGLTGTGVLTESNKKFLPFQQFGRDIADTTDAVRDPQTLEILDITPCSFGGVSVITPGTNTSNQVAVLYQDLNCTEVPVAIHADQLTPTWRVYSTGSNVFQTRAGCLIGAEHVNNSYECDIPIGAGICASYQTQTNSPRRARSVASQSIIAYTMSLGAENSVAYSNNSIAIPTNFTISVTTEILPVSMTKTSVDCTMYICGDSTECSNLLLQYGSFCTQLNRALTGIAVEQDKNTQEVFAQVKQIYKTPPIKDFGGFNFSQILPDPSKPSKRSFIEDLLFNKVTLADAGFIKQYGDCLGDIAARDLICAQKFNGLTVLPPLLTDEMIAQYTSALLAGTITSGWTFCAGAALQIPFAMQMAYRFNGIGVTQNVLYENQKLIANQFNSAIGKIQDSLSSTASALGKLQDVVNQNAQALNTLVKQLSSNFGAISSVLNDILSRLDKVEAEVQIDRLITGRLQSLQTYVTQQLIRAAEIRASANLAATKMSECVCGQSKRVDFCGKGYHLMSFPQSAPHGVVFLHVTYVPAQEKNFTTAPAICHDGKAHFPREGVFVSNGTHWFVTQRNFYEPQIITTDNTFVSGNCDVVIGIVNNTVYDPLQPELDS

SEQ ID NO: 3170 - protein, 1147 aa, Artificial Sequence
  SARS-CoV-2/Hong Kong/case42_VM20002493/2020__EPI_ISL_414527 spike protein (1-1147)(G889C_L1034C)
MFVFLVLLPLVSSQCVNLTTRTQLPPAYTNSFTRGVYYPDKVFRSSVLHSTQDLFLPFFSNVTWFHAIHVSGTNGTKRFDNPVLPFNDGVYFASTEKSNIIRGWIFGTTLDSKTQSLLIVNNATNVVIKVCEFQFCNDPFLGVYYHKNNKSWMESEFRVYSSANNCTFEYVSQPFLMDLEGKQGNFKNLREFVFKNIDGYFKIYSKHTPINLVRDLPQGFSALEPLVDLPIGINITRFQTLLALHRSYLTPGDSSSGWTAGAAAYYVGYLQPRTFLLKYNENGTITDAVDCALDPLSETKCTLKSFTVEKGIYQTSNFRVQPTESIVRFPNITNLCPFGEVFNATRFASVYAWNRKRISNCVADYSVLYNSASFSTFKCYGVSPTKLNDLCFTNVYADSFVIRGDEVRQIAPGQTGKIADYNYKLPDDFTGCVIAWNSNNLDSKVGGNYNYLYRLFRKSNLKPFERDISTEIYQAGSTPCNGVEGFNCYFPLQSYGFQPTNGVGYQPYRVVVLSFELLHAPATVCGPKKSTNLVKNKCVNFNFNGLTGTGVLTESNKKFLPFQQFGRDIADTTDAVRDPQTLEILDITPCSFGGVSVITPGTNTSNQVAVLYQDVNCTEVPVAIHADQLTPTWRVYSTGSNVFQTRAGCLIGAEHVNNSYECDIPIGAGICASYQTQTNSPRRARSVASQSIIAYTMSLGAENSVAYSNNSIAIPTNFAISVTTEILPVSMTKTSVDCTMYICGDSTECSNLLLQYGSFCTQLNRALTGIAVEQDKNTQEVFAQVKQIYKTPPIKDFGGFNFSQILPDPSKPSKRSFIEDLLFNKVTLADAGFIKQYGDCLGDIAARDLICAQKFNGLTVLPPLLTDEMIAQYTSALLAGTITSGWTFCAGAALQIPFAMQMAYRFNGIGVTQNVLYENQKLIANQFNSAIGKIQDSLSSTASALGKLQDVVNQNAQALNTLVKQLSSNFGAISSVLNDILSRLDKVEAEVQIDRLITGRLQSLQTYVTQQLIRAAEIRASANLAATKMSECVCGQSKRVDFCGKGYHLMSFPQSAPHGVVFLHVTYVPAQEKNFTTAPAICHDGKAHFPREGVFVSNGTHWFVTQRNFYEPQIITTDNTFVSGNCDVVIGIVNNTVYDPLQPELDS

SEQ ID NO: 3171 - protein, 1147 aa, Artificial Sequence
  SARS-CoV-2/USA/CruiseA-23/2020__EPI_ISL_414482 spike protein (1-1147)(G889C_L1034C)
MFVFLVLLPLVSSQCVNLTTRTQLPPAYTNSFTRGVYYPDKVFRSSVLHSTQDLFLPFFSNVTWFHAIHVSGTNGTKRFDNPVLPFNDGVYFASTEKSNIIRGWIFGTTLDSKTQSLLIVNNATNVVIKVCEFQFCNDPFLGVYYHKNNKSWMESEFRVYSSANNCTFEYVSQPFLMDLEVKQGNFKNLREFVFKNIDGYFKIYSKHTPINLVRDLPQGFSALEPLVDLPIGINITRFQTLLALHRSYLTPGDSSSGWTAGAAAYYVGYLQPRTFLLKYNENGTITDAVDCALDPLSETKCTLKSFTVEKGIYQTSNFRVQPTESIVRFPNITNLCPFGEVFNATRFASVYAWNRKRISNCVADYSVLYNSASFSTFKCYGVSPTKLNDLCFTNVYADSFVIRGDEVRQIAPGQTGKIADYNYKLPDDFTGCVIAWNSNNLDSKVGGNYNYLYRLFRKSNLKPFERDISTEIYQAGSTPCNGVEGFNCYFPLQSYGFQPTNGVGYQPYRVVVLSFELLHAPATVCGPKKSTNLVKNKCVNFNFNGLTGTGVLTESNKKFLPFQQFGRDIADTTDAVRDPQTLEILDITPCSFGGVSVITPGTNTSNQVAVLYQDVNCTEVPVAIHADQLTPTWRVYSTGSNVFQTRAGCLIGAEHVNNSYECDIPIGAGICASYQTQTNSPRRARSVASQSIIAYTMSLGAENSVAYSNNSIAIPTNFTISVTTEILPVSMTKTSVDCTMYICGDSTECSNLLLQYGSFCTQLNRALTGIAVEQDKNTQEVFAQVKQIYKTPPIKDFGGFNFSQILPDPSKPSKRSFIEDLLFNKVTLADAGFIKQYGDCLGDIAARDLICAQKFNGLTVLPPLLTDEMIAQYTSALLAGTITSGWTFCAGAALQIPFAMQMAYRFNGIGVTQNVLYENQKLIANQFNSAIGKIQDSLSSTASALGKLQDVVNQNAQALNTLVKQLSSNFGAISSVLNDILSRLDKVEAEVQIDRLITGRLQSLQTYVTQQLIRAAEIRASANLAATKMSECVCGQSKRVDFCGKGYHLMSFPQSAPHGVVFLHVTYVPAQEKNFTTAPAICHDGKAHFPREGVFVSNGTHWFVTQRNFYEPQIITTDNTFVSGNCDVVIGIVNNTVYDPLQPELDS

SEQ ID NO: 3172 - protein, 1147 aa, Artificial Sequence
  SARS-CoV-2/Hong Kong/case85_VM20002868/2020__EPI_ISL_414519 spike protein (1-1147)(G889C_L1034C)
MFVFLVLVPLVSSQCVNLTTRTQLPPAYTNSFTRGVYYPDKVFRSSVLHSTQDLFLPFFSNVTWFHAIHVSGTNGTKRFDNPVLPFNDGVYFASTEKSNIIRGWIFGTTLDSKTQSLLIVNNATNVVIKVCEFQFCNDPFLGVYYHKNNKSWMESEFRVYSSANNCTFEYVSQPFLMDLEGKQGNFKNLREFVFKNIDGYFKIYSKHTPINLVRDLPQGFSALEPLVDLPIGINITRFQTLLALHRSYLTPGDSSSGWTAGAAAYYVGYLQPRTFLLKYNENGTITDAVDCALDPLSETKCTLKSFTVEKGIYQTSNFRVQPTESIVRFPNITNLCPFGEVFNATRFASVYAWNRKRISNCVADYSVLYNSASFSTFKCYGVSPTKLNDLCFTNVYADSFVIRGDEVRQIAPGQTGKIADYNYKLPDDFTGCVIAWNSNNLDSKVGGNYNYLYRLFRKSNLKPFERDISTEIYQAGSTPCNGVEGFNCYFPLQSYGFQPTNGVGYQPYRVVVLSFELLHAPATVCGPKKSTNLVKNKCVNFNFNGLTGTGVLTESNKKFLPFQQFGRDIADTTDAVRDPQTLEILDITPCSFGGVSVITPGTNTSNQVAVLYQDVNCTEVPVAIHADQLTPTWRVYSTGSNVFQTRAGCLIGAEHVNNSYECDIPIGAGICASYQTQTNSPRRARSVASQSIIAYTMSLGAENSVAYSNNSIAIPTNFTISVTTEILPVSMTKTSVDCTMYICGDSTECSNLLLQYGSFCTQLNRALTGIAVEQDKNTQEVFAQVKQIYKTPPIKDFGGFNFSQILPDPSKPSKRSFIEDLLFNKVTLADAGFIKQYGDCLGDIAARDLICAQKFNGLTVLPPLLTDEMIAQYTSALLAGTITSGWTFCAGAALQIPFAMQMAYRFNGIGVTQNVLYENQKLIANQFNSAIGKIQDSLSSTASALGKLQDVVNQNAQALNTLVKQLSSNFGAISSVLNDILSRLDKVEAEVQIDRLITGRLQSLQTYVTQQLIRAAEIRASANLAATKMSECVCGQSKRVDFCGKGYHLMSFPQSAPHGVVFLHVTYVPAQEKNFTTAPAICHDGKAHFPREGVFVSNGTHWFVTQRNFYEPQIITTDNTFVSGNCDVVIGIVNNTVYDPLQPELDS

SEQ ID NO: 3173 - protein, 1147 aa, Artificial Sequence; identical to SEQ ID NO: 3163
  SARS-CoV-2/England/200990660/2020__EPI_ISL_414523 spike protein (1-1147)(G889C_L1034C)

SEQ ID NO: 3174 - protein, 1147 aa, Artificial Sequence
  SARS-CoV-2/Australia/NSW09/2020__EPI_ISL_413595 spike protein (1-1147)(G889C_L1034C)
MFVFLVLLPLVSSQCVNLTTRTQLPPAYTNSFTRGVYYPDKVFRSSVLHSTQDLFLPFFSNVTWFHAIHVSGTNGTKRFDNPVLPFNDGVYFASTEKSNIIRGWIFGTTLDSKTQSLLIVNNATNVVIKVCEFQFCNDPFLGVYYHKNNKSWMESEFRVYSSANNCTFEYVSQPFLMDLEGKQGNFKNLREFVFKNIDGYFKIYSKHTPINLVRDLPQGFSALEPLVDLPIGINITRFQTLLALHRSYLTPGDSSSGWTAGAAAYYVGYLQPRTFLLKYNENGTITDAVDCALDPLSETKCTLKSFTVEKGIYQTSNFRVQPTESIVRFPNITNLCPFGEVFNATRFASVYAWNRKRISNCVADYSVLYNSASFSTFKCYGVSPTKLNDLCFTNVYADSFVIRGDEVRQIAPGQTGKIADYNYKLPDDFTGCVIAWNSNNLDSKVGGNYNYLYRLFRKSNLKPFERDISTEIYQAGSTPCNGVEGFNCYFPLQSYGFQPTNGVGYQPYRVVVLSFELLHAPATVCGPKKSTNLVKNKCVNFNFNGLTGTGVLTESNKKFLPFQQFGRDIADTTDAVRDPQTLEILDITPCSFGGVSVITPGTNTSNQVAVLYQDVNCTEVPVAIHADQLTPTWRVYSTGSNVFQTRAGCLIGAEHVNNSYECDIPIGAGICASYQTQTNSPRRARSVASQSIIAYTMSLGAENSVAYSNNSIAIPTNFTISVTTEILPVSMTKTSVDCTMYICGDSTECSNLLLQYGSFCTQLNRALTGIAVEQDKNTQEVFAQVKQIYKTPPIKDFGGFNFSQILPDPSKPSKRSFIEDLLFNKVTLADAGFIKQYGDCLGDIAARDLICAQKFNGLTVLPPLLTDEMIAQYTSALLAGTITSGWTFCAGAALQIPFAMQMAYRFNGIGVTQNVLYENQKLIANQFNSAIGKIQDSLSFTASALGKLQDVVNQNAQALNTLVKQLSSNFGAISSVLNDILSRLDKVEAEVQIDRLITGRLQSLQTYVTQQLIRAAEIRASANLAATKMSECVCGQSKRVDFCGKGYHLMSFPQSAPHGVVFLHVTYVPAQEKNFTTAPAICHDGKAHFPREGVFVSNGTHWFVTQRNFYEPQIITTDNTFVSGNCDVVIGIVNNTVYDPLQPELDS

SEQ ID NO: 3175 - protein, 1147 aa, Artificial Sequence; identical to SEQ ID NO: 3155
  SARS-CoV-2/Australia/NSW10/2020__EPI_ISL_413596 spike protein (1-1147)(G889C_L1034C)

SEQ ID NO: 3176 - protein, 1147 aa, Artificial Sequence
  SARS-CoV-2/Switzerland/1000477797/2020__EPI_ISL_413023 spike protein (1-1147)(G889C_L1034C)
MFVFLVLLPLVSSQCVNLTTRTQLPPAYTNSFTRGVYYPDKVFRSSVLHSTQDLFLPFFSNVTWFHAIHVSGTNGTKRFDNPVLPFNDGVYFASTEKSNIIRGWIFGTTLDSKTQSLLIVNNATNVVIKVCEFQFCNDPFLGVYYHKNNKSWMESEFRVYSSANNCTFEYVSQPFLMDLEGKQGNFKNLREFVFKNIDGYFNIYSKHTPINLVRDLPQGFSALEPLVDLPIGINITRFQTLLALHRSYLTPGDSSSGWTAGAAAYYVGYLQPRTFLLKYNENGTITDAVDCALDPLSETKCTLKSFTVEKGIYQTSNFRVQPTESIVRFPNITNLCPFGEVFNATRFASVYAWNRKRISNCVADYSVLYNSASFSTFKCYGVSPTKLNDLCFTNVYADSFVIRGDEVRQIAPGQTGKIADYNYKLPDDFTGCVIAWNSNNLDSKVGGNYNYLYRLFRKSNLKPFERDISTEIYQAGSTPCNGVEGFNCYFPLQSYGFQPTNGVGYQPYRVVVLSFELLHAPATVCGPKKSTNLVKNKCVNFNFNGLTGTGVLTESNKKFLPFQQFGRDIADTTDAVRDPQTLEILDITPCSFGGVSVITPGTNTSNQVAVLYQGVNCTEVPVAIHADQLTPTWRVYSTGSNVFQTRAGCLIGAEHVNNSYECDIPIGAGICASYQTQTNSPRRARSVASQSIIAYTMSLGAENSVAYSNNSIAIPTNFTISVTTEILPVSMTKTSVDCTMYICGDSTECSNLLLQYGSFCTQLNRALTGIAVEQDKNTQEVFAQVKQIYKTPPIKDFGGFNFSQILPDPSKPSKRSFIEDLLFNKVTLADAGFIKQYGDCLGDIAARDLICAQKFNGLTVLPPLLTDEMIAQYTSALLAGTITSGWTFCAGAALQIPFAMQMAYRFNGIGVTQNVLYENQKLIANQFNSAIGKIQDSLSSTASALGKLQDVVNQNAQALNTLVKQLSSNFGAISSVLNDILSRLDKVEAEVQIDRLITGRLQSLQTYVTQQLIRAAEIRASANLAATKMSECVCGQSKRVDFCGKGYHLMSFPQSAPHGVVFLHVTYVPAQEKNFTTAPAICHDGKAHFPREGVFVSNGTHWFVTQRNFYEPQIITTDNTFVSGNCDVVIGIVNNTVYDPLQPELDS

SEQ ID NO: 3177 - protein, 1147 aa, Artificial Sequence
  SARS-CoV-2/Belgium/BA-02291/2020__EPI_ISL_415159 spike protein (1-1147)(G889C_L1034C)
MFVFLVLLPLVSSQCVNLTTRTQLPPAYTNSFTRGVYYPDKVFRSSVLHSTQDLFLPFFSNVTWFHAIHVSGTNGTKRFDNPVLPFNDGVYFASTEKSNIIRGWIFGTTLDSKTQSLLIVNNATNVVIKVCEFQFCNDPFLGVYYHKNNKSWMESEFRVYSSANNCTFEYVSQPFLMDLEGKQGNFKNLREFVFKNIDGYFKIYSKHTPINLVRDLPQGFSALEPLVDLPIGINITRFQTLLALHRSYLTPGDSSSGWTAGAAAYYVGYLQPRTFLLKYNENGTITDAVDCALDPLSETKCTLKSFTVEKGIYQTSNFRVQPTESIVRFPNITNLCPFGEVFNATRFASVYAWNRKRISNCVADYSVLYNSASFSTFKCYGVSPTKLNDLCFTNVYADSFVIRGDEVRQIAPGQTGKIADYNYKLPDDFTGCVIAWNSNNLDSKVGGNYNYLYRLFRRSNLKPFERDISTEIYQAGSTPCNGVEGFNCYFPLQSYGFQPTNGVGYQPYRVVVLSFELLPAPATVCGPKKSTNLVKNKCVNFNFNGLTGTGVLTESNKKFLPFQQFGRDIADTTDAVRDPQTLEILDITPCSFGGVSVITPGTNTSNQVAVLYQGVNCTEVPVAIHADQLTPTWRVYSTGSNVFQTRAGCLIGAEHVNNSYECDIPIGAGICASYQTQTNSPRRARSVASQSIIAYTMSLGAENSVAYSNNSIAIPTNFTISVTTEILPVSMTKTSVDCTMYICGDSTECSNLLLQYGSFCTQLNRALTGIAVEQDKNTQEVFAQVKQIYKTPPIKDFGGFNFSQILPDPSKPSKRSFIEDLLFNKVTLADAGFIKQYGDCLGDIAARDLICAQKFNGLTVLPPLLTDEMIAQYTSALLAGTITSGWTFCAGAALQIPFAMQMAYRFNGIGVTQNVLYENQKLIANQFNSAIGKIQDSLSSAAPALGKLQDVVNQNAQALNTLVKQLSSNFGAISSVLNDILSRLDKVEAEVQIDRLITGRLQSLQTYVTQQLIRAAEIRASANLAATKMSECVCGQSKRVDFCGKGYHLMSFPQSAPHGVVFLHVTYVPAQEKNFTTAPAICHDGKAHFPREGVFVSNGTHWFVTQRNFYEPQIITTDNTFVSGNCDVVIGIVNNTVYDPLQPELDS

SEQ ID NO: 3178 - protein, 1147 aa, Artificial Sequence
  SARS-CoV-2/USA/WA8-UW5/2020__EPI_ISL_413486 spike protein (1-1147)(G889C_L1034C)
MFVFLVLLPLVSSQCVNLTTRTQLPPAYTNSFTRGVYYPDKVFRSSVLHSTQDLFLPFFSNVTWFHAIHVSGTNGTKRFDNPVLPFNDGVYFASTEKSNIIRGWIFGTTLDSKTQSLLIVNNATNVVIKVCEFQFCNDPFLGVYYHKNNKSWMESEFRVYSSANNCTFEYVSQPFLMDLEGKQGNFKNLREFVFKNIDGYFKIYSKHTPINLVRDLPQGFSALEPLVDLPIGINITRFQTLLALHRSYLTPGDSSSGWTAGAAAYYVGYLQPRTFLLKYNENGTITDAVDCALDPLSETKCTLKSFTVEKGIYQTSNFRVQPTESIVRFPNITNLCPFGEVFNATRFASVYAWNRKRISNCVADYSVLYNSASFSTFKCYGVSPTKLNDLCFTNVYADSFVIRGDEVRQIAPGQTGKIADYNYKLPDDFTGCVIAWNSNNLDSKVGGNYNYLYRLFRKSNLKPFERDISTEIYQAGSTPCNGVEGFNCYFPLQSYGFQPTNGVGYQPYRVVVLSFELLHAPATVCGPKKSTNLVKNKCVNFNFNGLTGTGVLTESNKKFLPFQQFGRDIADTTDAVRDPQTLEILDITPCSFGGVSVITPGTNTSNQVAVLYQDVNCTEVPVAIHADQLTPTWRVYSTGSNVFQTRAGCLIGAEYVNNSYECDIPIGAGICASYQTQTNSPRRARSVASQSIIAYTMSLGAENSVAYSNNSIAIPTNFTISVTTEILPVSMTKTSVDCTMYICGDSTECSNLLLQYGSFCTQLNRALTGIAVEQDKNTQEVFAQVKQIYKTPPIKDFGGFNFSQILPDPSKPSKRSFIEDLLFNKVTLADAGFIKQYGDCLGDIAARDLICAQKFNGLTVLPPLLTDEMIAQYTSALLAGTITSGWTFCAGAALQIPFAMQMAYRFNGIGVTQNVLYENQKLIANQFNSAIGKIQDSLSSTASALGKLQDVVNQNAQALNTLVKQLSSNFGAISSVLNDILSRLDKVEAEVQIDRLITGRLQSLQTYVTQQLIRAAEIRASANLAATKMSECVCGQSKRVDFCGKGYHLMSFPQSAPHGVVFLHVTYVPAQEKNFTTAPAICHDGKAHFPREGVFVSNGTHWFVTQRNFYEPQIITTDNTFVSGNCDVVIGIVNNTVYDPLQPELDS

SEQ ID NO: 3179 - protein, 1147 aa, Artificial Sequence
  SARS-CoV-2/England/20102000506/2020__EPI_ISL_415147 spike protein (1-1147)(G889C_L1034C)
MFVFLVLLPLVSSQCVNLTTRTQLPPAYTNSFTRGVYYPDKVFRSSVLHSTQDLFLPFFSNVTWFHAIHVSGTNGTKRFDNPVLPFNDGVYFASTEKSNIIRGWIFGTTLDSKTQSLLIVNNATNVVIKVCEFQFCNDPFLGVYYHKNNKSWMESEFRVYSSANNCTFEYVSQPFLMDLEGKQGNFKNLREFVFKNIDGYFKIYSKHTPINLVRDLPQGFSALEPLVDLPIGINITRFQTLLALHRSYLTPGDSSSGWTAGAAAYYVGYLQPRTFLLKYNENGTITDAVDCALDPLSETKCTLKSFTVEKGIYQTSNFRVQPTESIVRFPNITNLCPFGEVFNATRFASVYAWNRKRISNCVADYSVLYNSASFSTFKCYGVSPTKLNDLCFTNVYADSFVIRGDEVRQIAPGQTGKIADYNYKLPDDFTGCVIAWNSNNLDSKVGGNYNYLYRLFRKSNLKPFERDISTEIYQAGSTPCNGVEGFNCYFPLQSYGFQPTNGVGYQPYRVVVLSFELLHAPATVCGPKKSTNLVKNKCVNFNFNGLTGTGVLTESNKKFLPFQQFGRDIADTTDAVRDPQTLEILDITPCSFGGVSVITPGTNTSNQVAVLYQGVNCTEVPVAIHADQLTPTWRVYSTGSNVFQTRAGCLIGAEHVNNSYECDIPIGAGICASYQTQTNSPRRARSVASQSIIAYTMSLGAENSVAYSNNSIAIPTNFTISVTTEILPVSMTKTSVDCTMYICGDSTECSNLLLQYGSFCTQLNRALTGIAVEQDKNTQEVFAQVKQIYKTPPIKDFGGFNFSQILPDPSKPSKRSFIEDLLFNKVTLADAGFIKQYGYCLGDIAARDLICAQKFNGLTVLPPLLTDEMIAQYTSALLAGTITSGWTFCAGAALQIPFAMQMAYRFNGIGVTQNVLYENQKLIANQFNSAIGKIQDSLSSTASALGKLQDVVNQNAQALNTLVKQLSSNFGAISSVLNDILSRLDKVEAEVQIDRLITGRLQSLQTYVTQQLIRAAEIRASANLAATKMSECVCGQSKRVDFCGKGYHLMSFPQSAPHGVVFLHVTYVPAQEKNFTTAPAICHDGKAHFPREGVFVSNGTHWFVTQRNFYEPQIITTDNTFVSGNCDVVIGIVNNTVYDPLQPELDS

SEQ ID NO: 3180 - protein, 1147 aa, Artificial Sequence
  SARS-CoV-2/Belgium/VAG-03013/2020__EPI_ISL_415155 spike protein (1-1147)(G889C_L1034C)
MFVFLVLLPLVSSQCVNLTTRTQLPPAYTNSFTRGVYYPDKVFRSSVLHSTQDLFLPFFSNVTWFHAIHVSGTNGTKRFDNPVLPFNDGVYFASTEKSNIIRGWIFGTTLDSKTQSLLIVNNATNVVIKVCEFQFCNDPFLGVYYHKNNKSWMESEFRVYSSANNCTFEYVSQPFLMDLEGKQGNFKNLREFVFKNIDGYFKIYSKHTPINLVRDLPQGFSALEPLVDLPIGINITRFQTLLALHRSYLTPGDSSSGWTAGAAAYYVGYLQPRTFLLKYNENGTITDAVDCALDPLSETKCTLKSFTVEKGIYQTSNFRVQPTESIVRFPNITNLCPFGEVFNATRFASVYAWNRKRISNCVADYSVLYNSASFSTFKCYGVSPTKLNDLCFTNVYADSFVIRGDEVRQIAPGQTGKIADYNYKLPDDFTGCVIAWNSNNLDSKVGGNYNYLYRLFRKSNLKPFERDISTEIYQAGSTPCNGVEGFNCYFPLQSYGFQPTNGVGYQPYRVVVLSFELLHAPATVCGPKKSTNLVKNKCVNFNFNGLTGTGVLTESNKKFLPFQQFGRDIADTTDAVRDPQTLEILDITPCSFGGVSVITPGTNTSNQVAVLYQGVNCTEVPVAIHADQLTPTWRVYSTGSNVFQTRAGCLIGAEHVNNSYECDIPIGAGICASYQTQTNSPRRARSVASQSIIAYTMSLGAENSVAYSNNSIAIPTNFTISVTTEILPVSMTKTSVDCTMYICGDSTECSNLLLQYGSFCTQLNRALTGIAVEQDKNTQEVFAQVKQIYKTPPIKDFGGFNFSQILPDPSKPSKRSFIEDLLFNKVTLADAGFIKQYGDCLGDIAARDLICAQKFNGLTVLPPLLTDEMIAQYTSALLAGTITSGWTFCAGAALQIPFAMQMAYRFNGIGVTQNVLYENQKLIANQFNSAIGKIQDSLSSTATALGKLQDVVNQNAQALNTLVKQLSSNFGAISSVLNDILSRLDKVEAEVQIDRLITGRLQSLQTYVTQQLIRAAEIRASANLAATKMSECVCGQSKRVDFCGKGYHLMSFPQSAPHGVVFLHVTYVPAQEKNFTTAPAICHDGKAHFPREGVFVSNGTHWFVTQRNFYEPQIITTDNTFVSGNCDVVIGIVNNTVYDPLQPELDS

SEQ ID NO: 3181 - protein, 1147 aa, Artificial Sequence
  SARS-CoV-2/Belgium/BC-03016/2020__EPI_ISL_415157 spike protein (1-1147)(G889C_L1034C)
MFVFLVLLPLVSSQCVNLTTRTQLPPAYTNSFTRGVYYPDKVFRSSVLHSTQDLFLPFFSNVTWFHAIHVSGTNGTKRFDNPVLPFNDGVYFASTEKSNIIRGWIFGTTLDSKTQSLLIVNNATNVVIKVCEFQFCNDPFLGVYYHKNNKSWMESEFRVYSSANNCTFEYVSQPFLMDLEGKQGNFKNLREFVFKNIDGYFKIYSKHTPINLVRDLPQGFSALEPLVDLPIGINITRFQTLLALHRSYLTPGDSSSGWTAGAAAYYVGYLQPRTFLLKYNENGTITDAVDCALDPLSETKCTLKSFTVEKGIYQTSNFRVQPTESIVRFPNITNLCPFGEVFNATRFASVYAWNRKRISNCVADYSVLYNSASFSTFKCYGVSPTKLNDLCFTNVYADSFVIRGDEVRQIAPGQTGKIADYNYKLPDDFTGCVIAWNSNNLDSKVGGNYNYLYRLFRKSNLKPFERDISTEIYQAGSTPCNGVEGFNCYFPLQSYGFQPTNGVGYQPYRVVVLSFELLHAPATVCGPKKSTNLVKNKCVNFNFNGLTGTGVLTESNKKFLPFQQFGRDIADTTDAVRDPQTLEILDITPCSFGGVSVITPGTNTSNQVAVLYQGVNCTEVPVAIHADQLTPTWRVYSTGSNVFQTRAGCLIGAEHVNNSYECDIPIGAGICASYQTQTNSPRRARSVASQSIIAYTMSLGAENSVAYSNNSIAIPTNFTISVTTEILPVSMTKTSVDCTMYICGDSTECSNLLLQYGSFCTQLNRALTGIAVEQDKNTQEVFAQVKQIYKTPPIKDFGGFNFSQILPDPSKPSKRSFIEDLLFNKVTLADAGFIKQYGDCLGDIAARDLICAQKFNGLTVLPPLLTDEMIAQYTSALLAGTITSGWTFCAGAALQIPFAMQMAYRFNGIGVTQNVLYENQKLIANQFNSAIGKIQDSLSSTAPALGKLQDVVNQNAQALNTLVKQLSSNFGAISSVLNDILSRLDKVEAEVQIDRLITGRLQSLQTYVTQQLIRAAEIRASANLAATKMSECVCGQSKRVDFCGKGYHLMSFPQSAPHGVVFLHVTYVPAQEKNFTTAPAICHDGKAHFPREGVFVSNGTHWFVTQRNFYEPQIITTDNTFVSGNCDVVIGIVNNTVYDPLQPELDS

SEQ ID NO: 3182 - protein, 1147 aa, Artificial Sequence
  SARS-CoV-2/Germany/BavPat3/2020__EPI_ISL_414521 spike protein (1-1147)(G889C_L1034C)
MFVFLVLLPLVSSQCVNLTTRTQLPPAYTNSFTRGVYYPDKVFRSSVLHSTQDLFLPFFSNVTWFHAIHVSGTNGTKRFDNPVLPFNDGVYFASTEKSNIIRGWIFGTTLDSKTQSLLIVNNATNVVIKVCEFQFCNDPFLGVYYHKNNKSWMESEFRVYSSANNCTFEYVSQPFLMDLEGKQGNFKNLREFVFKNIDGYFKIYSKHTPINLVRDLPQGFSALEPLVDLPIGINITRFQTLLALHRSYLTPGDSSSGWTAGAAAYYVGYLQPRTFLLKYNENGTITDAVDCALDPLSETKCTLKSFTVEKGIYQTSNFRVQPTESIVRFPNITNLCPFGEVFNATRFASVYAWNRKRISNCVADYSVLYNSASFSTFKCYGVSPTKLNDLCFTNVYADSFVIRGDEVRQIAPGQTGKIADYNYKLPDDFTGCVIAWNSNNLDSKVGGNYNYLYRLFRKSNLKPFERDISTEIYQAGSTPCNGVEGFNCYFPLQSYGFQPTNGVGYQPYRVVVLSFELLHAPATVCGPKKSTNLVKNKCVNFNFNGLTGTGVLTESNKKFLPFQQFGRDIADTTDAVRDPQTLEILDITPCSFGGVSVITPGTNTSNQVAVLYQDVNCTEVPVAIHADQLTPTWRVYSTGSNVFQTRAGCLIGAEHVNNSYECDIPIGAGICASYQTQTNSPRRARSVASQSIIAYTMSLGAENSVAYSNNSIAIPTNFTISVTTEILPVSMTKTSVDCTMYICGDSTECSNLLLQYGSFCTQLNRALTGIAVEQDKNTQQVFAQVKQIYKTPPIKDFGGFNFSQILPDPSKPSKRSFIEDLLFNKVTLADAGFIKQYGDCLGDIAARDLICAQKFNGLTVLPPLLTDEMIAQYTSALLAGTITSGWTFCAGAALQIPFAMQMAYRFNGIGVTQNVLYENQKLIANQFNSAIGKIQDSLSSTASALGKLQDVVNQNAQALNTLVKQLSSNFGAISSVLNDILSRLDKVEAEVQIDRLITGRLQSLQTYVTQQLIRAAEIRASANLAATKMSECVCGQSKRVDFCGKGYHLMSFPQSAPHGVVFLHVTYVPAQEKNFTTAPAICHDGKAHFPREGVFVSNGTHWFVTQRNFYEPQIITTDNTFVSGNCDVVIGIVNNTVYDPLQPELDS

SEQ ID NO: 3183 - protein, 1147 aa, Artificial Sequence
  SARS-CoV-2/France/HF1805/2020__EPI_ISL_414628 spike protein (1-1147)(G889C_L1034C)
MFVFLVLLPLVSSQCVNLTTRTQLPPAYTNSFTRGVYYPDKVFRSSVLHSTQDLFLPFFSNVTWFHAIHVSGTNGTKRFDNPVLPFNDGVYFASTEKSNIIRGWIFGTTLDSKTQSLLIVNNATNVVIKVCEFQFCNDPFLGVYYHKNNKSWMESEFRVYSSANNCTFEYVSQPFLMDLEGKQGNFKNLREFVFKNIDGYFKIYSKHTPINLVRDLPQGFSALEPLVDLPIGINITRFQTLLALHRSYLTPGDSSSGWTAGAAAYYVGYLQPRTFLLKYNENGTITDAVDCALDPLSETKCTLKSFTVEKGIYQTSNFRVQPTESIVRFPNITNLCPFGEVFNATRFASVYAWNRKRISNCVADYSVLYNSASFSTFKCYGVSPTKLNDLCFTNVYADSFVIRGDEVRQIAPGQTGKIADYNYKLPDDFTGCVIAWNSNNLDSKVGGNYNYLYRLFRKSNLKPFERDISTEIYQAGSTPCNGVEGFNCYFPLQSYGFQPTNGVGYQPYRVVVLSFELLHAPATVCGPKKSTNLVKNKCVNFNFNGLTGTGVLTESNKKFLPFQQFGRDIADTTDAVRDPQTLEILDITPCSFGGVSVITPGTNTSNQVAVLYQGVNCTEVPVAIHADQLTPTWRVYSTGSNVFQTRAGCLIGAEHVNNSYECDIPIGAGICASYQTQTNSPRRARSVASQSIIAYTMSLGAENSVAYSNNSIAIPTNFTISVTTEILPVSMTKTSVDCTMYICGDSTECSNLLLQYGSFCTQLNRALTGIAVEQDKNTQEVFAQVKQIYKTPPIKDFGGFNFSQILPDPSKPSKRSFIEDLLFNKVTLADAGFIKQYGDCLGDIAARDLICAQKFNGLTVLPPLLTDEMIAQYTSALLAGTITSGWTFCAGAALQIPFAMQMAYRFNGIGVTQNVLYENQKLIANQFNSAIGKIQDSLSSTASALGKLQDVVNQNAQALNTLVKQLSSNFGAISSVLNDILSRLDKVEAEVQIDRLITGRLQSLQTYVTQQLIRAAEIRASANLAATKMSECVCGQSKRVDFCGKGYHLMSFPQSAPHGVVFLHVTYVPAQEKNFTTAPAICHDGKAHFPREGVFVSNGTHWFVTQRNFYEPQIITTDNTFVSGNCDVVIGVVNNTVYDPLQPELDS

SEQ ID NO: 3184 - protein, 1147 aa, Artificial Sequence
  SARS-CoV-2/Netherlands/ZuidHolland_9/2020__EPI_ISL_414445 spike protein (1-1147)(G889C_L1034C)
MFVFLVLLPLVSSQCVNLTTRTQLPPAYTNSFTRGVYYPDKVFRSSVLHSTQDLFLPFFSNVTWFHAIHVSGTNGTKRFDNPVLPFNDGVYFASTEKSNIIRGWIFGTTLDSKTQSLLIVNNATNVVIKVCEFQFCNDPFLGVYYHKNNKSWMESEFRVYSSANNCTFEYVSQPFLMDLEGKQGNFKNLREFVFKNIDGYFKIYSKHTPINLVRDLPQGFSALEPLVDLPIGINITRFQTLLALHRSYLTPGDSSSGWTAGAAAYYVGYLQPRTFLLKYNENGTITDAVDCALDPLSETKCTLKSFTVEKGIYQTSNFRVQPTESIVRFPNITNLCPFGEVFNATRFASVYAWNRKRISNCVADYSVLYNSASFSTFKCYGVSPTKLNDLCFTNVYADSFVIRGDEVRQIAPGQTGKIADYNYKLPDDFTGCVIAWNSNNLDSKVGGNYNYLYRLFRKSNLKPFERDISTEIYQAGSTPCNGVEGFNCYFPLQSYGFQPTNGVGYQPYRVVVLSFELLHAPATVCGPKKSTNLVKNKCVNFNFNGLTGTGVLTESNKKFLPFQQFGRDIADTTDAVRDPQTLEILDITPCSFGGVSVITPGTNTSNQVAVLYQGVNCTEVPVAIHADQLTPTWRVYSTGSNVFQTRAGCLIGAEHVNNSYECDIPIGAGICASYQTQTNSPRRARSVASQSIIAYTMSLGAENSVAYSNNSIAIPTNFTISVTTEILPVSMTKTSVDCTMYICGDSTECSNLLLQYGSFCTQLNRALTGIAVEQDKNTQEVFAQVKQIYKTPPIKDFGGFNFSQILPDPSKPSKRSFIEDLLFNKVTLADAGFIKQYGDCLGDIAARDLICVQKFNGLTVLPPLLTDEMIAQYTSALLAGTITSGWTFCAGAALQIPFAMQMAYRFNGIGVTQNVLYENQKLIANQFNSAIGKIQDSLSSTASALGKLQDVVNQNAQALNTLVKQLSSNFGAISSVLNDILSRLDKVEAEVQIDRLITGRLQSLQTYVTQQLIRAAEIRASANLAATKMSECVCGQSKRVDFCGKGYHLMSFPQSAPHGVVFLHVTYVPAQEKNFTTAPAICHDGKAHFPREGVFVSNGTHWFVTQRNFYEPQIITTDNTFVSGNCDVVIGIVNNTVYDPLQPELDS

SEQ ID NO: 3185 - protein, 1147 aa, Artificial Sequence
  SARS-CoV-2/Finland/FIN03032020A/2020__EPI_ISL_413602 spike protein (1-1147)(G889C_L1034C)
MFVFLVLLPLVSSQCVNLTTRTQLPPAYTNSFTRGVYYPDKVFRSSVLHSTQDLFLPFFSNVTWFHAIHVSGTNGTKRFDNPVLPFNDGVYFASTEKSNIIRGWIFGTTLDSKTQSLLIVNNATNVVIKVCEFQFCNDPFLGVYYHKNNKSWMESEFRVYSSANNCTFEYVSQPFLMDLEGKQGNFKNLREFVFKNIDGYFKIYSKHTPINLVRDLPQGFSALEPLVDLPIGINITRFQTLLALHRSYLTPGDSSSGWTAGAAAYYVGYLQPRTFLLKYNENGTITDAVDCALDPLSETKCTLKSFTVEKGIYQTSNFRVQPTESIVRFPNITNLCPFGEVFNATRFASVYAWNRKRISNCVADYSVLYNSASFSTFKCYGVSPTKLNDLCFTNVYADSFVIRGDEVRQIAPGQTGKIADYNYKLPDDFTGCVISWNSNNLDSKVGGNYNYLYRLFRKSNLKPFERDISTEIYQAGSTPCNGVEGFNCYFPLQSYGFQPTNGVGYQPYRVVVLSFELLHAPATVCGPKKSTNLVKNKCVNFNFNGLTGTGVLTESNKKFLPFQQFGRDIADTTDAVRDPQTLEILDITPCSFGGVSVITPGTNTSNQVAVLYQGVNCTEVPVAIHADQLTPTWRVYSTGSNVFQTRAGCLIGAEHVNNSYECDIPIGAGICASYQTQTNSPRRARSVASQSIIAYTMSLGAENSVAYSNNSIAIPTNFTISVTTEILPVSMTKTSVDCTMYICGDSTECSNLLLQYGSFCTQLNRALTGIAVEQDKNTQEVFAQVKQIYKTPPIKDFGGFNFSQILPDPSKPSKRSFIEDLLFNKVTLADAGFIKQYGDCLGDIAARDLICAQKFNGLTVLPPLLTDEMIAQYTSALLAGTITSGWTFCAGAALQIPFAMQMAYRFNGIGVTQNVLYENQKLIANQFNSAIGKIQDSLSSTASALGKLQDVVNQNAQALNTLVKQLSSNFGAISSVLNDILSRLDKVEAEVQIDRLITGRLQSLQTYVTQQLIRAAEIRASANLAATKMSECVCGQSKRVDFCGKGYHLMSFPQSAPHGVVFLHVTYVPAQEKNFTTAPAICHDGKAHFPREGVFVSNGTHWFVTQRNFYEPQIITTDNTFVSGNCDVVIGIVNNTVYDPLQPELDS

SEQ ID NO: 3186 - protein, 1147 aa, Artificial Sequence
  SARS-CoV-2/France/GE1977/2020__EPI_ISL_414632 spike protein (1-1147)(G889C_L1034C)
MFVFLVLLPLVSSQCVNLTTRTQLPPAYTNSFTRGVYYPDKVFRSSVLHSTQDLFLPFFSNVTWFHAIHVSGTNGTKRFDNPVLPFNDGVYFASTEKSNIIRGWIFGTTLDSKTQSLLIVNNATNVVIKVCEFQFCNDPFLGVYYHKNNKSWMESEFRVYSSANNCTFEYVSQPFLMDLEGKQGNFKNLREFVFKNIDGYFKIYSKHTPINLVRDLPQGFSALEPLVDLPIGINITRFQTLLALHRSYLTPGDSSSGWTAGAAAYYVGYLQPRTFLLKYNENGTITDAVDCALDPLSETKCTLKSFTVEKGIYQTSNFRVQPTESIVRFPNITNLCPFGEVFNATRFASVYAWNRKRISNCVADYSVLYNSASFSTFKCYGVSPTKLNDLCFTNVYADSFVIRGDEVRQIAPGQTGKIADYNYKLPDDFTGCVIAWNSNNLDSKVGGNYNYLYRLFRKSNLKPFERDISTEIYQAGSTPCNGVEGFNCYFPLQSYGFQPTNGVGYQPYRVVVLSFELLHAPATVCGPKKSTNLVKNKCVNFNFNGLTGTGVLTESNKKFLPFQQFGRDIADTTDAVRDPQTLEILDITPCSFGGVSVITPGTNTSNQVAVLYQGVNCTEVPVAIHADQLTPTWRVYSTGSNVFQTRAGCLIGAEHVNNSYECDIPIGAGICASYQTQTNSPRRARSVASQSIIAYTMSLGAENSVAYSNNSIAIPTNFTISVTTEILPVSMTKTSVDCTMYICGDSTECSNLLLQYGSFCTQLNRALTGIAVEQDKNTQEVFAQVKQIYKTPPIKDFGGFNFSQILPDPSKPSKRSFIEDLLFNKVTLADAGFIKQYGDCLGDIAARDLICAQKFNGLTVLPPLLTDEMIAQYTSALLAGTITSGWTFCAGAALQIPFAMQMAYRFNGIGVTQNVLYENQKLIANQFNSAIGKIQDSLFSTASALGKLQDVVNQNAQALNTLVKQLSSNFGAISSVLNDILSRLDKVEAEVQIDRLITGRLQSLQTYVTQQLIRAAEIRASANLAATKMSECVCGQSKRVDFCGKGYHLMSFPQSAPHGVVFLHVTYVPAQEKNFTTAPAICHDGKAHFPREGVFVSNGTHWFVTQRNFYEPQIITTDNTFVSGNCDVVIGIVNNTVYDPLQPELDS

SEQ ID NO: 3187 - protein, 1147 aa, Artificial Sequence
  SARS-CoV-2/Finland/FIN-313/2020__EPI_ISL_414641 spike protein (1-1147)(G889C_L1034C)
MFVFLVLLPLVSSQCVNLTTRTQLPPAYTNSFTRGVYYPDKVFRSSVLHSTQDLFLPFFSNVTWFHAIHVSGTNGTKRFDNPVLPFNDGVYFASTEKSNIIRGWIFGTTLDSKTQSLLIVNNATNVVIKVCEFQFCNDPFLGVYYHKNNKSWMESEFRVYSSANNCTFEYVSQPFLMDLEGKQGNFKNLREFVFKNIDGYFKIYSKHTPINLVRDLPQGFSALEPLVDLPIGINITRFKTLLALHRSYLTPGDSSSGWTAGAAAYYVGYLQPRTFLLKYNENGTITDAVDCALDPLSETKCTLKSFTVEKGIYQTSNFRVQPTESIVRFPNITNLCPFGEVFNATRFASVYAWNRKRISNCVADYSVLYNSASFSTFKCYGVSPTKLNDLCFTNVYADSFVIRGDEVRQIAPGQTGKIADYNYKLPDDFTGCVIAWNSNNLDSKVGGNYNYLYRLFRKSNLKPFERDISTEIYQAGSTPCNGVEGFNCYFPLQSYGFQPTNGVGYQPYRVVVLSFELLHAPATVCGPKKSTNLVKNKCVNFNFNGLTGTGVLTESNKKFLPFQQFGRDIADTTDAVRDPQTLEILDITPCSFGGVSVITPGTNTSNQVAVLYQGVNCTEVPVAIHADQLTPTWRVYSTGSNVFQTRAGCLIGAEHVNNSYECDIPIGAGICASYQTQTNSPRRARSVASQSIIAYTMSLGAENSVAYSNNSIAIPTNFTISVTTEILPVSMTKTSVDCTMYICGDSTECSNLLLQYGSFCTQLNRALTGIAVEQDKNTQEVFAQVKQIYKTPPIKDFGGFNFSQILPDPSKPSKRSFIEDLLFNKVTLADAGFIKQYGDCLGDIAARDLICAQKFNGLTVLPPLLTDEMIAQYTSALLAGTITSGWTFCAGAALQIPFAMQMAYRFNGIGVTQNVLYENQKLIANQFNSAIGKIQDSLSSTASALGKLQDVVNQNAQALNTLVKQLSSNFGAISSVLNDILSRLDKVEAEVQIDRLITGRLQSLQTYVTQQLIRAAEIRASANLAATKMSECVCGQSKRVDFCGKGYHLMSFPQSAPHGVVFLHVTYVPAQEKNFTTAPAICHDGKAHFPREGVFVSNGTHWFVTQRNFYEPQIITTDNTFVSGNCDVVIGIVNNTVYDPLQPELDS

SEQ ID NO: 3188 - protein, 1147 aa, Artificial Sequence
  SARS-CoV-2/Netherlands/ZuidHolland_2/2020__EPI_ISL_414556 spike protein (1-1147)(G889C_L1034C)
MFVFLVLLPLVSSQCVNLTTRTQLPPAYTNSFTRGVYYPDKVFRSSVLHSTQDLFLPFFSNVTWFHAIHVSGTNGTKRFDNPVLPFNDGVYFASTEKSNIIRGWIFGTTLDSKTQSLLIVNNATNVVIKVCEFQFCNDPFLGVYYHKNNKSWMESEFRVYSSANNCTFEYVSQPFLMDLEGKQGNFKNLREFVFKNIDGYFKIYSKHTPINLVRDLPQGFSALEPLVDLPIGINITRFQTLLALHRSYLTPGDSSSGWTAGAAAYYVGYLQPRTFLLKYNENGTITDAVDCALDPLSETKCTLKSFTVEKGIYQTSNFRVQPTESIVRFPNITNLCPFGEVFNATRFASVYAWNRKRISNCVADYSVLYNSASFSTFKCYGVSPTKLNDLCFTNVYADSFVIRGDEVRQIAPGQTGKIADYNYKLPDDFTGCVIAWNSNNLDSKVGGNYNYLYRLFRKSNLKPFERDISTEIYQAGSTPCNGVEGFNCYFPLQSYGFQPTNGVGYQPYRVVVLSFELLHAPATVCGPKKSTNLVKNKCVNFNFNGLTGTGVLTESNKKFLPFQQFGRDIADTTDAVRDPQTLEILDITPCSFGGVSVITPGTNTSNQVAVLYQGVNCTEVPVAIHADQLTPTWRVYSTGSNVFQTRAGCLIGAEHVNNSYECDIPIGAGICASYQTQTNSPRRARSVASQSIIAYTMSLGAENSVAYSNNSIAIPTNFTISVTTEILPVSMTKTSVDCTMYICGDSTECSNLLLQYGSFCTQLNRALTGIALEQDKNTQEVFAQVKQIYKTPPIKDFGGFNFSQILPDPSKPSKRSFIEDLLFNKVTLADAGFIKQYGDCLGDIAARDLICAQKFNGLTVLPPLLTDEMIAQYTSALLAGTITSGWTFCAGAALQIPFAMQMAYRFNGIGVTQNVLYENQKLIANQFNSAIGKIQDSLSSTASALGKLQDVVNQNAQALNTLVKQLSSNFGAISSVLNDILSRLDKVEAEVQIDRLITGRLQSLQTYVTQQLIRAAEIRASANLAATKMSECVCGQSKRVDFCGKGYHLMSFPQSAPHGVVFLHVTYVPAQEKNFTTAPAICHDGKAHFPREGVFVSNGTHWFVTQRNFYEPQIITTDNTFVSGNCDVVIGIVNNTVYDPLQPELDS

SEQ ID NO: 3189 - protein, 1147 aa, Artificial Sequence
  SARS-CoV-2/USA/WA-UW31/2020__EPI_ISL_414618 spike protein (1-1147)(G889C_L1034C)
MFVFLVLLPLVSSQCVNLTTRTQLPPAYTNSFTRGVYYPDKVFRSSVLHSTQDLFLPFFSNVTWFHAIHVSGTNGTKRFDNPVLPFNDGVYFASTEKSNIIRGWIFGTTLDSKTQSLLIVNNATNVVIKVCEFQFCNDPFLGVYYHKNNKSWMESEFRVYSSANNCTFEYVSQPFLMDLEGKQGNFKNLREFVFKNIDGYFKIYSKHTPINLVRDLPQGFSALEPLVDLPIGINITRFQTLLALHRSYLTPGDSSSGWTAGAAAYYVGYLQPRTFLLKYNENGTITDAVDCALDPLSETKCTLKSFTVEKGIYQTSNFRVQPTESIVRFPNITNLCPFGEVFNATRFASVYAWNRKRISNCVADYSVLYNSASFSTFKCYGVSPTKLNDLCFTNVYADSFVIRGDEVRQIAPGQTGKIADYNYKLPDDFTGCVIAWNSNNLDSKVGGNYNYLYRLFRKSNLKPFERDISTEIYQAGSTPCNGAEGFNCYFPLQSYGFQPTNGVGYQPYRVVVLSFELLHAPATVCGPKKSTNLVKNKCVNFNFNGLTGTGVLTESNKKFLPFQQFGRDIADTTDAVRDPQTLEILDITPCSFGGVSVITPGTNTSNQVAVLYQDVNCTEVPVAIHADQLTPTWRVYSTGSNVFQTRAGCLIGAEHVNNSYECDIPIGAGICASYQTQTNSPRRARSVASQSIIAYTMSLGAENSVAYSNNSIAIPTNFTISVTTEILPVSMTKTSVDCTMYICGDSTECSNLLLQYGSFCTQLNRALTGIAVEQDKNTQEVFAQVKQIYKTPPIKDFGGFNFSQILPDPSKPSKRSFIEDLLFNKVTLADAGFIKQYGDCLGDIAARDLICAQKFNGLTVLPPLLTDEMIAQYTSALLAGTITSGWTFCAGAALQIPFAMQMAYRFNGIGVTQNVLYENQKLIANQFNSAIGKIQDSLSSTASALGKLQDVVNQNAQALNTLVKQLSSNFGAISSVLNDILSRLDKVEAEVQIDRLITGRLQSLQTYVTQQLIRAAEIRASANLAATKMSECVCGQSKRVDFCGKGYHLMSFPQSAPHGVVFLHVTYVPAQEKNFTTAPAICHDGKAHFPREGVFVSNGTHWFVTQRNFYEPQIITTDNTFVSGNCDVVIGIVNNTVYDPLQPELDS

SEQ ID NO: 3190 - protein, 1147 aa, Artificial Sequence
  SARS-CoV-2/South Korea/SNU01/2020__EPI_ISL_411929 spike protein (1-1147)(G889C_L1034C)
MFVFLVLLPLVSSQCVNLTTRTQLPPAYTNSFTRGVYYPDKVFRSSVLHSTQDLFLPFFSNVTWFHAIHVSGTNGTKRFDNPVLPFNDGVYFASTEKSNIIRGWIFGTTLDSKTQSLLIVNNATNVVIKVCEFQFCNDPFLGVYYHKNNKSWMESEFRVYSSANNCTFEYVSQPFLMDLEGKQGNFKNLREFVFKNIDGYFKIYSKHTPINLVRDLPQGFWALEPLVDLPIGINITRFQTLLALHRSYLTPGDSSSGWTAGAAAYYVGYLQPRTFLLKYNENGTITDAVDCALDPLSETKCTLKSFTVEKGIYQTSNFRVQPTESIVRFPNITNLCPFGEVFNATRFASVYAWNRKRISNCVADYSVLYNSASFSTFKCYGVSPTKLNDLCFTNVYADSFVIRGDEVRQIAPGQTGKIADYNYKLPDDFTGCVIAWNSNNLDSKVGGNYNYLYRLFRKSNLKPFERDISTEIYQAGSTPCNGVEGFNCYFPLQSYGFQPTNGVGYQPYRVVVLSFELLHAPATVCGPKKSTNLVKNKCVNFNFNGLTGTGVLTESNKKFLPFQQFGRDIADTTDAVRDPQTLEILDITPCSFGGVSVITPGTNTSNQVAVLYQDVNCTEVPVAIHADQLTPTWRVYSTGSNVFQTRAGCLIGAEHVNNSYECDIPIGAGICASYQTQTNSPRRARSVASQSIIAYTMSLGAENSVAYSNNSIAIPTNFTISVTTEILPVSMTKTSVDCTMYICGDSTECSNLLLQYGSFCTQLNRALTGIAVEQDKNTQEVFAQVKQIYKTPPIKDFGGFNFSQILPDPSKPSKRSFIEDLLFNKVTLADAGFIKQYGDCLGDIAARDLICAQKFNGLTVLPPLLTDEMIAQYTSALLAGTITSGWTFCAGAALQIPFAMQMAYRFNGIGVTQNVLYENQKLIANQFNSAIGKIQDSLSSTASALGKLQDVVNQNAQALNTLVKQLSSNFGAISSVLNDILSRLDKVEAEVQIDRLITGRLQSLQTYVTQQLIRAAEIRASANLAATKMSECVCGQSKRVDFCGKGYHLMSFPQSAPHGVVFLHVTYVPAQEKNFTTAPAICHDGKAHFPREGVFVSNGTHWFVTQRNFYEPQIITTDNTFVSGNCDVVIGIVNNTVYDPLQPELDS

SEQ ID NO: 3191 - protein, 1147 aa, Artificial Sequence
  SARS-CoV-2/China/WF0004/2020__EPI_ISL_413694 spike protein (1-1147)(G889C_L1034C)
MFVFLVLLPLVSSQCVNLTTRTQLPPAYTNSFTRGVYYPDKVFRSSVLHSTQDLFLPFFSNVTWFHAIHVSGTNGTKRFDNPVLPFNDGVYFASTEKSNIIRGWIFGTTLDSKTQSLLIVNNATNVVIKVCEFQFCNDPFLGVYYHKNNKSWTESEFRVYSSANNCTFEYVSQPFLMDLEGKQGNFKNLREFVFKNIDGYFKIYSKHTPINLVRDLPQGFSALEPLVDLPIGINITRFQTLLALHRSYLTPGDSSSGWTAGAAAYYVGYLQPRTFLLKYNENGTITDAVDCALDPLSETKCTLKSFTVEKGIYQTSNFRVQPTESIVRFPNITNLCPFGEVFNATRFASVYAWNRKRISNCVADYSVLYNSASFSTFKCYGVSPTKLNDLCFTNVYADSFVIRGDEVRQIAPGQTGKIADYNYKLPDDFTGCVIAWNSNNLDSKVGGNYNYLYRLFRKSNLKPFERDISTEIYQAGSTPCNGVEGFNCYFPLQSYGFQPTNGVGYQPYRVVVLSFELLHAPATVCGPKKSTNLVKNKCVNFNFNGLTGTGVLTESNKKFLPFQQFGRDIADTTDAVRDPQTLEILDITPCSFGGVSVITPGTNTSNQVAVLYQDVNCTEVPVAIHADQLTPTWRVYSTGSNVFQTRAGCLIGAEHVNNSYECDIPIGAGICASYQTQTNSPRRARSVASQSIIAYTMSLGAENSVAYSNNSIAIPTNFTISVTTEILPVSMTKTSVDCTMYICGDSTECSNLLLQYGSFCTQLNRALTGIAVEQDKNTQEVFAQVKQIYKTPPIKDFGGFNFSQILPDPSKPSKRSFIEDLLFNKVTLADAGFIKQYGDCLGDIAARDLICAQKFNGLTVLPPLLTDEMIAQYTSALLAGTITSGWTFCAGAALQIPFAMQMAYRFNGIGVTQNVLYENQKLIANQFNSAIGKIQDSLSSTASALGKLQDVVNQNAQALNTLVKQLSSNFGAISSVLNDILSRLDKVEAEVQIDRLITGRLQSLQTYVTQQLIRAAEIRASANLAATKMSECVCGQSKRFDFCGKGYHLMSFPQSAPHGVVFLHVTYVPAQEKNFTTAPAICHDGKAHFPREGVFVSNGTHWFVTQRNFYEPQIITTDNTFVSGNCDVVIGIVNNTVYDPLQPELDS

SEQ ID NO: 3192 - protein, 1147 aa, Artificial Sequence
  SARS-CoV-2/China/WF0028/2020__EPI_ISL_413791 spike protein (1-1147)(G889C_L1034C)
MFVFLVLLPLVSSQCVNLTTRTQLPPAYTNSFTRGVYYPDKVFRSSVLHSTQDLFLPFFSNVTWFHAIHVSGTNGTKRFDNPVLPFNDGVYFASTEKSNIIRGWIFGTTLDSKTQSLLIVNNATNVVIKVCEFQFCNDPFLGVYYHKNNKSWMESEFRVYSSANNCTFEYVSQPFLMDLEGKQGNFKNLREFVFKNIDGYFKIYSKHTPINLVRDLPQGFSALEPLVDLPIGINITRFQTLLALHRSYLTPGDSSSGWTAGAAAYYVGYLQPRTFLLKYNENGTITDAVDCALDPLSETKCTLKSFTVEKGIYQTSNFRVQPTESIVRFPNITNLCPFGEVFNATRFASVYAWNRKRISNCVADYSVLYNSASFSTFKCYGVSPTKLNDLCFTNVYADSFVIRGDEVRQIAPGQTGKIADYNYKLPDDFTGCVIAWNSNNLDSKVGGNYNYLYRLFRKSNLKPFERDISTEIYQAGSTPCNGVEGFNCYFPLQSYGFQPTNGVGYQPYRVVVLSFELLHAPATVCGPKKSTNLVKNKCVNFNFNGLTGTGVLTESNKKFLPFQQFGRDIADTTDAVRDPQTLEILDITPCSFGGVSVITPGTNTSNQVAVLYQDVNCTEVPVAIHADQLTPTWRVYSTGSNVFQTRAGCLIGAEHVNNSYECDIPIGAGICASYQTQTNSPRRARSVASQSIIAYTMSLGAENSVAYSNNSIAIPTNFTISVTTEILPVSMTKTSVDCTMYICGDSTECSNLLLQYGSFCTQLNRALTGIAVEQDKNTQEVFAQVKQIYKTPPIKDFGGFNFSQILPDPSKPSKRSFIEDLLFNKVTLADAGFIKQYGDCLGDIAARDLICAQKFNGLTVLPPLLTDEMIAQYTSALLAGTITSGWTFCAGAALQIPFAMQMAYRFNGIGVTQNVLYENQKLIANQFNSAIGKIQDSLSSTASALGKLQDVVNQNAQALNTLVKQLSSNFGAISSVLNDILSRLDKVEAEVQIDRLITGRLQSLQTYVTQQLIRAAEIRASANLAATKMSECVCGQSKRVDFCGKGYHLMSFPQSAPHGVVFLHVTYVPAQEKNFTTAPAICHDGKAHFPREGVFVSNGTHWFVTQRNFYEPQIITTDNTFVSGNCDVVIGIVNNTVYDPLQPELES

SEQ ID NO: 3193 - protein, 1147 aa, Artificial Sequence
  SARS-CoV-2/2019-nCoV/USA-CruiseA-18/2020__MT159716.1 spike protein (1-1147)(G889C_L1034C)
MFVFLVLLPLVSSQCVNLTTRTQLPPAYTNSFTRGVYYPDKVFRSSVLHSTQDLFLPFFSNVTWFHAIHVSGTNGTKRFDNPVLPFNDGVYFASTEKSNIIRGWIFGTTLDSKTQSLLIVNNATNVVIKVCEFQFCNDPFLGVYYHKNNKSWMESELRVYSSANNCTFEYVSQPFLMDLEGKQGNFKNLREFVFKNIDGYFKIYSKHTPINLVRDLPQGFSALEPLVDLPIGINITRFQTLLALHRSYLTPGDSSSGWTAGAAAYYVGYLQPRTFLLKYNENGTITDAVDCALDPLSETKCTLKSFTVEKGIYQTSNFRVQPTESIVRFPNITNLCPFGEVFNATRFASVYAWNRKRISNCVADYSVLYNSASFSTFKCYGVSPTKLNDLCFTNVYADSFVIRGDEVRQIAPGQTGKIADYNYKLPDDFTGCVIAWNSNNLDSKVGGNYNYLYRLFRKSNLKPFERDISTEIYQAGSTPCNGVEGFNCYFPLQSYGFQPTNGVGYQPYRVVVLSFELLHAPATVCGPKKSTNLVKNKCVNFNFNGLTGTGVLTESNKKFLPFQQFGRDIADTTDAVRDPQTLEILDITPCSFGGVSVITPGTNTSNQVAVLYQDVNCTEVPVAIHADQLTPTWRVYSTGSNVFQTRAGCLIGAEHVNNSYECDIPIGAGICASYQTQTNSPRRARSVASQSIIAYTMSLGAENSVAYSNNSIAIPTNFTISVTTEILPVSMTKTSVDCTMYICGDSTECSNLLLQYGSFCTQLNRALTGIAVEQDKNTQEVFAQVKQIYKTPPIKDFGGFNFSQILPDPSKPSKRSFIEDLLFNKVTLADAGFIKQYGDCLGDIAARDLICAQKFNGLTVLPPLLTDEMIAQYTSALLAGTITSGWTFCAGAALQIPFAMQMAYRFNGIGVTQNVLYENQKLIANQFNSAIGKIQDSLSSTASALGKLQDVVNQNAQALNTLVKQLSSNFGAISSVLNDILSRLDKVEAEVQIDRLITGRLQSLQTYVTQQLIRAAEIRASANLAATKMSECVCGQSKRVDFCGKGYHLMSFPQSAPHGVVFLHVTYVPAQEKNFTTAPAICHDGKAHFPREGVFVSNGTHWFVTQRNFYEPQIITTDNTFVSGNCDVVIGIVNNTVYDPLQPELDS

SEQ ID NO: 3194 - protein, 1147 aa, Artificial Sequence
  SARS-CoV-2/SARS-CoV-2/Yunnan-01/human/2020/CHN__MT049951.1 spike protein (1-1147)(G889C_L1034C)
MFVFLVLLPLVSSQCVNLTTRTQLPPANTNSFTRGVYYPDKVFRSSVLHSTQDLFLPFFSNVTWFHAIHVSGTNGTKRFDNPVLPFNDGVYFASTEKSNIIRGWIFGTTLDSKTQSLLIVNNATNVVIKVCEFQFCNDPFLGVYYHKNNKSWMESEFRVYSSANNCTFEYVSQPFLMDLEGKQGNFKNLREFVFKNIDGYFKIYSKHTPINLVRDLPQGFSALEPLVDLPIGINITRFQTLLALHRSYLTPGDSSSGWTAGAAAYYVGYLQPRTFLLKYNENGTITDAVDCALDPLSETKCTLKSFTVEKGIYQTSNFRVQPTESIVRFPNITNLCPFGEVFNATRFASVYAWNRKRISNCVADYSVLYNSASFSTFKCYGVSPTKLNDLCFTNVYADSFVIRGDEVRQIAPGQTGKIADYNYKLPDDFTGCVIAWNSNNLDSKVGGNYNYLYRLFRKSNLKPFERDISTEIYQAGSTPCNGVEGFNCYFPLQSYGFQPTNGVGYQPYRVVVLSFELLHAPATVCGPKKSTNLVKNKCVNFNFNGLTGTGVLTESNKKFLPFQQFGRDIADTTDAVRDPQTLEILDITPCSFGGVSVITPGTNTSNQVAVLYQDVNCTEVPVAIHADQLTPTWRVYSTGSNVFQTRAGCLIGAEHVNNSYECDIPIGAGICASYQTQTNSPRRARSVASQSIIAYTMSLGAENSVAYSNNSIAIPTNFTISVTTEILPVSMTKTSVDCTMYICGDSTECSNLLLQYGSFCTQLNRALTGIAVEQDKNTQEVFAQVKQIYKTPPIKDFGGFNFSQILPDPSKPSKRSFIEDLLFNKVTLADAGFIKQYGDCLGDIAARDLICAQKFNGLTVLPPLLTDEMIAQYTSALLAGTITSGWTFCAGAALQIPFAMQMAYRFNGIGVTQNVLYENQKLIANQFNSAIGKIQDSLSSTASALGKLQDVVNQNAQALNTLVKQLSSNFGAISSVLNDILSRLDKVEAEVQIDRLITGRLQSLQTYVTQQLIRAAEIRASANLAATKMSECVCGQSKRVDFCGKGYHLMSFPQSAPHGVVFLHVTYVPAQEKNFTTAPAICHDGKAHFPREGVFVSNGTHWFVTQRNFYEPQIITTDNTFVSGNCDVVIGIVNNTVYDPLQPELDS

SEQ ID NO: 3195 - protein, 1147 aa, Artificial Sequence
  SARS-CoV-2/USA/WA-UW292/2020__EPI_ISL_418077 spike protein (1-1147)(G889C_L1034C)
MFVFLVLLPLVSSQCVNLTTRTQLPPAYTNSFTRGVYYPDKVFRSSVLHSTQDLFLPFFSNVTWFHAIHVSGTNGTKRFDNPVLPFNDGVYFASTEKSNIIRGWIFGTTLDSKTQSLLIVNNATNVVIKVCEFQFCNDPFLGVYYHKNNKSWMESEFRVYSSANNCTFEYVSQPFLMDLEGKQGNFKNLREFVFKNIDGYFKIYSKHTPINLVRDLPQGFSALEPLVDLPIGINITRFQTLLALHRSYLTPGDSSSGWTAGAAAYYVGYLQPRTFLLKYNENGTITDAVDCALDPLSETKCTLKSFTVEKGIYQTSNFRVQPTESIVRFPNITNLCPFGEVFNATRFASVYAWNRKRISNCVADYSVLYNSASFSTFKCYGVSPTKLNDLCFTNVYADSFVIRGDEVRQIAPGQTGKIADYNYKLPDDFTGCVIAWNSNNLDSKVGGNYNYLYRLFRKSNLKPFERDISTEIYQASSTPCNGVEGFNCYFPLQSYGFQPTNGVGYQPYRVVVLSFELLHAPATVCGPKKSTNLVKNKCVNFNFNGLTGTGVLTESNKKFLPFQQFGRDIADTTDAVRDPQTLEILDITPCSFGGVSVITPGTNTSNQVAVLYQDVNCTEVPVAIHADQLTPTWRVYSTGSNVFQTRAGCLIGAEHVNNSYECDIPIGAGICASYQTQTNSPRRARSVASQSIIAYTMSLGAENSVAYSNNSIAIPTNFTISVTTEILPVSMTKTSVDCTMYICGDSTECSNLLLQYGSFCTQLNRALTGIAVEQDKNTQEVFAQVKQIYKTPPIKDFGGFNFSQILPDPSKPSKRSFIEDLLFNKVTLADAGFIKQYGDCLGDIAARDLICAQKFNGLTVLPPLLTDEMIAQYTSALLAGTITSGWTFCAGAALQIPFAMQMAYRFNGIGVTQNVLYENQKLIANQFNSAIGKIQDSLSSTASALGKLQDVVNQNAQALNTLVKQLSSNFGAISSVLNDILSRLDKVEAEVQIDRLITGRLQSLQTYVTQQLIRAAEIRASANLAATKMSECVCGQSKRVDFCGKGYHLMSFPQSAPHGVVFLHVTYVPAQEKNFTTAPAICHDGKAHFPREGVFVSNGTHWFVTQRNFYEPQIITTDNTFVSGNCDVVIGIVNNTVYDPLQPELDS

SEQ ID NO: 3196 - protein, 1147 aa, Artificial Sequence
  SARS-CoV-2/Iceland/192/2020__EPI_ISL_417819 spike protein (1-1147)(G889C_L1034C)
MFVFFVLLPLVSSQCVNLTTRTQLPPAYTNSFTRGVYYPDKVFRSSVLHSTQDLFLPFFSNVTWFHAIHVSGTNGTKRFDNPVLPFNDGVYFASTEKSNIIRGWIFGTTLDSKTQSLLIVNNATNVVIKVCEFQFCNDPFLGVYYHKNNKSWMESEFRVYSSANNCTFEYVSQPFLMDLEGKQGNFKNLREFVFKNIDGYFKIYSKHTPINLVRDLPQGFSALEPLVDLPIGINITRFQTLLALHRSYLTPGDSSSGWTAGAAAYYVGYLQPRTFLLKYNENGTITDAVDCALDPLSETKCTLKSFTVEKGIYQTSNFRVQPTESIVRFPNITNLCPFGEVFNATRFASVYAWNRKRISNCVADYSVLYNSASFSTFKCYGVSPTKLNDLCFTNVYADSFVIRGDEVRQIAPGQTGKIADYNYKLPDDFTGCVIAWNSNNLDSKVGGNYNYLYRLFRKSNLKPFERDISTEIYQAGSTPCNGVEGFNCYFPLQSYGFQPTNGVGYQPYRVVVLSFELLHAPATVCGPKKSTNLVKNKCVNFNFNGLTGTGVLTESNKKFLPFQQFGRDIADTTDAVRDPQTLEILDITPCSFGGVSVITPGTNTSNQVAVLYQGVNCTEVPVAIHADQLTPTWRVYSTGSNVFQTRAGCLIGAEHVNNSYECDIPIGAGICASYQTQTNSPRRARSVASQSIIAYTMSLGAENSVAYSNNSIAIPTNFTISVTTEILPVSMTKTSVDCTMYICGDSTECSNLLLQYGSFCTQLNRALTGIAVEQDKNTQEVFAQVKQIYKTPPIKDFGGFNFSQILPDPSKPSKRSFIEDLLFNKVTLADAGFIKQYGDCLGDIAARDLICAQKFNGLTVLPPLLTDEMIAQYTSALLAGTITSGWTFCAGAALQIPFAMQMAYRFNGIGVTQNVLYENQKLIANQFNSAIGKIQDSLSSTASALGKLQDVVNQNAQALNTLVKQLSSNFGAISSVLNDILSRLDKVEAEVQIDRLITGRLQSLQTYVTQQLIRAAEIRASANLAATKMSECVCGQSKRVDFCGKGYHLMSFPQSAPHGVVFLHVTYVPAQEKNFTTAPAICHDGKAHFPREGVFVSNGTHWFVTQRNFYEPQIITTDNTFVSGNCDVVIGIVNNTVYDPLQPELDS

SEQ ID NO: 3197 - protein, 1147 aa, Artificial Sequence
  SARS-CoV-2/Belgium/ULG-6939/2020__EPI_ISL_417020 spike protein (1-1147)(G889C_L1034C)
MFVFLVLLPLVSSQCVNLTTRTQLPPAYTNSFTRGVYYPDKVFRSSVLHSTQDLFLPFFSNVTWFHAIHVSGTNGTKRFDNPVLPFNDGVYFASTEKSNIIRGWIFGTTLDSKTQSLLIVNNATNVVIKVCEFQFCNDPFLGVYYHKNNKSWMESEFRVYSSANNCTFEYVSQPFLMDLEGKQGNFKNLREFVFKNIDGYFKIYSKHTPINLVRDLPQGFSALEPLVDLPIGINITRFQTLLALHRSYLTPGDSSSGWTAGAAAYYVGYLQPRTFLLKYNENGTITDAVDCALDPLSETKCTLKSFTVEKGIYQTSNFRVQPTESIVRFPNITNLCPFGEVFNATRFASVYAWNRKRISNCVADYSVLYNSASFSTFKCYGVSPTKLNDLCFTNVYADSFVIRGDEVRQIAPGQTGKIADYNYKLPDDFTGCVIAWNSNNLDSKVGGNYNYLYRLFRKSNLKPFERDISTEIYQAGSTPCNGVEGFNCYFPLQSYGFQPTNGVGYQPYRVVVLSFELLHAPATVCGPKKSTNLVKNKCVNFNFNGLTGTGVLTESNKKFLPFQQFGRDIADTTDAVRDPQTLEILDITPCSFGGVSVITPGTNTSNQVAVLYQGVNCTEVPVAIHADQLTPTWRVYSTGSNVFQTRAGCLIGAEHVNNSYECDIPIGAGICASYQTQTNSPRRARSVASQSIIAYTMSLGAENSVVYSNNSIAIPTNFTISVTTEILPVSMTKTSVDCTMYICGDSTECSNLLLQYGSFCTQLNRALTGIAVEQDKNTQEVFAQVKQIYKTPPIKDFGGFNFSQILPDPSKPSKRSFIEDLLFNKVTLADAGFIKQYGDCLGDIAARDLICAQKFNGLTVLPPLLTDEMIAQYTSALLAGTITSGWTFCAGAALQIPFAMQMAYRFNGIGVTQNVLYENQKLIANQFNSAIGKIQDSLSSTASALGKLQDVVNQNAQALNTLVKQLSSNFGAISSVLNDILSRLDKVEAEVQIDRLITGRLQSLQTYVTQQLIRAAEIRASANLAATKMSECVCGQSKRVDFCGKGYHLMSFPQSAPHGVVFLHVTYVPAQEKNFTTAPAICHDGKAHFPREGVFVSNGTHWFVTQRNFYEPQIITTDNTFVSGNCDVVIGIVNNTVYDPLQPELDS

SEQ ID NO: 3198 - protein, 1147 aa, Artificial Sequence
  SARS-CoV-2/France/HF2496/2020__EPI_ISL_418231 spike protein (1-1147)(G889C_L1034C)
MFVFLVLLPLVSSQCVNLTTRTQLPPAYTNSFTRGVYYPDKVFRSSVLHSTQDLFLPFFSNVTWFHAIHVSGTNGTKRFDNPVLPFNDGVYFASTEKSNIIRGWIFGTTLDSKTQSLLIVNNATNVVIKVCEFQFCNDPFLGVYYHKNNKSWMESEFRVYSSANNCTFEYVSQPFLMDLEGKQGNFKNLREFVFKNIDGYFKIYSKHTPINLVRDLPQGFSALEPLVDLPIGINITRFQTLLALHRSYLTPGDSSSGWTAGAAAYYVGYLQPRTFLLKYNENGTITDAVDCALDPLSETKCTLKSFTVEKGIYQTSNFRVQPTESIVRFPNITNLCPFGEVFNATRFASVYAWNRKRISNCVADYSVLYNSASFSTFKCYGVSPTKLNDLCFTNVYADSFVIRGDEVRQIAPGQTGKIADYNYKLPDDFTGCVIAWNSNNLDSKVGGNYNYLYRLFRKSNLKPFERDISTEIYQAGSTPCNGVEGFNCYFPLQSYGFQPTNGVGYQPYRVVVLSFELLHAPATVCGPKKSTNLVKNKCVNFNFNGLTGTGVLTESNKKFLPFQQFGRDIADTTDAVRDPQTLEILDITPCSFGGVSVITPGTNTSNQVAVLYQGVNCTEVPVAIHADQLTPTWRVYSTGSNVFQTRAGCLIGAEHVNNSYECDIPIGAGICASYQTQTNSPRRARSVASQSIIAYTMSLGAENSVAYSNNSIAIPTNFTISVTTEILPVSMTKTSVDCTMYICGDSTECSNLLLQYGSFCTQLNRALTGIAVEQDKNTQEVFAQVKQIYKTPPIKDFGGFNFSQILPDPSKPSKRSFIEDLLFNKVTLADAGFIKQYGDCLGDIVARDLICAQKFNGLTVLPPLLTDEMIAQYTSALLAGTITSGWTFCAGAALQIPFAMQMAYRFNGIGVTQNVLYENQKLIANQFNSAIGKIQDSLSSTASALGKLQDVVNQNAQALNTLVKQLSSNFGAISSVLNDILSRLDKVEAEVQIDRLITGRLQSLQTYVTQQLIRAAEIRASANLAATKMSECVCGQSKRVDFCGKGYHLMSFPQSAPHGVVFLHVTYVPAQEKNFTTAPAICHDGKAHFPREGVFVSNGTHWFVTQRNFYEPQIITTDNTFVSGNCDVVIGIVNNTVYDPLQPELDS

SEQ ID NO: 3199 - protein, 1147 aa, Artificial Sequence
  SARS-CoV-2/USA/WA-UW291/2020__EPI_ISL_418076 spike protein (1-1147)(G889C_L1034C)
MFVFLVLLPLVSSQCVNLTTRTQLPPAYTNSFTRGVYYPDKVFRSSVLHSTQDLFLPFFSNVTWFHAIHVSGTNGTKRFDNPVLPFNDGVYFASTEKSNIIRGWIFGTTLDSKTQSLLIVNNATNVVIKVCEFQFCNDPFLGVYYHKNNKSWMESEFRVYSSANNCTFEYVSQPFLMDLEGKQGNFKNLREFVFKNIDGYFKIYSKHTPINLVRDLPQGFSALEPLVDLPIGINITRFQTLLALHRSYLTPGDSSSGWTAGAAAYYVGYLQPRTFLLKYNENGTITDAVDCALDPLSETKCTLKSFTVEKGIYQTSNFRVQPTESIVRFPNITNLCPFGEVFNATRFASVYAWNRKRISNCVADYSVLYNSASFSTFKCYGVSPTKLNDLCFTNVYADSFVIRGDEVRQIAPGQTGKIADYNYKLPDDFTGCVIAWNSNNLDSKVGGNYNYLYRLFRKSNLKPFERDISTEIYQAGSTPCNGVEGFNCYFPLQSYGFQPTNGVGYQPYRVVVLSFELLHAPATVCGPKKSTNLVKNKCVNFNFNGLTGTGVLTESNKKFLPFQQFGRDIADTTDAVRDPQTLEILDITPCSFGGVSVITPGTNTSNQVAVLYQGVNCTEVPVAIHADQLTPTWRVYSTGSNVFQTRAGCLIGAEHVNNSYECDIPIGAGICASYQTQTNSPRRARSVASQSIIAYTMSLGAENSVAYSNNSIAIPTNFTISVTTEILPVSMTKTSVDCTMYICGDSTECSNLLLQYGSFCTQLNRALTGIAVEQDKNTQEVFAQVKQIYKTPPIKDFGGFNFSQILPDPSKPSKRSFIEDLLFNKVTLADAGFIKQYGDCLGDIAARDLICAQKFNGLTVLPPLLTDEMIAQYTSALLAGTITSGWTFCAGAALQIPFAMQMAYRFNGIGVTQNVLYENQKLIANQFNSAIGKIQYSLSSTASALGKLQDVVNQNAQALNTLVKQLSSNFGAISSVLNDILSRLDKVEAEVQIDRLITGRLQSLQTYVTQQLIRAAEIRASANLAATKMSECVCGQSKRVDFCGKGYHLMSFPQSAPHGVVFLHVTYVPAQEKNFTTAPAICHDGKAHFPREGVFVSNGTHWFVTQRNFYEPQIITTDNTFVSGNCDVVIGIVNNTVYDPLQPELDS

SEQ ID NO: 3200 - protein, 1147 aa, Artificial Sequence; identical to SEQ ID NO: 3163
  SARS-CoV-2/Portugal/PT0034/2020__EPI_ISL_418019 spike protein (1-1147)(G889C_L1034C)

SEQ ID NO: 3201 - protein, 1147 aa, Artificial Sequence; identical to SEQ ID NO: 3155
  SARS-CoV-2/Iceland/202/2020__EPI_ISL_417750 spike protein (1-1147)(G889C_L1034C)

SEQ ID NO: 3202 - protein, 1147 aa, Artificial Sequence
  SARS-CoV-2/USA/WA-UW261/2020__EPI_ISL_418046 spike protein (1-1147)(G889C_L1034C)
MFVFLVLLPLVSSQCVNLTTRTQLPPAYTNSFTRGVYYPDKVFRSSVLHSTQDLFLPFFSNVTWFHAIHVSGTNGTKRFDNPVLPFNDGVYFASTEKSNIIRGWIFGTTLDSKTQSLLIVNNATNVVIKVCEFQFCNDPFLGVYYHKNNKSWMESEFRVYSSANNCTFEYVSQPFLMDLEGKQGNFKNLREFVFKNIDGYFKIYSKHTPINLVRDLPQGFSALEPLVDLPIGINITRFQTLLALHRSYLTPGDSSSGWTAGAAAYYVGYLQPRTFLLKYNENGTITDAVDCALDPLSETKCTLKSFTVEKGIYQTSNFRVQPTESIVRFPNITNLCPFGEVFNATRFTSVYAWNRKRISNCVADYSVLYNSASFSTFKCYGVSPTKLNDLCFTNVYADSFVIRGDEVRQIAPGQTGKIADYNYKLPDDFTGCVIAWNSNNLDSKVGGNYNYLYRLFRKSNLKPFERDISTEIYQAGSTPCNGVEGFNCYFPLQSYGFQPTNGVGYQPYRVVVLSFELLHAPATVCGPKKSTNLVKNKCVNFNFNGLTGTGVLTESNKKFLPFQQFGRDIADTTDAVRDPQTLEILDITPCSFGGVSVITPGTNTSNQVAVLYQDVNCTEVPVAIHADQLTPTWRVYSTGSNVFQTRAGCLIGAEHVNNSYECDIPIGAGICASYQTQTNSPRRARSVASQSIIAYTMSLGAENSVAYSNNSIAIPTNFTISVTTEILPVSMTKTSVDCTMYICGDSTECSNLLLQYGSFCTQLNRALTGIAVEQDKNTQEVFAQVKQIYKTPPIKDFGGFNFSQILPDPSKPSKRSFIEDLLFNKVTLADAGFIKQYGDCLGDIAARDLICAQKFNGLTVLPPLLTDEMIAQYTSALLAGTITSGWTFCAGAALQIPFAMQMAYRFNGIGVTQNVLYENQKLIANQFNSAIGKIQDSLSSTASALGKLQDVVNQNAQALNTLVKQLSSNFGAISSVLNDILSRLDKVEAEVQIDRLITGRLQSLQTYVTQQLIRAAEIRASANLAATKMSECVCGQSKRVDFCGKGYHLMSFPQSAPHGVVFLHVTYVPAQEKNFTTAPAICHDGKAHFPREGVFVSNGTHWFVTQRNFYEPQIITTDNTFVSGNCDVVIGIVNNTVYDPLQPELDS

SEQ ID NO: 3203 - protein, 1147 aa, Artificial Sequence
  SARS-CoV-2/Portugal/PT0035/2020__EPI_ISL_418020 spike protein (1-1147)(G889C_L1034C)
MFVFLVLLPLVSSQCVNLTTRTQLPPAYTNSFTRGVYYPDKVFRSSVLHSTQDLFLPFFSNVTWFHAIHVSGTNGTKRFDNPVLPFNDGVYFASTEKSNIIRGWIFGTTLDSKTQSLLIVNNATNVVIKVCEFQFCNDPFLGVYYHKNNKSWMESEFRVYSSANNCTFEYVSQPFLMDLEGKQGNFKNLREFVFKNIDGYFKIYSKHTPINLVRDLPQGFSALEPLVDLPIGINITRFQTLLALHRSYLTPGDSSSGWTAGAAAYYVGYLQPRTFLLKYNENGTITDAVDCALDPLSETKCTLKSFTVEKGIYQTSNFRVQPTESIVRFPNITNLCPFGEVFNATRFASVYAWNRKRISNCVADYSVLYNSASFSTFKCYGVSPTKLNDLCFTNVYADSFVIRGDEVRQIAPGQTGKIADYNYKLPDDFTGCVIAWNSNNLDSKVGGNYNYLYRLFRKSNLKPFERDISTEIYQAGSTPCNGVEGFNCYFPLQSYGFQPTNGVGYQPYRVVVLSFELLHAPATVCGPKKSTNLVKNKCVNFNFNGLTGTGVLTESNKKFLPFQQFGRDIADTTDAVRDPQTLEILDITPCSFGGVSVITPGTNTSNQVAVLYQDVNCTEVPVAIHADQLTPTWRVYSTGSNVFQTRAGCLIGAEHVNNSYECDIPIGAGICASYQTQTNSPRRARSVASQSIIAYTMSLGAENSVAYSNNSIAIPTNFTISVTTEILPVSMTKTSVDCTMYICGDSTECSNLLLQYGSFCTQLNRALTGIAVEQDKNTQEVFAQVKQIYKTPPIKDFGGFNFSQILPDPSKPSKRSFIEDLLFNKVTLADAGFIKQYGDCLGDISARDLICAQKFNGLTVLPPLLTDEMIAQYTSALLAGTITSGWTFCAGAALQIPFAMQMAYRFNGIGVTQNVLYENQKLIANQFNSAIGKIQDSLSSTASALGKLQDVVNQNAQALNTLVKQLSSNFGAISSVLNDILSRLDKVEAEVQIDRLITGRLQSLQTYVTQQLIRAAEIRASANLAATKMSECVCGQSKRVDFCGKGYHLMSFPQSAPHGVVFLHVTYVPAQEKNFTTAPAICHDGKAHFPREGVFVSNGTHWFVTQRNFYEPQIITTDNTFVSGNCDVVIGIVNNTVYDPLQPELDS

SEQ ID NO: 3204 - protein, 1147 aa, Artificial Sequence
  SARS-CoV-2/USA/NY-NYUMC7/2020__EPI_ISL_418192 spike protein (1-1147)(G889C_L1034C)
MFVFLVLLPLVSSQCVNLTTRTQLPPAYTNSFTRGVYYPDKVFRSSVLHSTQDLFLPFFSNVTWFHAIHVSGTNGTKRFDNPVLPFNDGVYFASTEKSNIIRGWIFGTTLDSKTQSLLIVNNATNVVIKVCEFQFCNDPFLGVYHHKNNKSWMESEFRVYSSANNCTFEYVSQPFLMDLEGKQGNFKNLREFVFKNIDGYFKIYSKHTPINLVRDLPQGFSALEPLVDLPIGINITRFQTLLALHRSYLTPGDSSSGWTAGAAAYYVGYLQPRTFLLKYNENGTITDAVDCALDPLSETKCTLKSFTVEKGIYQTSNFRVQPTESIVRFPNITNLCPFGEVFNATRFASVYAWNRKRISNCVADYSVLYNSASFSTFKCYGVSPTKLNDLCFTNVYADSFVIRGDEVRQIAPGQTGKIADYNYKLPDDFTGCVIAWNSNNLDSKVGGNYNYLYRLFRKSNLKPFERDISTEIYQAGSTPCNGVEGFNCYFPLQSYGFQPTNGVGYQPYRVVVLSFELLHAPATVCGPKKSTNLVKNKCVNFNFNGLTGTGVLTESNKKFLPFQQFGRDIADTTDAVRDPQTLEILDITPCSFGGVSVITPGTNTSNQVAVLYQGVNCTEVPVAIHADQLTPTWRVYSTGSNVFQTRAGCLIGAEHVNNSYECDIPIGAGICASYQTQTNSPRRARSVASQSIIAYTMSLGAENSVAYSNNSIAIPTNFTISVTTEILPVSMTKTSVDCTMYICGDSTECSNLLLQYGSFCTQLNRALTGIAVEQDKNTQEVFAQVKQIYKTPPIKDFGGFNFSQILPDPSKPSKRSFIEDLLFNKVTLADAGFIKQYGDCLGDIAARDLICAQKFNGLTVLPPLLTDEMIAQYTSALLAGTITSGWTFCAGAALQIPFAMQMAYRFNGIGVTQNVLYENQKLIANQFNSAIGKIQDSLSSTASALGKLQDVVNQNAQALNTLVKQLSSNFGAISSVLNDILSRLDKVEAEVQIDRLITGRLQSLQTYVTQQLIRAAEIRASANLAATKMSECVCGQSKRVDFCGKGYHLMSFPQSAPHGVVFLHVTYVPAQEKNFTTAPAICHDGKAHFPREGVFVSNGTHWFVTQRNFYEPQIITTDNTFVSGNCDVVIGIVNNTVYDPLQPELDS

SEQ ID NO: 3205 - protein, 1147 aa, Artificial Sequence
  SARS-CoV-2/Iceland/189/2020__EPI_ISL_417709 spike protein (1-1147)(G889C_L1034C)
MFVFLVLLPLVSSQCVNLTTRTQLPPAYTNSFTRGVYYPDKVFRSSVLHSTQDLFLPFFSNVTWFHAIHVSGTNGTKRFDNPVLPFNDGVYFASTEKSNIIRGWIFGTTLDSKTQSLLIVNNATNVVIKVCEFQFCNDPFLGVYYHKNNKSWMESEFRVYSSANNCTFEYVSQPFLMDLEGKQGNFKNLREFVFKNIDGYFKIYSKHTPINLVRDLPQGFSALEPLVDLPIGINITRFQTLLALHRSYLTPGDSSSGWTAGAAAYYVGYLQPRTFLLKYNENGTITDAVDCALDPLSETKCTLKSFTVEKGIYQTSNFRVQPTESIVRFPNITNLCPFGEVFNATRFASVYAWNRKRISNCVADYSVLYNSASFSTFKCYGVSPTKLNDLCFTNVYADSFVIRGDEVRQIAPGQTGKIADYNYKLPDDFTGCVIAWNSNNLDSKVGGNYNYLYRLFRKSNLKPFERDISTEIYQAGSTPCNGVEGFNCYFPLQSYGFQPTNGVGYQPYRVVVLSFELLHAPATVCGPKKSTNLVKNKCVNFNFNGLTGTGVLTESNKKFLPFQQFGRDIADTTDAVRDPQTLEILDITPCSFGGVSVITPGTNTSNQVAVLYQGVNCTEVPVAIHADQLTPTWRVYSTGSNVFQTRAGCLIGAEHVNNSYECDIPIGAGICASYQTQTNSPRRARSVASQSIIAYTMSLGAENSVAYSNNSIAIPTNFTISVTTEILPVSMTKTSVDCTMYICGDSTECSNLLLQYGSFCTQLNRALTGIAVEQDKNTQEVFAQVKQIYKTPPIKDFGGFNFSQILPDPSKPSKRSFIEDLLFNKVTLADAGFTKQYGDCLGDIAARDLICAQKFNGLTVLPPLLTDEMIAQYTSALLAGTITSGWTFCAGAALQIPFAMQMAYRFNGIGVTQNVLYENQKLIANQFNSAIGKIQDSLSSTASALGKLQDVVNQNAQALNTLVKQLSSNFGAISSVLNDILSRLDKVEAEVQIDRLITGRLQSLQTYVTQQLIRAAEIRASANLAATKMSECVCGQSKRVDFCGKGYHLMSFPQSAPHGVVFLHVTYVPAQEKNFTTAPAICHDGKAHFPREGVFVSNGTHWFVTQRNFYEPQIITTDNTFVSGNCDVVIGIVNNTVYDPLQPELDS

SEQ ID NO: 3206 - protein, 1147 aa, Artificial Sequence
  SARS-CoV-2/Australia/NSW56/2020__EPI_ISL_417408 spike protein (1-1147)(G889C_L1034C)
MFVFLVLLPLVSSQCVNLTTRTQLPPAYTNSFTRGVYYPDKVFRSSVLHSTQDLFLPFFSNVTWFHAIHVSGTNGTKRFDNPVLPFNDGVYFASTEKSNIIRGWIFGTTLDSKTQSLLIVNNATNVVIKVCEFQFCNDPFLGVYYHKNNKSWMESEFRVYSSANNCTFEYVSQPFLMDLEGKQGNFKNLREFVFKNIDGYFKIYSKHTPINLVRDLPQGFSALEPLVDLPIGINITRFQTLLALHRSYLTPGDSSSGWTAGAAAYYVGYLQPRTFLLKYNENGTITDAVDCALDPLSETKCTLKSFTVEKGIYQTSNFRVQPTESIVRFPNITNLCPFGEVFNATRFASVYAWNRKRISNCVADYSVLYNSASFSTFKCYGVSPTKLNDLCFTNVYADSFVIRGDEVRQIAPGQTGKIADYNYKLPDDFTGCVIAWNSNNLDSKVGGNYNYLYRLFRKSNLKPFERDISTEIYQAGSTPCNGVEGFNCYFPLQSYGFQPTNGVGYQPYRVVVLSFELLHAPATVCGPKKSTNLVKNKCVNFNFNGLTGTGVLTESNKKFLPFQQFGRDIADTTDAVRDPQTLEILDITPCSFGGVSVITPGTNTSNQVAVLYQDVNCTEVPVAIHADQLTPTWRVYSTGSNVFQTRAGCLIGAEHVNNSYECDIPIGAGICASYQTQTNSPRRARSVASQSIIAYTMSLGAENSVAYSNNSIAIPTNFTISVTTEILPVSMTKTSVDCTMYICGDSTECSNLLLQYGSFCTQLNRALTGIAVEQDKNTQEVFAQVKQIYKTPPIKDFGGFNFSQILPDSSKPSKRSFIEDLLFNKVTLADAGFIKQYGDCLGDIAARDLICAQKFNGLTVLPPLLTDEMIAQYTSALLAGTITSGWTFCAGAALQIPFAMQMAYRFNGIGVTQNVLYENQKLIANQFNSAIGKIQDSLSSTASALGKLQDVVNQNAQALNTLVKQLSSNFGAISSVLNDILSRLDKVEAEVQIDRLITGRLQSLQTYVTQQLIRAAEIRASANLAATKMSECVCGQSKRVDFCGKGYHLMSFPQSAPHGVVFLHVTYVPAQEKNFTTAPAICHDGKAHFPREGVFVSNGTHWFVTQRNFYEPQIITTDNTFVSGNCDVVIGIVNNTVYDPLQPELDS

SEQ ID NO: 3207 - protein, 1147 aa, Artificial Sequence
  SARS-CoV-2/Iceland/280/2020__EPI_ISL_417608 spike protein (1-1147)(G889C_L1034C)
MFVFLVLLPLVSSQCVNLTTRTQLPPAYTNSFTRGVYYPDKVFRSSVLHSTQDLFLPFFSNVTWFHAIHVSGTNGTKRFDNPVLPFNDGVYFASTEKSNIIRGWIFGTTLDSKTQSLLIVNNATNVVIKVCEFQFCNDPFLGVYYHKNNKSWMESEFRVYSSANNCTFEYVSQPFLMDLEGKQGNFKNLREFVFKNIDGYFKIYSKHTPINLVRDLPQGFSALEPLVDLPIGINITRFQTLLALHRSYLTPGDSSSGWTAGAAAYYVGYLQPRTFLLKYNENGTITDAVDCALDPLSETKCTLKSFTVEKGIYQTSNFRVQPTESIVRFPNITNLCPFGEVFNATRFASVYAWNRKRISNCVADYSVLYNSASFSTFKCYGVSPTKLNDLCFTNVYADSFVIRGDEVRQIAPGQTGKIADYNYKLPDDFTGCVIAWNSNNLDSKVGGNYNYLYRLFRKSNLKPFERDISTEIYQAGSTPCNGVEGFNCYFPLQSYGFQPTNGVGYQPYRVVVLSFELLHAPATVCGPKKSTNLVKNKCVNFNFNGLTGTGVLTESNKKFLPFQQFGRDIADTTDAVRDPQTLEILDITPCSFGGVSVITPGTNTSNQVAVLYQGVNCTEVPVAIHADQLTPTWRVYSTGSNVFQTRAGCLIGAEHVNNSYECDIPIGAGICASYHTQTNSPRRARSVASQSIIAYTMSLGAENSVAYSNNSIAIPTNFTISVTTEILPVSMTKTSVDCTMYICGDSTECSNLLLQYGSFCTQLNRALTGIAVEQDKNTQEVFAQVKQIYKTPPIKDFGGFNFSQILPDPSKPSKRSFIEDLLFNKVTLADAGFIKQYGDCLGDIAARDLICAQKFNGLTVLPPLLTDEMIAQYTSALLAGTITSGWTFCAGAALQIPFAMQMAYRFNGIGVTQNVLYENQKLIANQFNSAIGKIQDSLSSTASALGKLQDVVNQNAQALNTLVKQLSSNFGAISSVLNDILSRLDKVEAEVQIDRLITGRLQSLQTYVTQQLIRAAEIRASANLAATKMSECVCGQSKRVDFCGKGYHLMSFPQSAPHGVVFLHVTYVPAQEKNFTTAPAICHDGKAHFPREGVFVSNGTHWFVTQRNFYEPQIITTDNTFVSGNCDVVIGIVNNTVYDPLQPELDS

SEQ ID NO: 3208 - protein, 1147 aa, Artificial Sequence; identical to SEQ ID NO: 3163
  SARS-CoV-2/Iceland/247/2020__EPI_ISL_417575 spike protein (1-1147)(G889C_L1034C)

SEQ ID NO: 3209 - protein, 1147 aa, Artificial Sequence
  SARS-CoV-2/Iceland/238/2020__EPI_ISL_417566 spike protein (1-1147)(G889C_L1034C)
MFVFLVLLPLVSSQCVNLTTRTQLPPAYTNSFTRGVYYPDKVFRSSVLHSTQDLFLPFFSNVTWFHAIHVSGTNGTKRFDNPVLPFNDGVYFASTEKSNIIRGWIFGTTLDSKTQSLLIVNNATNVVIKVCEFQFCNDPFLGVYYHKNNKSWMESEFRVYSSANNCTFEYVSQPFLMDLEGKQGNFKNLREFVFKNIDGYFKIYSKHTPINLVRDLPQGFSALEPLVDLPIGINITRFQTLLALHRSYLTPGDSSSGWTAGAAAYYVGYLQPRTFLLKYNENGTITDAVDCALDPLSETKCTLKSFTVEKGIYQTSNFRVQPTESIVRFPNITNLCPFGEVFNATRFASVYAWNRKRISNCVADYSVLYNSASFSTFKCYGVSPTKLNDLCFTNVYADSFVIRGDEVRQIAPGQTGKIADYNYKLPDDFTGCVIAWNSNNLDSKVGGNYNYLYRLFRKSNLKPFERDISTEIYQAGSTPCNGVEGFNCYFPLQSYGFQPTNGVGYQPYRVVVLSFELLHAPATVCGPKKSTNLVKNKCVNFNFNGLTGTGVLTESNKKFLPFQQFGRDIADTTDAVRDPQTLEILDITPCSFGGVSVITPGTNTSNQVAVLYQGVNCTEVPVAIHADQLTPTWRVYSTGSNVFQTRAGCLIGAEHVNNSYECDIPIGAGICASYQTQTNSPRRARSVASQSIIAYTMSLGAENSVAYSNNSIAIPTNFTISVTTEILPVSMTKTSVDCTMYICGDSTECSNLLLQYGSFCTQLNRALTGIAVEQDKNTQEVFAQVKQIYKTPPIKDFGGFNFSQILPDPSKPSKRSFIEDLLFNKVTLADVGFIKQYGDCLGDIAARDLICAQKFNGLTVLPPLLTDEMIAQYTSALLAGTITSGWTFCAGAALQIPFAMQMAYRFNGIGVTQNVLYENQKLIANQFNSAIGKIQDSLSSTASALGKLQDVVNQNAQALNTLVKQLSSNFGAISSVLNDILSRLDKVEAEVQIDRLITGRLQSLQTYVTQQLIRAAEIRASANLAATKMSECVCGQSKRVDFCGKGYHLMSFPQSAPHGVVFLHVTYVPAQEKNFTTAPAICHDGKAHFPREGVFVSNGTHWFVTQRNFYEPQIITTDNTFVSGNCDVVIGIVNNTVYDPLQPELDS

SEQ ID NO: 3210 - protein, 1147 aa, Artificial Sequence
  SARS-CoV-2/Greece/16/2020__EPI_ISL_418265 spike protein (1-1147)(G889C_L1034C)
MFVFLVLLPLVSSQCVNLTTRTQLPPAYTNSFTRGVYYPDKVFRSSVLHSTQDLFLPFFSNVTWFHAIHVSGTNGTKRFDNPVLPFNDGVYFASTEKSNIIRGWIFGTTLDSKTQSLLIVNNATNVVIKVCEFQFCNDPFLGVYYHKNNKSWMESEFRVYSSANNCTFEYVSQPFLMDLEGKQGNFKNLREFVFKNVDGYFKIYSKHTPINLVRDLPQGFSALEPLVDLPIGINITRFQTLLALHRSYLTPGDSSSGWTAGAAAYYVGYLQPRTFLLKYNENGTITDAVDCALDPLSETKCTLKSFTVEKGIYQTSNFRVQPTESIVRFPNITNLCPFGEVFNATRFASVYAWNRKRISNCVADYSVLYNSASFSTFKCYGVSPTKLNDLCFTNVYADSFVIRGDEVRQIAPGQTGKIADYNYKLPDDFTGCVIAWNSNNLDSKVGGNYNYLYRLFRKSNLKPFERDISTEIYQAGSTPCNGVEGFNCYFPLQSYGFQPTNGVGYQPYRVVVLSFELLHAPATVCGPKKSTNLVKNKCVNFNFNGLTGTGVLTESNKKFLPFQQFGRDIADTTDAVRDPQTLEILDITPCSFGGVSVITPGTNTSNQVAVLYQDVNCTEVPVAIHADQLTPTWRVYSTGSNVFQTRAGCLIGAEHVNNSYECDIPIGAGICASYQTQTNSPRRARSVASQSIIAYTMSLGAENSVAYSNNSIAIPTNFTISVTTEILPVSMTKTSVDCTMYICGDSTECSNLLLQYGSFCTQLNRALTGIAVEQDKNTQEVFAQVKQIYKTPPIKDFGGFNFSQILPDPSKPSKRSFIEDLLFNKVTLADAGFIKQYGDCLGDIAARDLICAQKFNGLTVLPPLLTDEMIAQYTSALLAGTITSGWTFCAGAALQIPFAMQMAYRFNGIGVTQNVLYENQKLIANQFNSAIGKIQDSLSSTASALGKLQDVVNQNAQALNTLVKQLSSNFGAISSVLNDILSRLDKVEAEVQIDRLITGRLQSLQTYVTQQLIRAAEIRASANLAATKMSECVCGQSKRVDFCGKGYHLMSFPQSAPHGVVFLHVTYVPAQEKNFTTAPAICHDGKAHFPREGVFVSNGTHWFVTQRNFYEPQIITTDNTFVSGNCDVVIGIVNNTVYDPLQPELDS

SEQ ID NO: 3211 - protein, 1147 aa, Artificial Sequence
  SARS-CoV-2/Iceland/319/2020__EPI_ISL_417648 spike protein (1-1147)(G889C_L1034C)
MFVFLVLLPLVSSQCVNLTTRTQLPPAYTNSFTRGVYYPDKVFRSSVLHSTQDLFLPFFSNVTWFHAIHVSGTNGTKRFDNPVLPFNDGVYFASTEKSNIIRGWIFGTTLDSKTQSLLIVNNATNVVIKVCEFQFCNDPFLGVYYHKNNKSWMESEFRVYSSANNCTFEYVSQPFLIDLEGKQGNFKNLREFVFKNIDGYFKIYSKHTPINLVRDLPQGFSALEPLVDLPIGINITRFQTLLALHRSYLTPGDSSSGWTAGAAAYYVGYLQPRTFLLKYNENGTITDAVDCALDPLSETKCTLKSFTVEKGIYQTSNFRVQPTESIVRFPNITNLCPFGEVFNATRFASVYAWNRKRISNCVADYSVLYNSASFSTFKCYGVSPTKLNDLCFTNVYADSFVIRGDEVRQIAPGQTGKIADYNYKLPDDFTGCVIAWNSNNLDSKVGGNYNYLYRLFRKSNLKPFERDISTEIYQAGSTPCNGVEGFNCYFPLQSYGFQPTNGVGYQPYRVVVLSFELLHAPATVCGPKKSTNLVKNKCVNFNFNGLTGTGVLTESNKKFLPFQQFGRDIADTTDAVRDPQTLEILDITPCSFGGVSVITPGTNTSNQVAVLYQGVNCTEVPVAIHADQLTPTWRVYSTGSNVFQTRAGCLIGAEHVNNSYECDIPIGAGICASYQTQTNSPRRARSVASQSIIAYTMSLGAENSVAYSNNSIAIPTNFTISVTTEILPVSMTKTSVDCTMYICGDSTECSNLLLQYGSFCTQLNRALTGIAVEQDKNTQEVFAQVKQIYKTPPIKDFGGFNFSQILPDPSKPSKRSFIEDLLFNKVTLADAGFIKQYGDCLGDIAARDLICAQKFNGLTVLPPLLTDEMIAQYTSALLAGTITSGWTFCAGAALQIPFAMQMAYRFNGIGVTQNVLYENQKLIANQFNSAIGKIQDSLSSTASALGKLQDVVNQNAQALNTLVKQLSSNFGAISSVLNDILSRLDKVEAEVQIDRLITGRLQSLQTYVTQQLIRAAEIRASANLAATKMSECVCGQSKRVDFCGKGYHLMSFPQSAPHGVVFLHVTYVPAQEKNFTTAPAICHDGKAHFPREGVFVSNGTHWFVTQRNFYEPQIITTDNTFVSGNCDVVIGIVNNTVYDPLQPELDS

SEQ ID NO: 3212 - protein, 1147 aa, Artificial Sequence
  SARS-CoV-2/Congo/94/2020__EPI_ISL_417947 spike protein (1-1147)(G889C_L1034C)
MFVFLVLLPLVSSQCVNLTTRTQLPPAYTNSFTRGVYYPDKVFRSSVLHSTQDLFLPFFSNVTWFHAIHVSGTNGTKRFDNPVLPFNDGVYFASTEKSNIIRGWIFGTTLDSKTQSLLIVNNATNVVIKVCEFQFCNDPFLGVYYHKNNKSWMESEFRVYSSANNCTFEYVSQPFLMDLEGKQGNFKNLREFVFKNIDGYFKIYSKHTPINLVRDLPQGFSALEPLVDLPIGINITRFQTLLALHRSYLTPGDSSSGWTAGAAAYYVGYLQPRTFLLKYNENGTITDAVDCALDPLSETKCTLKSFTVEKGIYQTSNFRVQPTESIVRFPNITNLCPFGEVFNATRFASVYAWNRKRISNCVADYSVLYNSASFSTFKCYGVSPTKLNDLCFTNVYADSFVIRGDEVRQIAPGQTGKIADYNYKLPDDFTGCVIAWNSNNLDSKVGGNYNYLYRLFRKSNLKPFERDISTEIYQAGSTPCNGVEGFNCYFPLQSYGFQPTNGVGYQPYRVVVLSFELLHAPATVCGPKKSTNLVKNKCVNFNFNGLTGTGVLTESNKKFLPFQQFGRDIADTTDAVRDPQTLEILDITPCSFGGVSVITPGTNTSNQVAVLYQGVNCTEVPVAIHADQLTPTWRVYSTGSNVFQTRAGCLIGAEHVNNSYECDIPIGAGICASYQTQTNSPRRARSVASQSIIAYTMSLGAENSVAYSNNSIAIPTNFTISVTTEILPVSMTKTSVDCTMYICGDSTECSNLLLQYGSFCTQLNRALTGIAVEQDKNTQEVFAQVKQIYKTPPIKDFGGFNFSQILPDPSKPSKRSFIEDILFNKVTLADAGFIKQYGDCLGDIAARDLICAQKFNGLTVLPPLLTDEMIAQYTSALLAGTITSGWTFCAGAALQIPFAMQMAYRFNGIGVTQNVLYENQKLIANQFNSAIGKIQDSLSSTASALGKLQDVVNQNAQALNTLVKQLSSNFGAISSVLNDILSRLDKVEAEVQIDRLITGRLQSLQTYVTQQLIRAAEIRASANLAATKMSECVCGQSKRVDFCGKGYHLMSFPQSAPHGVVFLHVTYVPAQEKNFTTAPAICHDGKAHFPREGVFVSNGTHWFVTQRNFYEPQIITTDNTFVSGNCDVVIGIVNNTVYDPLQPELDS

SEQ ID NO: 3213 - protein, 1147 aa, Artificial Sequence
  SARS-CoV-2/Congo/158/2020__EPI_ISL_417950 spike protein (1-1147)(G889C_L1034C)
MFVFLVLLPLVSSQCVNLTTRTQLPPAYTNSFTRGVYYPDKVFRSSVLHSTQDLFLPFFSNVTWFHAIHVSGTNGTKRFDNPVLPFNDGVYFASTEKSNIIRGWIFGTTLDSKTQSLLIVNNATNVVIKVCEFQFCNDPFLGVYYHKNNKSWMESEFRVYSSANNCTFEYVSQPFLMDLEGKQGNFKNLREFVFKNIDGYFKIYSKHTPINLVRDLPQGFSALEPLVDLPIGINITRFQTLLALHRSYLTPGDSSSGWTAGAAAYYVGYLQPRTFLLKYNENGTITDAVDCALDPLSETKCTLKSFTVEKGIYQTSNFRVQPTESIVRFPNITNLCPFGEVFNATRFASVYAWNRKRISNCVADYSVLYNSASFSTFKCYGVSPTKLNDLCFTNVYADSFVIRGDEVRQIAPGQTGKIADYNYKLPDDFTGCVIAWNSNNLDSKVGGNYNYLYRLFRKSNLKPFERDISTEIYQAGSTPCNGVEGFNCYFPLQSYGFQPTNGVGYQPYRVVVLSFELLHAPATVCGPKKSTNLVKNKCVNFNFNGLTGTGVLTESNKKFLPFQQFGRDIADTTDAVRDPQTLEILDITPCSFGGVSVITPGTNTSNQVAVLYQDVNCTEVPVAIHADQLTPTWRVYSTGSNVFQTRAGCLIGAEHVNNSYECDIPIGAGICASYQTQTNSPRRARSVASQSIIAYTMSLGAENSVAYSNNSIAIPTNFTISVTTEILPVSMTKTSVDCTMYICGDSTECSNLLLQYGSFCTQLNRALTGIAVEQDKNTQEVFAQVKQIYKTPPIKDFGGFNFSQILPDPSKPSKRSFIEDLLFNKVTLADAGFIKQYGDCLGDIAARDLICAQKFNGLTVLPPLLTDEMIAQYTSALLAGTITSGWTFCAGAALQIPFAMQMAYRFNGIGVTQNVLYENQKLIANQFNSAIGKIQDSLSSTASALGKLQDVVNQNAQALNTLVKQLSSNFGAISSVLNDILSRLDKVEAEVQIDRLITGRLQSLQTYVTQQLIRAAEIRASANLAATKMSECVCGQSKRVDFCGKGYHLMSFPQSAPHGVVFLHVTYVPAQEKNFTTAPAICHDGKAHFPREGVFVSNGTHWFVTQRNFYEPQIITTDNTFLSGNCDVVIGIVNNTVYDPLQPELDS

SEQ ID NO: 3214 - protein, 1147 aa, Artificial Sequence
  SARS-CoV-2/USA/UT-00034/2020__EPI_ISL_417977 spike protein (1-1147)(G889C_L1034C)
MFVFLVLLPLVSSQCVNLTTRTQLPPAYTNSFTRGVYYPDKVFRSSVLHSTQDLFLPFFSNVTWFHAIHVSGTNGTKRFDNPVLPFNDGVYFASTEKSNIIRGWIFGTTLDSKTQSLLIVNNATNVVIKVCEFQFCNDPFLGVYYYKNNKSWMESEFRVYSSANNCTFEYVSQPFLMDLEGKQGNFKNLREFVFKNIDGYFKIYSKHTPINLVRDLPQGFSALEPLVDLPIGINITRFQTLLALHRSYLTPGDSSSGWTAGAAAYYVGYLQPRTFLLKYNENGTITDAVDCALDPLSETKCTLKSFTVEKGIYQTSNFRVQPTESIVRFPNITNLCPFGEVFNATRFASVYAWNRKRISNCVADYSVLYNSASFSTFKCYGVSPTKLNDLCFTNVYADSFVIRGDEVRQIAPGQTGKIADYNYKLPDDFTGCVIAWNSNNLDSKVGGNYNYLYRLFRKSNLKPFERDISTEIYQAGSTPCNGVEGFNCYFPLQSYGFQPTNGVGYQPYRVVVLSFELLHAPATVCGPKKSTNLVKNKCVNFNFNGLTGTGVLTESNKKFLPFQQFGRDIADTTDAVRDPQTLEILDITPCSFGGVSVITPGTNTSNQVAVLYQGVNCTEVPVAIHADQLTPTWRVYSTGSNVFQTRAGCLIGAEHVNNSYECDIPIGAGICASYQTQTNSPRRARSVASQSIIAYTMSLGAENSVAYSNNSIAIPTNFTISVTTEILPVSMTKTSVDCTMYICGDSTECSNLLLQYGSFCTQLNRALTGIAVEQDKNTQEVFAQVKQIYKTPPIKDFGGFNFSQILPDPSKPSKRSFIEDLLFNKVTLADAGFIKQYGDCLGDIAARDLICAQKFNGLTVLPPLLTDEMIAQYTSALLAGTITSGWTFCAGAALQIPFAMQMAYRFNGIGVTQNVLYENQKLIANQFNSAIGKIQDSLSSTASALGKLQDVVNQNAQALNTLVKQLSSNFGAISSVLNDILSRLDKVEAEVQIDRLITGRLQSLQTYVTQQLIRAAEIRASANLAATKMSECVCGQSKRVDFCGKGYHLMSFPQSAPHGVVFLHVTYVPAQEKNFTTAPAICHDGKAHFPREGVFVSNGTHWFVTQRNFYEPQIITTDNTFVSGNCDVVIGIVNNTVYDPLQPELDS

SEQ ID NO: 3215 - protein, 1147 aa, Artificial Sequence
  SARS-CoV-2/USA/UT-00033/2020__EPI_ISL_417976 spike protein (1-1147)(G889C_L1034C)
MFVFLVLLPLVSSQCVNLTTRTQLPPAYTNSFTRGVYYPDKVFRSSVLHSTQDLFLPFFSNVTWFHAIHVSGTNGTKRFDNPVLPFNDGVYFASTEKSNIIRGWIFGTTLDSKTQSLLIVNNATNVVIKVCEFQFCNDPFLGVYYHKNNKSWMESEFRVYSSANNCTFEYVSQPFLMDLEGKQGNFKNLREFVFKNIDGYFKIYSKHTPINLVRDLPQGFSALEPLVDLPIGINITRFQTLLALHRSYLTPGDSSSGLTAGAAAYYVGYLQPRTFLLKYNENGTITDAVDCALDPLSETKCTLKSFTVEKGIYQTSNFRVQPTESIVRFPNITNLCPFGEVFNATRFASVYAWNRKRISNCVADYSVLYNSASFSTFKCYGVSPTKLNDLCFTNVYADSFVIRGDEVRQIAPGQTGKIADYNYKLPDDFTGCVIAWNSNNLDSKVGGNYNYLYRLFRKSNLKPFERDISTEIYQAGSTPCNGVEGFNCYFPLQSYGFQPTNGVGYQPYRVVVLSFELLHAPATVCGPKKSTNLVKNKCVNFNFNGLTGTGVLTESNKKFLPFQQFGRDIADTTDAVRDPQTLEILDITPCSFGGVSVITPGTNTSNQVAVLYQGVNCTEVPVAIHADQLTPTWRVYSTGSNVFQTRAGCLIGAEHVNNSYECDIPIGAGICASYQTQTNSPRRARSVASQSIIAYTMSLGAENSVAYSNNSIAIPTNFTISVTTEILPVSMTKTSVDCTMYICGDSTECSNLLLQYGSFCTQLNRALTGIAVEQDKNTQEVFAQVKQIYKTPPIKDFGGFNFSQILPDPSKPSKRSFIEDLLFNKVTLADAGFIKQYGDCLGDIAARDLICAQKFNGLTVLPPLLTDEMIAQYTSALLAGTITSGWTFCAGAALQIPFAMQMAYRFNGIGVTQNVLYENQKLIANQFNSAIGKIQDSLSSTASALGKLQDVVNQNAQALNTLVKQLSSNFGAISSVLNDILSRLDKVEAEVQIDRLITGRLQSLQTYVTQQLIRAAEIRASANLAATKMSECVCGQSKRVDFCGKGYHLMSFPQSAPHGVVFLHVTYVPAQEKNFTTAPAICHDGKAHFPREGVFVSNGTHWFVTQRNFYEPQIITTDNTFVSGNCDVVIGIVNNTVYDPLQPELDS

SEQ ID NO: 3216 - protein, 1147 aa, Artificial Sequence
  SARS-CoV-2/USA/WI-13/2020__EPI_ISL_417516 spike protein (1-1147)(G889C_L1034C)
MFVFLVLLPLVSSQCVNLTTRTQLPPAYTNSFTRGVYYPDKVFRSSVLHSTQDLFLPFFSNVTWFHAIHVSGTNGTKRFDNPVLPFNDGVYFASTEKSNIIRGWIFGTTLDSKTQSLLIVNNATNVVIKVCEFQFCNDPFLGVYYHKNNKSWMESEFRVYSSANNCTFEYVSQPFLMDLEGKQGNFKNLREFVFKNIDGYFKIYSKHTPINLVRDLPQGFSALEPLVDLPIGINITRFQTLLALHRSYLTPGDSSSGWTAGAAAYYVGYLQPRTFLLKYNENGTITDAVDCALDPLSETKCTLKSFTVEKGIYQTSNFRVLPTESIVRFPNITNLCPFGEVFNATRFASVYAWNRKRISNCVADYSVLYNSASFSTFKCYGVSPTKLNDLCFTNVYADSFVIRGDEVRQIAPGQTGKIADYNYKLPDDFTGCVIAWNSNNLDSKVGGNYNYLYRLFRKSNLKPFERDISTEIYQAGSTPCNGVEGFNCYFPLQSYGFQPTNGVGYQPYRVVVLSFELLHAPATVCGPKKSTNLVKNKCVNFNFNGLTGTGVLTESNKKFLPFQQFGRDIADTTDAVRDPQTLEILDITPCSFGGVSVITPGTNTSNQVAVLYQGVNCTEVPVAIHADQLTPTWRVYSTGSNVFQTRAGCLIGAEHVNNSYECDIPIGAGICASYQTQTNSPRRARSVASQSIIAYTMSLGAENSVAYSNNSIAIPTNFTISVTTEILPVSMTKTSVDCTMYICGDSTECSNLLLQYGSFCTQLNRALTGIAVEQDKNTQEVFAQVKQIYKTPPIKDFGGFNFSQILPDPSKPSKRSFIEDLLFNKVTLADAGFIKQYGDCLGDIAARDLICAQKFNGLTVLPPLLTDEMIAQYTSALLAGTITSGWTFCAGAALQIPFAMQMAYRFNGIGVTQNVLYENQKLIANQFNSAIGKIQDSLSSTASALGKLQDVVNQNAQALNTLVKQLSSNFGAISSVLNDILSRLDKVEAEVQIDRLITGRLQSLQTYVTQQLIRAAEIRASANLAATKMSECVCGQSKRVDFCGKGYHLMSFPQSAPHGVVFLHVTYVPAQEKNFTTAPAICHDGKAHFPREGVFVSNGTHWFVTQRNFYEPQIITTDNTFVSGNCDVVIGIVNNTVYDPLQPELDS

SEQ ID NO: 3217 - protein, 1146 aa, Artificial Sequence
  SARS-CoV-2/India/1-27/2020__EPI_ISL_413522 spike protein (1-1146)(G888C_L1033C)
MFVFLVLLPLVSSQCVNLTTRTQLPPAYTNSFTRGVYYPDKVFRSSVLHSTQDLFLPFFSNVTWFHAIHVSGTNGTKRFDNPVLPFNDGVYFASTEKSNIIRGWIFGTTLDSKTQSLLIVNNATNVVIKVCEFQFCNDPFLGVYHKNNKSWMESEFRVYSSANNCTFEYVSQPFLMDLEGKQGNFKNLREFVFKNIDGYFKIYSKHTPINLVRDLPQGFSALEPLVDLPIGINITRFQTLLALHRSYLTPGDSSSGWTAGAAAYYVGYLQPRTFLLKYNENGTITDAVDCALDPLSETKCTLKSFTVEKGIYQTSNFRVQPTESIVRFPNITNLCPFGEVFNATRFASVYAWNRKRISNCVADYSVLYNSASFSTFKCYGVSPTKLNDLCFTNVYADSFVIRGDEVIQIAPGQTGKIADYNYKLPDDFTGCVIAWNSNNLDSKVGGNYNYLYRLFRKSNLKPFERDISTEIYQAGSTPCNGVEGFNCYFPLQSYGFQPTNGVGYQPYRVVVLSFELLHAPATVCGPKKSTNLVKNKCVNFNFNGLTGTGVLTESNKKFLPFQQFGRDIADTTDAVRDPQTLEILDITPCSFGGVSVITPGTNTSNQVAVLYQDVNCTEVPVAIHADQLTPTWRVYSTGSNVFQTRAGCLIGAEHVNNSYECDIPIGAGICASYQTQTNSPRRARSVASQSIIAYTMSLGAENSVAYSNNSIAIPTNFTISVTTEILPVSMTKTSVDCTMYICGDSTECSNLLLQYGSFCTQLNRALTGIAVEQDKNTQEVFAQVKQIYKTPPIKDFGGFNFSQILPDPSKPSKRSFIEDLLFNKVTLADAGFIKQYGDCLGDIAARDLICAQKFNGLTVLPPLLTDEMIAQYTSALLAGTITSGWTFCAGAALQIPFAMQMAYRFNGIGVTQNVLYENQKLIANQFNSAIGKIQDSLSSTASALGKLQDVVNQNAQALNTLVKQLSSNFGAISSVLNDILSRLDKVEAEVQIDRLITGRLQSLQTYVTQQLIRAAEIRASANLAATKMSECVCGQSKRVDFCGKGYHLMSFPQSAPHGVVFLHVTYVPAQEKNFTTAPAICHDGKAHFPREGVFVSNGTHWFVTQRNFYEPQIITTDNTFVSGNCDVVIGIVNNTVYDPLQPELDS

SEQ ID NO: 3218 - protein, 1141 aa, Artificial Sequence
  SARS-CoV-2/pangolin/Guangxi/P4L/2017__EPI_ISL_410538 spike protein (1-1141)(G883C_L1028C)
MFVFLFVLPLVSSQCVNLTTRTGIPPGYTNSSTRGVYYPDKVFRSSILHLTQDLFLPFFSNVTWFNTINYQGGFKKFDNPVLPFNDGVYFASTEKSNIIRGWIFGTTLDARTQSLLIVNNATNVVIKVCEFQFCTDPFLGVYYHNNNKTWVENEFRVYSSANNCTFEYISQPFLMDLEGKQGNFKNLREFVFKNVDGYFKIYSKHTPIDLVRDLPRGFAALEPLVDLPIGINITRFQTLLALHRSYLTPGNLESGWTTGAAAYYVGYLQQRTFLLSYNQNGTITDAVDCSLDPLSETKCTLKSLTVEKGIYQTSNFRVQPTISIVRFPNITNLCPFGEVFNASKFASVYAWNRKRISNCVADYSVLYNSTSFSTFKCYGVSPTKLNDLCFTNVYADSFVVKGDEVRQIAPGQTGVIADYNYKLPDDFTGCVIAWNSVKQDALTGGNYGYLYRLFRKSKLKPFERDISTEIYQAGSTPCNGQVGLNCYYPLERYGFHPTTGVNYQPFRVVVLSFELLNGPATVCGPKLSTTLVKDKCVNFNFNGLTGTGVLTTSKKQFLPFQQFGRDISDTTDAVRDPQTLEILDITPCSFGGVSVITPGTNTSNQVAVLYQDVNCTEVPMAIHAEQLTPAWRVYSAGANVFQTRAGCLVGAEHVNNSYECDIPVGAGICASYHSMSSLRSVNQRSIIAYTMSLGAENSVAYSNNSIAIPTNFTISVTTEILPVSMTKTSVDCTMYICGDSIECSNLLLQYGSFCTQLNRALTGIAVEQDKNTQEVFAQVKQIYKTPPIKDFGGFNFSQILPDPSKPSKRSFIEDLLFNKVTLADAGFIKQYGDCLGDIAARDLICAQKFNGLTVLPPLLTDEMIAQYTSALLAGTITSGWTFCAGAALQIPFAMQMAYRFNGIGVTQNVLYENQKLIANQFNSAIGKIQDSLSSTASALGKLQDVVNQNAQALNTLVKQLSSNFGAISSVLNDILSRLDKVEAEVQIDRLITGRLQSLQTYVTQQLIRAAEIRASANLAATKMSECVCGQSKRVDFCGKGYHLMSFPQSAPHGVVFLHVTYVPAQEKNFTTAPAICHEGKAHFPREGVFVSNGTHWFITQRNFYEPQIITTDNTFVSGSCDVVIGIVNNTVYDPLQPELDS

SEQ ID NO: 3219 - protein, 1141 aa, Artificial Sequence
  SARS-CoV-2/pangolin/Guangxi/P5L/2017__EPI_ISL_410540 spike protein (1-1141)(G883C_L1028C)
MFVFLFVLPLVSSQCVNLTTRTGIPPGYTNSSTRGVYYPDKVFRSSILHLTQDLFLPFFSNVTWFNTINYQGGFKKFDNPVLPFNDGVYFASTEKSNIIRGWIFGTTLDARTQSLLIVNNATNVVIKVCEFQFCTDPFLGVYYHNNNKTWVENEFRVYSSANNCTFEYISQPFLMDLEGKQGNFKNLREFVFKNVDGYFKIYSKHTPIDLVRDLPRGFAALEPLVDLPIGINITRFQTLLALHRSYLTPGKLESGWTTGAAAYYVGYLQQRTFLLSYNQNGTITDAVDCSLDPLSETKCTLKSLTVEKGIYQTSNFRVQPTISIVRFPNITNLCPFGEVFNASKFASVYAWNRKRISNCVADYSVLYNSTSFSTFKCYGVSPTKLNDLCFTNVYADSFVVKGDEVRQIAPGQTGVIADYNYKLPDDFTGCVIAWNSVKQDALTGGNYGYLYRLFRKSKLKPFERDISTEIYQAGSTPCNGQVGLNCYYPLERYGFHPTTGVNYQPFRVVVLSFELLNGPATVCGPKLSTTLVKDKCVNFNFNGLTGTGVLTTSKKQFLPFQQFGRDISDTTDAVRDPQTLEILDITPCSFGGVSVITPGTNTSNQVAVLYQDVNCTEVPMAIHAEQLTPAWRVYSAGANVFQTRAGCLVGAEHVNNSYECDIPVGAGICASYHSMSSFRSVNQRSIIAYTMSLGAENSVAYSNNSIAIPTNFTISVTTEILPVSMTKTSVDCTMYICGDSIECSNLLLQYGSFCTQLNRALTGIAVEQDKNTQEVFAQVKQIYKTPPIKDFGGFNFSQILPDPSKPSKRSFIEDLLFNKVTLADAGFIKQYGDCLGDIAARDLICAQKFNGLTVLPPLLTDEMIAQYTSALLAGTITSGWTFCAGAALQIPFAMQMAYRFNGIGVTQNVLYENQKLIANQFNSAIGKIQDSLSSTASALGKLQDVVNQNAQALNTLVKQLSSNFGAISSVLNDILSRLDKVEAEVQIDRLITGRLQSLQTYVTQQLIRAAEIRASANLAATKMSECVCGQSKRVDFCGKGYHLMSFPQSAPHGVVFLHVTYVPAQEKNFTTAPAICHEGKAHFPREGVFVSNGTHWFITQRNFYEPQIITTDNTFVSGSCDVVIGIVNNTVYDPLQPELDS

SEQ ID NO: 3220 - protein, 1141 aa, Artificial Sequence
  SARS-CoV-2/pangolin/Guangxi/P5E/2017__EPI_ISL_410541 spike protein (1-1141)(G883C_L1028C)
MFVFLFVLPLVSSQCVNLTTRTGIPPGYTNSSTRGVYYPDKVFRSSILHLTQDLFLPFFSNVTWFNTITYQGGSKKFDNPVLPFNDGVYFASTEKSNIIRGWIFGTTLDARTQSLLIVNNATNVVIKVCEFQFCTDPFLGVYYHNNNKTWVENEFRVYSSANNCTFEYISQPFLMDLEGKQGNFKNLREFVFKNVDGYFKIYSKHTPIDLVRDLPRGFAALEPLVDLPIGINITRFQTLLALHRSYLTPGKLESGWTTGAAAYYVGYLQQRTFLLSYNQNGTITDAVDCSLDPLSETKCTLKSLTVEKGIYQTSNFRVQPTISIVRFPNITNLCPFGEVFNASKFASVYAWNRKRISNCVADYSVLYNSTSFSTFKCYGVSPTKLNDLCFTNVYADSFVVKGDEVRQIAPGQTGVIADYNYKLPDDFTGCVIAWNSVKQDALTGDNYGYLYRLFRKSKLKPFERDISTEIYQAGSTPCNGQVGLNCYYPLERYGFHPTTGVNYQPFRVVVLSFELLNGPATVCGPKLSTTLVKDKCVNFNFNGLTGTGVLTTSKKQFLPFQQFGRDISDTTDAVRDPQTLEILDITPCSFGGVSVITPGTNTSNQVAVLYQDVNCTEVPMAIHAEQLTPAWRVYSAGANVFQTRAGCLVGAEHVNNSYECDIPVGAGICASYHSMSSFRSVNQRSIIAYTMSLGAENSVAYSNNSIAIPTNFTISVTTEILPVSMTKTSVDCTMYICGDSIECSNLLLQYGSFCTQLNRALTGIAVEQDKNTQEVFAQVKQIYKTPPIKDFGGFNFSQILPDPSKPSKRSFIEDLLFNKVTLADAGFIKQYGDCLGDIAARDLICAQKFNGLTVLPPLLTDEMIAQYTSALLAGTITSGWTFCAGAALQIPFAMQMAYRFNGIGVTQNVLYENQKLIANQFNSAIGKIQDSLSSTASALGKLQDVVNQNAQALNTLVKQLSSNFGAISSVLNDILSRLDKVEAEVQIDRLITGRLQSLQTYVTQQLIRAAEIRASANLAATKMSECVCGQSKRVDFCGKGYHLMSFPQSAPHGVVFLHVTYVPAQEKNFTTAPAICHEGKAHFPREGVFVSNGTHWFITQRNFYEPQIITTDNTFVSGSCDVVIGIVNNTVYDPLQPELDS

SEQ ID NO: 3221 - protein, 1139 aa, Artificial Sequence
  SARS-CoV-2/pangolin/Guangxi/P1E/2017__EPI_ISL_410539 spike protein (1-1139)(G881C_L1026C)
MFVFLFVLPLVSSQCVNLTTRTGIQPGYTNSSTRGVYYPDKVFRSSILHLTQDLFLPFFSNVTWFNTINYQGGFKKFDNPVLPFNDGVYFASTEKSNIIRGWIFGTTLDARTQSLLIVNNATNVVIKVCEFQFCTDPFLGVYYHNNNKTWVENEFRVYSSANNCTFEYISQPFLMDLEGKQGNFKNLREFVFKNVDGYFKIYSKHTPIDLVRDLPRGFAALEPLVDLPIGINITRFQTLLALHRSYLTPGKLESGWTTGAAAYYVGYLQQRTFLLSYNQNGTITDAVDCSLDPLSETKCTLKSLTVEKGIYQTSNFRVQPTISIVRFPNITNLCPFGEVFNASKFASVYAWNRKRISNCVADYSVLYNSTSFSTFKCYGVSPTKLNDLCFTNVYADSFVVKGDEVRQIAPGQTGVIADYNYKLPDDFTGCVIAWNSVKQDALTGGNYLYRLFRKSKLKPFERDISTEIYQAGSTPCNGQVGLNCYYPLERYGFHPTTGVNYQPFRVVVLSFELLNGPATVCGPKLSTTLVKDKCVNFNFNGLTGTGVLTTSKKQFLPFQQFGRDISDTTDAVRDPQTLEILDITPCSFGGVSVITPGTNTSNQVAVLYQDVNCTEVPMAIHAEQLTPAWRVYSAGANVFQTRAGCLVGAEHVNNSYECDIPVGAGICASYHSMSSLRSVNQRSIIAYTMSLGAENSVAYSNNSIAIPTNFTISVTTEILPVSMTKTSVDCTMYICGDSIECSNLLLQYGSFCTQLNRALTGIAVEQDKNTQEVFAQVKQIYKTPPIKDFGGFNFSQILPDPSKPSKRSFIEDLLFNKVTLADAGFIKQYGDCLGDIAARDLICAQKFNGLTVLPPLLTDEMIAQYTSALLAGTITSGWTFCAGAALQIPFAMQMAYRFNGIGVTQNVLYENQKLIANQFNSAIGKIQDSLSSTASALGKLQDVVNQNAQALNTLVKQLSSNFGAISSVLNDILSRLDKVEAEVQIDRLITGRLQSLQTYVTQQLIRAAEIRASANLAATKMSECVCGQSKRVDFCGKGYHLMSFPQSAPHGVVFLHVTYVPAQEKNFTTAPAICHEGKAHFPREGVFVSNGTHWFITQRNFYEPQIITTDNTFVSGSCDVVIGIVNNTVYDPLQPELDS

SEQ ID NO: 3222 - protein, 1147 aa, Artificial Sequence
  SARS-CoV-2/Wuhan/WIV05/2019__EPI_ISL_402128 spike protein (1-1147)(I909C_Y1047C)
MFVFLVLLPLVSSQCVNLTTRTQLPPAYTNSFTRGVYYPDKVFRSSVLHSTQDLFLPFFSNVTWFHAIHVSGTNGTKRFDNPVLPFNDGVYFASTEKSNIIRGWIFGTTLDSKTQSLLIVNNATNVVIKVCEFQFCNDPFLGVYYHKNNKSWMESEFRVYSSANNCTFEYVSQPFLMDLEGKQGNFKNLREFVFKNIDGYFKIYSKHTPINLVRDLPQGFSALEPLVDLPIGINITRFQTLLALHRSYLTPGDSSSGWTAGAAAYYVGYLQPRTFLLKYNENGTITDAVDCALDPLSETKCTLKSFTVEKGIYQTSNFRVQPTESIVRFPNITNLCPFGEVFNATRFASVYAWNRKRISNCVADYSVLYNSASFSTFKCYGVSPTKLNDLCFTNVYADSFVIRGDEVRQIAPGQTGKIADYNYKLPDDFTGCVIAWNSNNLDSKVGGNYNYLYRLFRKSNLKPFERDISTEIYQAGSTPCNGVEGFNCYFPLQSYGFQPTNGVGYQPYRVVVLSFELLHAPATVCGPKKSTNLVKNKCVNFNFNGLTGTGVLTESNKKFLPFQQFGRDIADTTDAVRDPQTLEILDITPCSFGGVSVITPGTNTSNQVAVLYQDVNCTEVPVAIHADQLTPTWRVYSTGSNVFQTRAGCLIGAEHVNNSYECDIPIGAGICASYQTQTNSPRRARSVASQSIIAYTMSLGAENSVAYSNNSIAIPTNFTISVTTEILPVSMTKTSVDCTMYICGDSTECSNLLLQYGSFCTQLNRALTGIAVEQDKNTQEVFAQVKQIYKTPPIKDFGGFNFSQILPDPSKPSKRSFIEDLLFNKVTLADAGFIKQYGDCLGDIAARDLICAQKFNGLTVLPPLLTDEMIAQYTSALLAGTITSGWTFGAGAALQIPFAMQMAYRFNGCGVTQNVLYENQKLIANQFNSAIGKIQDSLSSTASALGKLQDVVNQNAQALNTLVKQLSSNFGAISSVLNDILSRLDKVEAEVQIDRLITGRLQSLQTYVTQQLIRAAEIRASANLAATKMSECVLGQSKRVDFCGKGCHLMSFPQSAPHGVVFLHVTYVPAQEKNFTTAPAICHDGKAHFPREGVFVSNGTHWFVTQRNFYEPQIITTDNTFVSGNCDVVIGIVNNTVYDPLQPELDS

SEQ ID NO: 3223 - protein, 1143 aa, Artificial Sequence
  SARS-CoV-2/bat/Yunnan/RaTG13/2013__EPI_ISL_402131 spike protein (1-1143)(I905C_Y1043C)
MFVFLVLLPLVSSQCVNLTTRTQLPPAYTNSSTRGVYYPDKVFRSSVLHLTQDLFLPFFSNVTWFHAIHVSGTNGIKRFDNPVLPFNDGVYFASTEKSNIIRGWIFGTTLDSKTQSLLIVNNATNVVIKVCEFQFCNDPFLGVYYHKNNKSWMESEFRVYSSANNCTFEYVSQPFLMDLEGKQGNFKNLREFVFKNIDGYFKIYSKHTPINLVRDLPPGFSALEPLVDLPIGINITRFQTLLALHRSYLTPGDSSSGWTAGAAAYYVGYLQPRTFLLKYNENGTITDAVDCALDPLSETKCTLKSFTVEKGIYQTSNFRVQPTDSIVRFPNITNLCPFGEVFNATTFASVYAWNRKRISNCVADYSVLYNSTSFSTFKCYGVSPTKLNDLCFTNVYADSFVITGDEVRQIAPGQTGKIADYNYKLPDDFTGCVIAWNSKHIDAKEGGNFNYLYRLFRKANLKPFERDISTEIYQAGSKPCNGQTGLNCYYPLYRYGFYPTDGVGHQPYRVVVLSFELLNAPATVCGPKKSTNLVKNKCVNFNFNGLTGTGVLTESNKKFLPFQQFGRDIADTTDAVRDPQTLEILDITPCSFGGVSVITPGTNASNQVAVLYQDVNCTEVPVAIHADQLTPTWRVYSTGSNVFQTRAGCLIGAEHVNNSYECDIPIGAGICASYQTQTNSRSVASQSIIAYTMSLGAENSVAYSNNSIAIPTNFTISVTTEILPVSMTKTSVDCTMYICGDSTECSNLLLQYGSFCTQLNRALTGIAVEQDKNTQEVFAQVKQIYKTPPIKDFGGFNFSQILPDPSKPSKRSFIEDLLFNKVTLADAGFIKQYGDCLGDIAARDLICAQKFNGLTVLPPLLTDEMIAQYTSALLAGTITSGWTFGAGAALQIPFAMQMAYRFNGCGVTQNVLYENQKLIANQFNSAIGKIQDSLSSTASALGKLQDVVNQNAQALNTLVKQLSSNFGAISSVLNDILSRLDKVEAEVQIDRLITGRLQSLQTYVTQQLIRAAEIRASANLAATKMSECVLGQSKRVDFCGKGCHLMSFPQSAPHGVVFLHVTYVPAQEKNFTTAPAICHDGKAHFPREGVFVSNGTHWFVTQRNFYEPQIITTDNTFVSGSCDVVIGIVNNTVYDPLQPELDS

SEQ ID NO: 3224 - protein, 1147 aa, Artificial Sequence
  SARS-CoV-2/Wuhan/HBCDC-HB-01/2019__EPI_ISL_402132 spike protein (1-1147)(I909C_Y1047C)
MFVFLVLLPLVSSQCVNLTTRTQLPPAYTNSITRGVYYPDKVFRSSVLHSTQDLFLPFFSNVTWFHAIHVSGTNGTKRFDNPVLPFNDGVYFASTEKSNIIRGWIFGTTLDSKTQSLLIVNNATNVVIKVCEFQFCNDPFLGVYYHKNNKSWMESEFRVYSSANNCTFEYVSQPFLMDLEGKQGNFKNLREFVFKNIDGYFKIYSKHTPINLVRDLPQGFSALEPLVDLPIGINITRFQTLLALHRSYLTPGDSSSGWTAGAAAYYVGYLQPRTFLLKYNENGTITDAVDCALDPLSETKCTLKSFTVEKGIYQTSNFRVQPTESIVRFPNITNLCPFGEVFNATRFASVYAWNRKRISNCVADYSVLYNSASFSTFKCYGVSPTKLNDLCFTNVYADSFVIRGDEVRQIAPGQTGKIADYNYKLPDDFTGCVIAWNSNNLDSKVGGNYNYLYRLFRKSNLKPFERDISTEIYQAGSTPCNGVEGFNCYFPLQSYGFQPTNGVGYQPYRVVVLSFELLHAPATVCGPKKSTNLVKNKCVNFNFNGLTGTGVLTESNKKFLPFQQFGRDIADTTDAVRDPQTLEILDITPCSFGGVSVITPGTNTSNQVAVLYQDVNCTEVPVAIHADQLTPTWRVYSTGSNVFQTRAGCLIGAEHVNNSYECDIPIGAGICASYQTQTNSPRRARSVASQSIIAYTMSLGAENSVAYSNNSIAIPTNFTISVTTEILPVSMTKTSVDCTMYICGDSTECSNLLLQYGSFCTQLNRALTGIAVEQDKNTQEVFAQVKQIYKTPPIKDFGGFNFSQILPDPSKPSKRSFIEDLLFNKVTLADAGFIKQYGDCLGDIAARDLICAQKFNGLTVLPPLLTDEMIAQYTSALLAGTITSGWTFGAGAALQIPFAMQMAYRFNGCGVTQNVLYENQKLIANQFNSAIGKIQDSLSSTASALGKLQDVVNQNAQALNTLVKQLSSNFGAISSVLNDILSRLDKVEAEVQIDRLITGRLQSLQTYVTQQLIRAAEIRASANLAATKMSECVLGQSKRVDFCGKGCHLMSFPQSAPHGVVFLHVTYVPAQEKNFTTAPAICHDGKAHFPREGVFVSNGTHWFVTQRNFYEPQIITTDNTFVSGNCDVVIGIVNNTVYDPLQPELDS

SEQ ID NO: 3225 - protein, 1147 aa, Artificial Sequence
  SARS-CoV-2/Guangdong/20SF028/2020__EPI_ISL_403936 spike protein (1-1147)(I909C_Y1047C)
MFVFLVLLPLVSSQCVNLTTRTQLPPAYTNSFTRGVYYPDKVFRSSVLYSTQDLFLPFFSNVTWFHAIHVSGTNGTKRFDNPVLPFNDGVYFASTEKSNIIRGWIFGTTLDSKTQSLLIVNNATNVVIKVCEFQFCNDPFLGVYYHKNNKSWMESEFRVYSSANNCTFEYVSQPFLMDLEGKQGNFKNLREFVFKNIDGYFKIYSKHTPINLVRDLPQGFSALEPLVDLPIGINITRFQTLLALHRSYLTPGDSSSGWTAGAAAYYVGYLQPRTFLLKYNENGTITDAVDCALDPLSETKCTLKSFTVEKGIYQTSNFRVQPTESIVRFPNITNLCPFGEVFNATRFASVYAWNRKRISNCVADYSVLYNSASFSTFKCYGVSPTKLNDLCFTNVYADSFVIRGDEVRQIAPGQTGKIADYNYKLPDDFTGCVIAWNSNNLDSKVGGNYNYLYRLFRKSNLKPFERDISTEIYQAGSTPCNGVEGFNCYFPLQSYGFQPTNGVGYQPYRVVVLSFELLHAPATVCGPKKSTNLVKNKCVNFNFNGLTGTGVLTESNKKFLPFQQFGRDIADTTDAVRDPQTLEILDITPCSFGGVSVITPGTNTSNQVAVLYQDVNCTEVPVAIHADQLTPTWRVYSTGSNVFQTRAGCLIGAEHVNNSYECDIPIGAGICASYQTQTNSPRRARSVASQSIIAYTMSLGAENSVAYSNNSIAIPTNFTISVTTEILPVSMTKTSVDCTMYICGDSTECSNLLLQYGSFCTQLNRALTGIAVEQDKNTQEVFAQVKQIYKTPPIKDFGGFNFSQILPDPSKPSKRSFIEDLLFNKVTLADAGFIKQYGDCLGDIAARDLICAQKFNGLTVLPPLLTDEMIAQYTSALLAGTITSGWTFGAGAALQIPFAMQMAYRFNGCGVTQNVLYENQKLIANQFNSAIGKIQDSLSSTASALGKLQDVVNQNAQALNTLVKQLSSNFGAISSVLNDILSRLDKVEAEVQIDRLITGRLQSLQTYVTQQLIRAAEIRASANLAATKMSECVLGQSKRVDFCGKGCHLMSFPQSAPHGVVFLHVTYVPAQEKNFTTAPAICHDGKAHFPREGVFVSNGTHWFVTQRNFYEPQIITTDNTFVSGNCDVVIGIVNNTVYDPLQPELDS

SEQ ID NO: 3226 - protein, 1147 aa, Artificial Sequence
  SARS-CoV-2/Shenzhen/SZTH-001/2020__EPI_ISL_406592 spike protein (1-1147)(I909C_Y1047C)
MFVFLVLLPLVSSQCVNLTTRTQLPPAYTNSFTRGVYYPDKVFRSSVLHSTQDLFLPFFSNVTWFHAIHVSGTNGTKRFDNPVLPFNDGVYFASTEKSNIIRGWIFGTTLDSKTQSLLIVNNATNVVIKVCEFQFCNDPFLGVYYHKNNKSWMESEFRVYSSANNCTFEYVSQPFLMDLEGKQGNFKNLREFVFKNIDGYFKIYSKHTPINLVRDLPQGFSALEPLVDLPIGINITRFQTLLALHRSYLTPGDSSSGWTAGAAAYYVGYLQPRTFLLKYNENGTITDAVDCALDPLSETKCTLKSFTVEKGIYQTSNFRVQPTESIVRFPNITNLCPFGEVFNATRFASVYAWNRKRISNCVADYSVLYNSASFSTFKCYGVSPTKLNDLCFTNVYADSFVIRGDEVRQIAPGQTGKIADYNYKLPDDFTGCVIAWNSNNLDSKVGGNYNYLYRLFRKSNLKPFERDISTEIYQAGSTPCNGVEGFNCYFPLQSYGFQPTNGVGYQPYRVVVLSFELLHAPATVCGPKKSTNLVKNKCVNFNFNGLTGTGVLTESNKKFLPFQQFGRDIADTTDAVRDPQTLEILDITPCSFGGVSVITPGTNTSNQVAVLYQDVNCTEVPVAIHADQLTPTWRVYSTGSNVFQTRAGCLIGAEHVNNSYECDIPIGAGICASYQTQTNSPRRARSVASQSIIAYTMSLGAENSVAYSNNSIAIPTNFTISVTTEILPVSMTKTSVDCTMYICGDSTECSNLLLQYGSFCTQLNRALTGIAVEQDKNTQEVFAQVKQIYKTPPIKDFGGFNFSQILPDPSKPSKRSFIEDLLFNKVTLADAGFIKQYGDCLGDIAARDLICAQKFNGLTVLPPLLTDEMIAQYTSALLAGTITSGWTFGAGAALQIPFAMQMAYRFNGCGVTQNVLYENQKLIANQFNSAIGKIQDSLSSTASALGKLQDVVNQNAQALNTLVKQLSSNFGAISSVLNDILSRLDKVEAEVQIDRLITGRLQSLQTYVTQQLIRAAEIRASANLAATKMSECVLGQSKRVDFCGKGCHLMSFPQSAPHGVVFLHVTYVPAQEKNFTTAPAICHDGKAHFPREGVFVSNGTHWFVTQRNFYEPQIITTDNTFVSGNCDVLIGIVNNTVYDPLQPELDS

SEQ ID NO: 3227 - protein, 1147 aa, Artificial Sequence
  SARS-CoV-2/Shenzhen/SZTH-004/2020__EPI_ISL_406595 spike protein (1-1147)(I909C_Y1047C)
MFVFLVLLPLVSSQCVNLTTRTQLPPAYTNSFTRGVYYPDKVFRSSVLHSTQDLFLPFFSNVTWFHAIHVSGTNGTKRFDNPVLPFNDGVYFASTEKSNIIRGWIFGTTLDSKTQSLLIVNNATNVVIKVCEFQFCNDPFLGVYYHKNNKSWMESEFRVYSSANNCTFEYVSQPFLMDLEGKQGNFKNLREFVFKNIDGYFKIYSKHTPINLVRDLPQGFSALEPLVDLPIGINITRFQTLLALHRSYLTPGDSSSGWTAGAAAYYVGYLQPRTFLLKYNENGTITDAVDCALDPLSETKCTLKSFTVEKGIYQTSNFRVQPTESIVRFPNITNLCPFGEVFNATRFASVYAWDRKRISNCVAYYSVLYNSASFSTFKCYGVSPTKLNDLCFTNVYADSFVIRGDEVRQIAPGQTGKIADYNYKLPDDFTGCVIAWNSNNLDSKVGGNYNYLYRLFRKSNLKPFERDISTEIYQAGSTPCNGVEGFNCYFPLQSYGFQPTNGVGYQPYRVVVLSFELLHAPATVCGPKKSTNLVKNKCVNFNFNGLTGTGVLTESNKKFLPFQQFGRDIADTTDAVRDPQTLEILDITPCSFGGVSVITPGTNTSNQVAVLYQDVNCTEVPVAIHADQLTPTWRVYSTGSNVFQTRAGCLIGAEHVNNSYECDIPIGAGICASYQTQTNSPRRARSVASQSIIAYTMSLGAENSVAYSNNSIAIPTNFTISVTTEILPVSMTKTSVDCTMYICGDSTECSNLLLQYGSFCTQLNRALTGIAVEQDKNTQEVFAQVKQIYKTPPIKDFGGFNFSQILPDPSKPSKRSFIEDLLFNKVTLADAGFIKQYGDCLGDIAARDLICAQKFNGLTVLPPLLTDEMIAQYTSALLAGTITSGWTFGAGAALQIPFAMQMAYRFNGCGVTQNVLYENQKLIANQFNSAIGKIQDSLSSTASALGKLQDVVNQNAQALNTLVKQLSSNFGAISSVLNDILSRLDKVEAEVQIDRLITGRLQSLQTYVTQQLIRAAEIRASANLAATKMSECVLGQSKRVDFCGKGCHLMSFPQSAPHGVVFLHVTYVPAQEKNFTTAPAICHDGKAHFPREGVFVSNGTHWFVTQRNFYEPQIITTDNTFVSGNCDVVIGIVNNTVYDPLQPELDS

SEQ ID NO: 3228 - protein, 1147 aa, Artificial Sequence
  SARS-CoV-2/France/IDF0372/2020__EPI_ISL_406596 spike protein (1-1147)(I909C_Y1047C)
MFVFLVLLPLVSSQCVNLTTRTQLPPAYTNSFTRGVYYPDKVFRSSVLHSTQDLFLPFFSNVTWFHAIHVSGTNGTKRFDNPVLPFNDGVYFASTEKSNIIRGWIFGTTLDSKTQSLLIVNNATNVVIKVCEFQFCNDPFLGVYYHKNNKSWMESEFRVYSSANNCTFEYVSQPFLMDLEGKQGNFKNLREFVFKNIDGYFKIYSKHTPINLVRDLPQGFSALEPLVDLPIGINITRFQTLLALHRSYLTPGDSSSGWTAGAAAYYVGYLQPRTFLLKYNENGTITDAVDCALDPLSETKCTLKSFTVEKGIYQTSNFRVQPTESIVRFPNITNLCPFGEVFNATRFASVYAWNRKRISNCVADYSFLYNSASFSTFKCYGVSPTKLNDLCFTNVYADSFVIRGDEVRQIAPGQTGKIADYNYKLPDDFTGCVIAWNSNNLDSKVGGNYNYLYRLFRKSNLKPFERDISTEIYQAGSTPCNGVEGFNCYFPLQSYGFQPTNGVGYQPYRVVVLSFELLHAPATVCGPKKSTNLVKNKCVNFNFNGLTGTGVLTESNKKFLPFQQFGRDIADTTDAVRDPQTLEILDITPCSFGGVSVITPGTNTSNQVAVLYQDVNCTEVPVAIHADQLTPTWRVYSTGSNVFQTRAGCLIGAEHVNNSYECDIPIGAGICASYQTQTNSPRRARSVASQSIIAYTMSLGAENSVAYSNNSIAIPTNFTISVTTEILPVSMTKTSVDCTMYICGDSTECSNLLLQYGSFCTQLNRALTGIAVEQDKNTQEVFAQVKQIYKTPPIKDFGGFNFSQILPDPSKPSKRSFIEDLLFNKVTLADAGFIKQYGDCLGDIAARDLICAQKFNGLTVLPPLLTDEMIAQYTSALLAGTITSGWTFGAGAALQIPFAMQMAYRFNGCGVTQNVLYENQKLIANQFNSAIGKIQDSLSSTASALGKLQDVVNQNAQALNTLVKQLSSNFGAISSVLNDILSRLDKVEAEVQIDRLITGRLQSLQTYVTQQLIRAAEIRASANLAATKMSECVLGQSKRVDFCGKGCHLMSFPQSAPHGVVFLHVTYVPAQEKNFTTAPAICHDGKAHFPREGVFVSNGTHWFVTQRNFYEPQIITTDNTFVSGNCDVVIGIVNNTVYDPLQPELDS

SEQ ID NO: 3229 - protein, 1147 aa, Artificial Sequence
  SARS-CoV-2/Australia/VIC01/2020__EPI_ISL_406844 spike protein (1-1147)(I909C_Y1047C)
MFVFLVLLPLVSSQCVNLTTRTQLPPAYTNSFTRGVYYPDKVFRSSVLHSTQDLFLPFFSNVTWFHAIHVSGTNGTKRFDNPVLPFNDGVYFASTEKSNIIRGWIFGTTLDSKTQSLLIVNNATNVVIKVCEFQFCNDPFLGVYYHKNNKSWMESEFRVYSSANNCTFEYVSQPFLMDLEGKQGNFKNLREFVFKNIDGYFKIYSKHTPINLVRDLPQGFSALEPLVDLPIGINITRFQTLLALHRRYLTPGDSSSGWTAGAAAYYVGYLQPRTFLLKYNENGTITDAVDCALDPLSETKCTLKSFTVEKGIYQTSNFRVQPTESIVRFPNITNLCPFGEVFNATRFASVYAWNRKRISNCVADYSVLYNSASFSTFKCYGVSPTKLNDLCFTNVYADSFVIRGDEVRQIAPGQTGKIADYNYKLPDDFTGCVIAWNSNNLDSKVGGNYNYLYRLFRKSNLKPFERDISTEIYQAGSTPCNGVEGFNCYFPLQSYGFQPTNGVGYQPYRVVVLSFELLHAPATVCGPKKSTNLVKNKCVNFNFNGLTGTGVLTESNKKFLPFQQFGRDIADTTDAVRDPQTLEILDITPCSFGGVSVITPGTNTSNQVAVLYQDVNCTEVPVAIHADQLTPTWRVYSTGSNVFQTRAGCLIGAEHVNNSYECDIPIGAGICASYQTQTNSPRRARSVASQSIIAYTMSLGAENSVAYSNNSIAIPTNFTISVTTEILPVSMTKTSVDCTMYICGDSTECSNLLLQYGSFCTQLNRALTGIAVEQDKNTQEVFAQVKQIYKTPPIKDFGGFNFSQILPDPSKPSKRSFIEDLLFNKVTLADAGFIKQYGDCLGDIAARDLICAQKFNGLTVLPPLLTDEMIAQYTSALLAGTITSGWTFGAGAALQIPFAMQMAYRFNGCGVTQNVLYENQKLIANQFNSAIGKIQDSLSSTASALGKLQDVVNQNAQALNTLVKQLSSNFGAISSVLNDILSRLDKVEAEVQIDRLITGRLQSLQTYVTQQLIRAAEIRASANLAATKMSECVLGQSKRVDFCGKGCHLMSFPQSAPHGVVFLHVTYVPAQEKNFTTAPAICHDGKAHFPREGVFVSNGTHWFVTQRNFYEPQIITTDNTFVSGNCDVVIGIVNNTVYDPLQPELDS

SEQ ID NO: 3230 - protein, 1147 aa, Artificial Sequence
  SARS-CoV-2/Germany/BavPat1/2020__EPI_ISL_406862 spike protein (1-1147)(I909C_Y1047C)
MFVFLVLLPLVSSQCVNLTTRTQLPPAYTNSFTRGVYYPDKVFRSSVLHSTQDLFLPFFSNVTWFHAIHVSGTNGTKRFDNPVLPFNDGVYFASTEKSNIIRGWIFGTTLDSKTQSLLIVNNATNVVIKVCEFQFCNDPFLGVYYHKNNKSWMESEFRVYSSANNCTFEYVSQPFLMDLEGKQGNFKNLREFVFKNIDGYFKIYSKHTPINLVRDLPQGFSALEPLVDLPIGINITRFQTLLALHRSYLTPGDSSSGWTAGAAAYYVGYLQPRTFLLKYNENGTITDAVDCALDPLSETKCTLKSFTVEKGIYQTSNFRVQPTESIVRFPNITNLCPFGEVFNATRFASVYAWNRKRISNCVADYSVLYNSASFSTFKCYGVSPTKLNDLCFTNVYADSFVIRGDEVRQIAPGQTGKIADYNYKLPDDFTGCVIAWNSNNLDSKVGGNYNYLYRLFRKSNLKPFERDISTEIYQAGSTPCNGVEGFNCYFPLQSYGFQPTNGVGYQPYRVVVLSFELLHAPATVCGPKKSTNLVKNKCVNFNFNGLTGTGVLTESNKKFLPFQQFGRDIADTTDAVRDPQTLEILDITPCSFGGVSVITPGTNTSNQVAVLYQGVNCTEVPVAIHADQLTPTWRVYSTGSNVFQTRAGCLIGAEHVNNSYECDIPIGAGICASYQTQTNSPRRARSVASQSIIAYTMSLGAENSVAYSNNSIAIPTNFTISVTTEILPVSMTKTSVDCTMYICGDSTECSNLLLQYGSFCTQLNRALTGIAVEQDKNTQEVFAQVKQIYKTPPIKDFGGFNFSQILPDPSKPSKRSFIEDLLFNKVTLADAGFIKQYGDCLGDIAARDLICAQKFNGLTVLPPLLTDEMIAQYTSALLAGTITSGWTFGAGAALQIPFAMQMAYRFNGCGVTQNVLYENQKLIANQFNSAIGKIQDSLSSTASALGKLQDVVNQNAQALNTLVKQLSSNFGAISSVLNDILSRLDKVEAEVQIDRLITGRLQSLQTYVTQQLIRAAEIRASANLAATKMSECVLGQSKRVDFCGKGCHLMSFPQSAPHGVVFLHVTYVPAQEKNFTTAPAICHDGKAHFPREGVFVSNGTHWFVTQRNFYEPQIITTDNTFVSGNCDVVIGIVNNTVYDPLQPELDS

SEQ ID NO: 3231 - protein, 1147 aa, Artificial Sequence
  SARS-CoV-2/Wuhan/HBCDC-HB-02/2020__EPI_ISL_412978 spike protein (1-1147)(I909C_Y1047C)
MFVFLVLLPLVSSQCVNLTTRTQLPPAYTNSFTRGVYYPDKVFRSSVLHSTQDLFLPFFSNVTWFHAIHVSGTNGTKRFDNPVLPFNDGVYFASTEKSNIIRGWIFGTTLDSKTQSLLIVNNATNVVIKVCEFQFCNDPFLGVYYHKNNKSWMESEFRVYSSANNCTFEYVSQPFLMDLEGKQGNFKNLREFVFKNIDGYFKIYSKHTPINLVRDLPQGFSALEPLVDLPIGINITRFQTLLALHRSYLTPGDSSSGWTAGAAAYYVGYLQPRTFLLKYNENGTITDAVDCALDPLSETKCTLKSFTVEKGIYQTSNFRVQPTESIVRFPNITNLCPFGEVFNATRFASVYAWNRKRISNCVADYSVLYNSASFSTFKCYGVSPTKLNDLCFTNVYADSFVIRGDEVRQIAPGQTGKIADYNYKLPDDFTGCVIAWNSNNLDSKVGGNYNYLYRLFRKSNLKPFERDISTEIYQAGSTPCNGVEGFNCYFPLQSYGFQPTNGVGYQPYRVVVLSFELLHAPATVCGPKKSTNLVKNKCVNFNFNGLTGTGVLTESNKKFLPFQQFGRDIADTTDAVRDPQTLEILDITPCSFGGVSVITPGTNTSNQVAVLYQDVNCTEVPVAIHADQLTPTWRVYSTGSNVFQTRAGCLIGAEHVNNSYECDIPIGAGICASYQTQTNSPRRARSVASQSIIAYTMSLGAENSVAYSNNSIAIPTNFTISVTTEILPVSMTKTSVDCTMYICGDSTECSNFLLQYGSFCTQLNRALTGIAVEQDKNTQEVFAQVKQIYKTPPIKDFGGFNFSQILPDPSKPSKRSFIEDLLFNKVTLADAGFIKQYGDCLGDIAARDLICAQKFNGLTVLPPLLTDEMIAQYTSALLAGTITSGWTFGAGAALQIPFAMQMAYRFNGCGVTQNVLYENQKLIANQFNSAIGKIQDSLSSTASALGKLQDVVNQNAQALNTLVKQLSSNFGAISSVLNDILSRLDKVEAEVQIDRLITGRLQSLQTYVTQQLIRAAEIRASANLAATKMSECVLGQSKRVDFCGKGCHLMSFPQSAPHGVVFLHVTYVPAQEKNFTTAPAICHDGKAHFPREGVFVSNGTHWFVTQRNFYEPQIITTDNTFVSGNCDVVIGIVNNTVYDPLQPELDS

SEQ ID NO: 3232 - protein, 1147 aa, Artificial Sequence
  SARS-CoV-2/Australia/QLD02/2020__EPI_ISL_407896 spike protein (1-1147)(I909C_Y1047C)
MFVFLVLLPLVSSQCVNLTTRTQLPPAYTNSFTRGVYYPDKVFRSSVLHSTQDLFLPFFSNVTWFHAIHVSGTNGTKRFDNPVLPFNDGVYFASTEKSNIIRGWIFGTTLDSKTQSLLIVNNATNVVIKVCEFQFCNDPFLGVYYHKNNKSWMESEFRVYSSANNCTFEYVSQPFLMDLEGKQGNFKNLREFVFKNIDGYFKIYSKHTPINLVRDLPQGFSALEPLVDLPIGINITRFQTLLALHRSYLTPGDSSSGWTAGAAAYYVGYLQPRTFLLKYNENGTITDAVDCALDPLSETKCTLKSFTVEKGIYQTSNFRVQPTESIVRFPNITNLCPFGEVFNATRFASVYAWNRKRISNCVADYSVLYNSASFSTFKCYGVSPTKLNDLCFTNVYADSFVIRGDEVRQIAPGQTGKIADYNYKLPDDFTGCVIAWNSNNLDSKVGGNYNYLYRLFRKSNLKPFERDISTEIYQAGSTPCNGVEGFNCYFPLQSYGFQPTNGVGYQPYRVVVLSFELLHAPATVCGPKKSTNLVKNKCVNFNFNGLTGTGVLTESNKKFLPFQQFGRDIADTTDAVRDPQTLEILDITPCSFGGVSVITPGTNTSNQVAVLYQDVNCTEVPVAIHADQLTPTWRVYSTGSNVFQTRAGCLIGAEHVNNSYECDIPIGAGICASYQTQTNSPRRARSVASQSIIAYTMSLGAENSVAYSNNSIAIPTNFTISVTTEILPVSMTKTSVDCTMYICGDSTECSNLLLQYGSFCTQLNRALTGIAVEQDKNTQEVFAQVKQIYKTPPIKDFGGFNFSQILPDPSKPSKRSFIEDLLFNKVTLADAGFIKQYGDCLGDIAARDLICAQKFNGLTVLPPLLTDEMIAQYTSALLAGTITSGWTFGAGAALQIPFAMQMAYRFNGCGVTQNVLYENQKLIANQFNSAIGKIQDSLSSTASALGKLQDVVNQNAQALNTLVKQLSSNFGAISSVLNDILSRLDKVEAEVQIDRLITGRLQSLQTYVTQQLIRAAEIRASANLAATKMSECVLGQSKRVDFCGKGCHLMSFPQSAPHGVVFLHVTYVPAQEKNFTTAPAICHDGKAHFPREGVFVSNGTHWFVTQRNFYEPQIITTDNTFVSGNCDVVIGIVNNTVYDPLQLELDS

SEQ ID NO: 3233 - protein, 1147 aa, Artificial Sequence
  SARS-CoV-2/India/1-31/2020__EPI_ISL_413523 spike protein (1-1147)(I909C_Y1047C)
MFVFLVLLPLVSSQCVNLTTRTQLPPAYTNSFTRGVYYPDKVFRSSVLHSTQDLFLPFFSNVTWFHAIHVSGTNGTKRFDNPVLPFNDGVYFASTEKSNIIRGWIFGTTLDSKTQSLLIVNNATNVVIKVCEFQFCNDPFLGVYYHKNNKSWMESEFRVYSSANNCTFEYVSQPFLMDLEGKQGNFKNLREFVFKNIDGYFKIYSKHTPINLVRDLPQGFSALEPLVDLPIGINITRFQTLLALHRSYLTPGDSSSGWTAGAAAYYVGYLQPRTFLLKYNENGTITDAVDCALDPLSETKCTLKSFTVEKGIYQTSNFRVQPTESIVRFPNITNLCPFGEVFNATRFASVYAWNRKRISNCVADYSVLYNSASFSTFKCYGVSPTKLNDLCFTNVYADSFVIRGDEVRQIAPGQTGKIADYNYKLPDDFTGCVIAWNSNNLDSKVGGNYNYLYRLFRKSNLKPFERDISTEIYQAGSTPCNGVEGFNCYFPLQSYGFQPTNGVGYQPYRVVVLSFELLHAPATVCGPKKSTNLVKNKCVNFNFNGLTGTGVLTESNKKFLPFQQFGRDIADTTDAVRDPQTLEILDITPCSFGGVSVITPGTNTSNQVAVLYQDVNCTEVPVAIHADQLTPTWRVYSTGSNVFQTRAGCLIGAEHVNNSYECDIPIGAGICASYQTQTNSPRRARSVASQSIIAYTMSLGAENSVAYSNNSIAIPTNFTISVTTEILPVSMTKTSVDCTMYICGDSTECSNLLLQYGSFCTQLNRALTGIAVEQDKNTQEVFAQVKQIYKTPPIKDFGGFNFSQILPDPSKPSKRSFIEDLLFNKVTLADAGFIKQYGDCLGDIAARDLICAQKFNGLTVLPPLLTDEMIAQYTSALLAGTITSGWTFGAGAALQIPFAMQMAYRFNGCGVTQNVLYENQKLIANQFNSVIGKIQDSLSSTASALGKLQDVVNQNAQALNTLVKQLSSNFGAISSVLNDILSRLDKVEAEVQIDRLITGRLQSLQTYVTQQLIRAAEIRASANLAATKMSECVLGQSKRVDFCGKGCHLMSFPQSAPHGVVFLHVTYVPAQEKNFTTAPAICHDGKAHFPREGVFVSNGTHWFVTQRNFYEPQIITTDNTFVSGNCDVVIGIVNNTVYDPLQPELDS

SEQ ID NO: 3234 - protein, 1147 aa, Artificial Sequence
  SARS-CoV-2/Guangdong/GD2020087-P0008/2020__EPI_ISL_413863 spike protein (1-1147)(I909C_Y1047C)
MFVFLVLLPLVSSQCVNLTTRTQLPPAYTNSFTRGVYYPDKVFRSSVLHSTQDLFLPFFSNVTWFHAIHVSGTNGTKRFDNPVLPFNDGVYFASTEKSNIIRGWIFGTTLDSKTQSLLIVNNATNVVIKVCEFQFCNDPFLGVYYHKNNKSWMESEFRVYSSANNCTFEYVSQPFLMDLEGKQGNFKNLREFVFKNIDGYFKIYSKHTPINLVRDLPQGFSALEPLVDLPIGINITRFQTLLALHRSYLTPGDSSSGWTAGAAAYYVGYLQPRTFLLKYNENGTITDAVDCALDPLSETKCTLKSFTVEKGIYQTSNFRVQPTESIVRFPNITNLCPFGEVFNATRFASVYAWNRKRISNCVADYSVLYNSASFSTFKCYGVSPTKLNDLCFTNVYADSFVIRGDEVREIAPGQTGKIADYNYKLPDDFTGCVIAWNSNNLDSKVGGNYNYLYRLFRKSNLKPFERDISTEIYQAGSTPCNGVEGFNCYFPLQSYGFQPTNGVGYQPYRVVVLSFELLHAPATVCGPKKSTNLVKNKCVNFNFNGLTGTGVLTESNKKFLPFQQFGRDIADTTDAVRDPQTLEILDITPCSFGGVSVITPGTNTSNQVAVLYQDVNCTEVPVAIHADQLTPTWRVYSTGSNVFQTRAGCLIGAEHVNNSYECDIPIGAGICASYQTQTNSPRRARSVASQSIIAYTMSLGAENSVAYSNNSIAIPTNFTISVTTEILPVSMTKTSVDCTMYICGDSTECSNLLLQYGSFCTQLNRALTGIAVEQDKNTQEVFAQVKQIYKTPPIKDFGGFNFSQILPDPSKPSKRSFIEDLLFNKVTLADAGFIKQYGDCLGDIAARDLICAQKFNGLTVLPPLLTDEMIAQYTSALLAGTITSGWTFGAGAALQIPFAMQMAYRFNGCGVTQNVLYENQKLIANQFNSAIGKIQDSLSSTASALGKLQDVVNQNAQALNTLVKQLSSNFGAISSVLNDILSRLDKVEAEVQIDRLITGRLQSLQTYVTQQLIRAAEIRASANLAATKMSECVLGQSKRVDFCGKGCHLMSFPQSAPHGVVFLHVTYVPAQEKNFTTAPAICHDGKAHFPREGVFVSNGTHWFVTQRNFYEPQIITTDNTFVSGNCDVVIGIVNNTVYDPLQPELDS

SEQ ID NO: 3235 - protein, 1147 aa, Artificial Sequence
  SARS-CoV-2/Sweden/01/2020__EPI_ISL_411951 spike protein (1-1147)(I909C_Y1047C)
MFVFLVLLPLVSSQCVNLTTRTQLPPAYTNSFTRGVYYPDKVFRSSVLHSTQDLFLPFFSNVTWFHAIHVSGTNGTKRFDNPVLPFNDGVYFASTEKSNIIRGWIFGTTLDSKTQSLLIVNNATNVVIKVCEFQFCNDPFLGVYYHKNNKSWMESEFRVYSSANNCTFEYVSQPFLMDLEGKQGNFKNLREFVFKNIDGYFKIYSKHTPINLVRDLPQGFSALEPLVDLPIGINITRFQTLLALHRSYLTPGDSSSGWTAGAAAYYVGYLQPRTFLLKYNENGTITDAVDCALDPLSETKCTLKSFTVEKGIYQTSNFRVQPTESIVRFPNITNLCPFGEVFNATRFASVYAWNRKRISNCVADYSVLYNSASFSTFKCYGVSPTKLNDLCFTNVYADSFVIRGDEVRQIAPGQTGKIADYNYKLPDDFTGCVIAWNSNNLDSKVGGNYNYLYRLFRKSNLKPFERDISTEIYQAGSTPCNGVEGFNCYFPLQSYGFQPTNGVGYQPYRVVVLSFELLHAPATVCGPKKSTNLVKNKCVNFNFNGLTGTGVLTESNKKFLPFQQFGRDIADTTDAVRDPQTLEILDITPCSFGGVSVITPGTNTSNQVAVLYQDVNCTEVPVAIHADQLTPTWRVYSTGSNVFQTRAGCLIGAEHVNNSYECDIPIGAGICASYQTQTNSPRRARSVASQSIIAYTMSLGAENSVAYSNNSIAIPTNFTISVTTEILPVSMTKTSVDCTMYICGDSTECSNLLLQYGSFCTQLNRALTGIAVEQDKNTQEVFAQVKQIYKTPPIKDCGGFNFSQILPDPSKPSKRSFIEDLLFNKVTLADAGFIKQYGDCLGDIAARDLICAQKFNGLTVLPPLLTDEMIAQYTSALLAGTITSGWTFGAGAALQIPFAMQMAYRFNGCGVTQNVLYENQKLIANQFNSAIGKIQDSLSSTASALGKLQDVVNQNAQALNTLVKQLSSNFGAISSVLNDILSRLDKVEAEVQIDRLITGRLQSLQTYVTQQLIRAAEIRASANLAATKMSECVLGQSKRVDFCGKGCHLMSFPQSAPHGVVFLHVTYVPAQEKNFTTAPAICHDGKAHFPREGVFVSNGTHWFVTQRNFYEPQIITTDNTFVSGNCDVVIGIVNNTVYDPLQPELDS

SEQ ID NO: 3236 - protein, 1147 aa, Artificial Sequence
  SARS-CoV-2/Tianmen/HBCDC-HB-07/2020__EPI_ISL_412983 spike protein (1-1147)(I909C_Y1047C)
MFVFLVLLPLVSSQCVNLTTRTQLPPAYTNSFTRGVYYPDKVFRSSVLHSTQDLFLPFFSNVTWFHAIHVSGTNGTKRFDNPVLPFNDGVYFASTEKSNIIRGWIFGTTLDSKTQSLLIVNNATNVVIKVCEFQFCNDPFLGVYYHKNNKSWMESEFRVYSSANNCTFEYVSQPFLMDLEGKQGNFKNLREFVFKNIDGYFKIYSKHTPINLVRDLPQGFSALEPLVDLPIGINITRFQTLLALHRSYLTPGDSSSGWTAGAAAYYVGYLQPRTFLLKYNENGTITDAVDCALDPLSETKCTLKSFTVEKGIYQTSNFRVQPTESIVRFPNITNLCPFGEVFNATRFASVYAWNRKRISNCVADYSVLYNSASFSTFKCYGVSPTKLNDLCFTNVYADSFVIRGDEVRQIAPGQTGKIADYNYKLPDDFTGCVIAWNSNNLDSKVGGNYNYLYRLFRKSNLKPFERDISTEIYQAGSTPCNGVEGFNCYFPLQSYGFQPTNGVGYQPYRVVVLSFELLHAPATVCGPKKSTNLVKNKCVNFNFNGLTGTGVLTESNKKFLPFQQFGRDIADTTDAVRDPQTLEILDITPCSFGGVSVITPGTNTSNQVAVLYQDLNCTEVPVAIHADQLTPTWRVYSTGSNVFQTRAGCLIGAEHVNNSYECDIPIGAGICASYQTQTNSPRRARSVASQSIIAYTMSLGAENSVAYSNNSIAIPTNFTISVTTEILPVSMTKTSVDCTMYICGDSTECSNLLLQYGSFCTQLNRALTGIAVEQDKNTQEVFAQVKQIYKTPPIKDFGGFNFSQILPDPSKPSKRSFIEDLLFNKVTLADAGFIKQYGDCLGDIAARDLICAQKFNGLTVLPPLLTDEMIAQYTSALLAGTITSGWTFGAGAALQIPFAMQMAYRFNGCGVTQNVLYENQKLIANQFNSAIGKIQDSLSSTASALGKLQDVVNQNAQALNTLVKQLSSNFGAISSVLNDILSRLDKVEAEVQIDRLITGRLQSLQTYVTQQLIRAAEIRASANLAATKMSECVLGQSKRVDFCGKGCHLMSFPQSAPHGVVFLHVTYVPAQEKNFTTAPAICHDGKAHFPREGVFVSNGTHWFVTQRNFYEPQIITTDNTFVSGNCDVVIGIVNNTVYDPLQPELDS

SEQ ID NO: 3237 - protein, 1147 aa, Artificial Sequence
  SARS-CoV-2/Hong Kong/case42_VM20002493/2020__EPI_ISL_414527 spike protein (1-1147)(I909C_Y1047C)
MFVFLVLLPLVSSQCVNLTTRTQLPPAYTNSFTRGVYYPDKVFRSSVLHSTQDLFLPFFSNVTWFHAIHVSGTNGTKRFDNPVLPFNDGVYFASTEKSNIIRGWIFGTTLDSKTQSLLIVNNATNVVIKVCEFQFCNDPFLGVYYHKNNKSWMESEFRVYSSANNCTFEYVSQPFLMDLEGKQGNFKNLREFVFKNIDGYFKIYSKHTPINLVRDLPQGFSALEPLVDLPIGINITRFQTLLALHRSYLTPGDSSSGWTAGAAAYYVGYLQPRTFLLKYNENGTITDAVDCALDPLSETKCTLKSFTVEKGIYQTSNFRVQPTESIVRFPNITNLCPFGEVFNATRFASVYAWNRKRISNCVADYSVLYNSASFSTFKCYGVSPTKLNDLCFTNVYADSFVIRGDEVRQIAPGQTGKIADYNYKLPDDFTGCVIAWNSNNLDSKVGGNYNYLYRLFRKSNLKPFERDISTEIYQAGSTPCNGVEGFNCYFPLQSYGFQPTNGVGYQPYRVVVLSFELLHAPATVCGPKKSTNLVKNKCVNFNFNGLTGTGVLTESNKKFLPFQQFGRDIADTTDAVRDPQTLEILDITPCSFGGVSVITPGTNTSNQVAVLYQDVNCTEVPVAIHADQLTPTWRVYSTGSNVFQTRAGCLIGAEHVNNSYECDIPIGAGICASYQTQTNSPRRARSVASQSIIAYTMSLGAENSVAYSNNSIAIPTNFAISVTTEILPVSMTKTSVDCTMYICGDSTECSNLLLQYGSFCTQLNRALTGIAVEQDKNTQEVFAQVKQIYKTPPIKDFGGFNFSQILPDPSKPSKRSFIEDLLFNKVTLADAGFIKQYGDCLGDIAARDLICAQKFNGLTVLPPLLTDEMIAQYTSALLAGTITSGWTFGAGAALQIPFAMQMAYRFNGCGVTQNVLYENQKLIANQFNSAIGKIQDSLSSTASALGKLQDVVNQNAQALNTLVKQLSSNFGAISSVLNDILSRLDKVEAEVQIDRLITGRLQSLQTYVTQQLIRAAEIRASANLAATKMSECVLGQSKRVDFCGKGCHLMSFPQSAPHGVVFLHVTYVPAQEKNFTTAPAICHDGKAHFPREGVFVSNGTHWFVTQRNFYEPQIITTDNTFVSGNCDVVIGIVNNTVYDPLQPELDS

SEQ ID NO: 3238 - protein, 1147 aa, Artificial Sequence
  SARS-CoV-2/USA/CruiseA-23/2020__EPI_ISL_414482 spike protein (1-1147)(I909C_Y1047C)
MFVFLVLLPLVSSQCVNLTTRTQLPPAYTNSFTRGVYYPDKVFRSSVLHSTQDLFLPFFSNVTWFHAIHVSGTNGTKRFDNPVLPFNDGVYFASTEKSNIIRGWIFGTTLDSKTQSLLIVNNATNVVIKVCEFQFCNDPFLGVYYHKNNKSWMESEFRVYSSANNCTFEYVSQPFLMDLEVKQGNFKNLREFVFKNIDGYFKIYSKHTPINLVRDLPQGFSALEPLVDLPIGINITRFQTLLALHRSYLTPGDSSSGWTAGAAAYYVGYLQPRTFLLKYNENGTITDAVDCALDPLSETKCTLKSFTVEKGIYQTSNFRVQPTESIVRFPNITNLCPFGEVFNATRFASVYAWNRKRISNCVADYSVLYNSASFSTFKCYGVSPTKLNDLCFTNVYADSFVIRGDEVRQIAPGQTGKIADYNYKLPDDFTGCVIAWNSNNLDSKVGGNYNYLYRLFRKSNLKPFERDISTEIYQAGSTPCNGVEGFNCYFPLQSYGFQPTNGVGYQPYRVVVLSFELLHAPATVCGPKKSTNLVKNKCVNFNFNGLTGTGVLTESNKKFLPFQQFGRDIADTTDAVRDPQTLEILDITPCSFGGVSVITPGTNTSNQVAVLYQDVNCTEVPVAIHADQLTPTWRVYSTGSNVFQTRAGCLIGAEHVNNSYECDIPIGAGICASYQTQTNSPRRARSVASQSIIAYTMSLGAENSVAYSNNSIAIPTNFTISVTTEILPVSMTKTSVDCTMYICGDSTECSNLLLQYGSFCTQLNRALTGIAVEQDKNTQEVFAQVKQIYKTPPIKDFGGFNFSQILPDPSKPSKRSFIEDLLFNKVTLADAGFIKQYGDCLGDIAARDLICAQKFNGLTVLPPLLTDEMIAQYTSALLAGTITSGWTFGAGAALQIPFAMQMAYRFNGCGVTQNVLYENQKLIANQFNSAIGKIQDSLSSTASALGKLQDVVNQNAQALNTLVKQLSSNFGAISSVLNDILSRLDKVEAEVQIDRLITGRLQSLQTYVTQQLIRAAEIRASANLAATKMSECVLGQSKRVDFCGKGCHLMSFPQSAPHGVVFLHVTYVPAQEKNFTTAPAICHDGKAHFPREGVFVSNGTHWFVTQRNFYEPQIITTDNTFVSGNCDVVIGIVNNTVYDPLQPELDS

SEQ ID NO: 3239 - protein, 1147 aa, Artificial Sequence
  SARS-CoV-2/Hong Kong/case85_VM20002868/2020__EPI_ISL_414519 spike protein (1-1147)(I909C_Y1047C)
MFVFLVLVPLVSSQCVNLTTRTQLPPAYTNSFTRGVYYPDKVFRSSVLHSTQDLFLPFFSNVTWFHAIHVSGTNGTKRFDNPVLPFNDGVYFASTEKSNIIRGWIFGTTLDSKTQSLLIVNNATNVVIKVCEFQFCNDPFLGVYYHKNNKSWMESEFRVYSSANNCTFEYVSQPFLMDLEGKQGNFKNLREFVFKNIDGYFKIYSKHTPINLVRDLPQGFSALEPLVDLPIGINITRFQTLLALHRSYLTPGDSSSGWTAGAAAYYVGYLQPRTFLLKYNENGTITDAVDCALDPLSETKCTLKSFTVEKGIYQTSNFRVQPTESIVRFPNITNLCPFGEVFNATRFASVYAWNRKRISNCVADYSVLYNSASFSTFKCYGVSPTKLNDLCFTNVYADSFVIRGDEVRQIAPGQTGKIADYNYKLPDDFTGCVIAWNSNNLDSKVGGNYNYLYRLFRKSNLKPFERDISTEIYQAGSTPCNGVEGFNCYFPLQSYGFQPTNGVGYQPYRVVVLSFELLHAPATVCGPKKSTNLVKNKCVNFNFNGLTGTGVLTESNKKFLPFQQFGRDIADTTDAVRDPQTLEILDITPCSFGGVSVITPGTNTSNQVAVLYQDVNCTEVPVAIHADQLTPTWRVYSTGSNVFQTRAGCLIGAEHVNNSYECDIPIGAGICASYQTQTNSPRRARSVASQSIIAYTMSLGAENSVAYSNNSIAIPTNFTISVTTEILPVSMTKTSVDCTMYICGDSTECSNLLLQYGSFCTQLNRALTGIAVEQDKNTQEVFAQVKQIYKTPPIKDFGGFNFSQILPDPSKPSKRSFIEDLLFNKVTLADAGFIKQYGDCLGDIAARDLICAQKFNGLTVLPPLLTDEMIAQYTSALLAGTITSGWTFGAGAALQIPFAMQMAYRFNGCGVTQNVLYENQKLIANQFNSAIGKIQDSLSSTASALGKLQDVVNQNAQALNTLVKQLSSNFGAISSVLNDILSRLDKVEAEVQIDRLITGRLQSLQTYVTQQLIRAAEIRASANLAATKMSECVLGQSKRVDFCGKGCHLMSFPQSAPHGVVFLHVTYVPAQEKNFTTAPAICHDGKAHFPREGVFVSNGTHWFVTQRNFYEPQIITTDNTFVSGNCDVVIGIVNNTVYDPLQPELDS

SEQ ID NO: 3240 - protein, 1147 aa, Artificial Sequence; identical to SEQ ID NO: 3230
  SARS-CoV-2/England/200990660/2020__EPI_ISL_414523 spike protein (1-1147)(I909C_Y1047C)

SEQ ID NO: 3241 - protein, 1147 aa, Artificial Sequence
  SARS-CoV-2/Australia/NSW09/2020__EPI_ISL_413595 spike protein (1-1147)(I909C_Y1047C)
MFVFLVLLPLVSSQCVNLTTRTQLPPAYTNSFTRGVYYPDKVFRSSVLHSTQDLFLPFFSNVTWFHAIHVSGTNGTKRFDNPVLPFNDGVYFASTEKSNIIRGWIFGTTLDSKTQSLLIVNNATNVVIKVCEFQFCNDPFLGVYYHKNNKSWMESEFRVYSSANNCTFEYVSQPFLMDLEGKQGNFKNLREFVFKNIDGYFKIYSKHTPINLVRDLPQGFSALEPLVDLPIGINITRFQTLLALHRSYLTPGDSSSGWTAGAAAYYVGYLQPRTFLLKYNENGTITDAVDCALDPLSETKCTLKSFTVEKGIYQTSNFRVQPTESIVRFPNITNLCPFGEVFNATRFASVYAWNRKRISNCVADYSVLYNSASFSTFKCYGVSPTKLNDLCFTNVYADSFVIRGDEVRQIAPGQTGKIADYNYKLPDDFTGCVIAWNSNNLDSKVGGNYNYLYRLFRKSNLKPFERDISTEIYQAGSTPCNGVEGFNCYFPLQSYGFQPTNGVGYQPYRVVVLSFELLHAPATVCGPKKSTNLVKNKCVNFNFNGLTGTGVLTESNKKFLPFQQFGRDIADTTDAVRDPQTLEILDITPCSFGGVSVITPGTNTSNQVAVLYQDVNCTEVPVAIHADQLTPTWRVYSTGSNVFQTRAGCLIGAEHVNNSYECDIPIGAGICASYQTQTNSPRRARSVASQSIIAYTMSLGAENSVAYSNNSIAIPTNFTISVTTEILPVSMTKTSVDCTMYICGDSTECSNLLLQYGSFCTQLNRALTGIAVEQDKNTQEVFAQVKQIYKTPPIKDFGGFNFSQILPDPSKPSKRSFIEDLLFNKVTLADAGFIKQYGDCLGDIAARDLICAQKFNGLTVLPPLLTDEMIAQYTSALLAGTITSGWTFGAGAALQIPFAMQMAYRFNGCGVTQNVLYENQKLIANQFNSAIGKIQDSLSFTASALGKLQDVVNQNAQALNTLVKQLSSNFGAISSVLNDILSRLDKVEAEVQIDRLITGRLQSLQTYVTQQLIRAAEIRASANLAATKMSECVLGQSKRVDFCGKGCHLMSFPQSAPHGVVFLHVTYVPAQEKNFTTAPAICHDGKAHFPREGVFVSNGTHWFVTQRNFYEPQIITTDNTFVSGNCDVVIGIVNNTVYDPLQPELDS

SEQ ID NO: 3242 - protein, 1147 aa, Artificial Sequence; identical to SEQ ID NO: 3222
  SARS-CoV-2/Australia/NSW10/2020__EPI_ISL_413596 spike protein (1-1147)(I909C_Y1047C)

SEQ ID NO: 3243 - protein, 1147 aa, Artificial Sequence
  SARS-CoV-2/Switzerland/1000477797/2020__EPI_ISL_413023 spike protein (1-1147)(I909C_Y1047C)
MFVFLVLLPLVSSQCVNLTTRTQLPPAYTNSFTRGVYYPDKVFRSSVLHSTQDLFLPFFSNVTWFHAIHVSGTNGTKRFDNPVLPFNDGVYFASTEKSNIIRGWIFGTTLDSKTQSLLIVNNATNVVIKVCEFQFCNDPFLGVYYHKNNKSWMESEFRVYSSANNCTFEYVSQPFLMDLEGKQGNFKNLREFVFKNIDGYFNIYSKHTPINLVRDLPQGFSALEPLVDLPIGINITRFQTLLALHRSYLTPGDSSSGWTAGAAAYYVGYLQPRTFLLKYNENGTITDAVDCALDPLSETKCTLKSFTVEKGIYQTSNFRVQPTESIVRFPNITNLCPFGEVFNATRFASVYAWNRKRISNCVADYSVLYNSASFSTFKCYGVSPTKLNDLCFTNVYADSFVIRGDEVRQIAPGQTGKIADYNYKLPDDFTGCVIAWNSNNLDSKVGGNYNYLYRLFRKSNLKPFERDISTEIYQAGSTPCNGVEGFNCYFPLQSYGFQPTNGVGYQPYRVVVLSFELLHAPATVCGPKKSTNLVKNKCVNFNFNGLTGTGVLTESNKKFLPFQQFGRDIADTTDAVRDPQTLEILDITPCSFGGVSVITPGTNTSNQVAVLYQGVNCTEVPVAIHADQLTPTWRVYSTGSNVFQTRAGCLIGAEHVNNSYECDIPIGAGICASYQTQTNSPRRARSVASQSIIAYTMSLGAENSVAYSNNSIAIPTNFTISVTTEILPVSMTKTSVDCTMYICGDSTECSNLLLQYGSFCTQLNRALTGIAVEQDKNTQEVFAQVKQIYKTPPIKDFGGFNFSQILPDPSKPSKRSFIEDLLFNKVTLADAGFIKQYGDCLGDIAARDLICAQKFNGLTVLPPLLTDEMIAQYTSALLAGTITSGWTFGAGAALQIPFAMQMAYRFNGCGVTQNVLYENQKLIANQFNSAIGKIQDSLSSTASALGKLQDVVNQNAQALNTLVKQLSSNFGAISSVLNDILSRLDKVEAEVQIDRLITGRLQSLQTYVTQQLIRAAEIRASANLAATKMSECVLGQSKRVDFCGKGCHLMSFPQSAPHGVVFLHVTYVPAQEKNFTTAPAICHDGKAHFPREGVFVSNGTHWFVTQRNFYEPQIITTDNTFVSGNCDVVIGIVNNTVYDPLQPELDS

SEQ ID NO: 3244 - protein, 1147 aa, Artificial Sequence
  SARS-CoV-2/Belgium/BA-02291/2020__EPI_ISL_415159 spike protein (1-1147)(I909C_Y1047C)
MFVFLVLLPLVSSQCVNLTTRTQLPPAYTNSFTRGVYYPDKVFRSSVLHSTQDLFLPFFSNVTWFHAIHVSGTNGTKRFDNPVLPFNDGVYFASTEKSNIIRGWIFGTTLDSKTQSLLIVNNATNVVIKVCEFQFCNDPFLGVYYHKNNKSWMESEFRVYSSANNCTFEYVSQPFLMDLEGKQGNFKNLREFVFKNIDGYFKIYSKHTPINLVRDLPQGFSALEPLVDLPIGINITRFQTLLALHRSYLTPGDSSSGWTAGAAAYYVGYLQPRTFLLKYNENGTITDAVDCALDPLSETKCTLKSFTVEKGIYQTSNFRVQPTESIVRFPNITNLCPFGEVFNATRFASVYAWNRKRISNCVADYSVLYNSASFSTFKCYGVSPTKLNDLCFTNVYADSFVIRGDEVRQIAPGQTGKIADYNYKLPDDFTGCVIAWNSNNLDSKVGGNYNYLYRLFRRSNLKPFERDISTEIYQAGSTPCNGVEGFNCYFPLQSYGFQPTNGVGYQPYRVVVLSFELLPAPATVCGPKKSTNLVKNKCVNFNFNGLTGTGVLTESNKKFLPFQQFGRDIADTTDAVRDPQTLEILDITPCSFGGVSVITPGTNTSNQVAVLYQGVNCTEVPVAIHADQLTPTWRVYSTGSNVFQTRAGCLIGAEHVNNSYECDIPIGAGICASYQTQTNSPRRARSVASQSIIAYTMSLGAENSVAYSNNSIAIPTNFTISVTTEILPVSMTKTSVDCTMYICGDSTECSNLLLQYGSFCTQLNRALTGIAVEQDKNTQEVFAQVKQIYKTPPIKDFGGFNFSQILPDPSKPSKRSFIEDLLFNKVTLADAGFIKQYGDCLGDIAARDLICAQKFNGLTVLPPLLTDEMIAQYTSALLAGTITSGWTFGAGAALQIPFAMQMAYRFNGCGVTQNVLYENQKLIANQFNSAIGKIQDSLSSAAPALGKLQDVVNQNAQALNTLVKQLSSNFGAISSVLNDILSRLDKVEAEVQIDRLITGRLQSLQTYVTQQLIRAAEIRASANLAATKMSECVLGQSKRVDFCGKGCHLMSFPQSAPHGVVFLHVTYVPAQEKNFTTAPAICHDGKAHFPREGVFVSNGTHWFVTQRNFYEPQIITTDNTFVSGNCDVVIGIVNNTVYDPLQPELDS

SEQ ID NO: 3245 - protein, 1147 aa, Artificial Sequence
  SARS-CoV-2/USA/WA8-UW5/2020__EPI_ISL_413486 spike protein (1-1147)(I909C_Y1047C)
MFVFLVLLPLVSSQCVNLTTRTQLPPAYTNSFTRGVYYPDKVFRSSVLHSTQDLFLPFFSNVTWFHAIHVSGTNGTKRFDNPVLPFNDGVYFASTEKSNIIRGWIFGTTLDSKTQSLLIVNNATNVVIKVCEFQFCNDPFLGVYYHKNNKSWMESEFRVYSSANNCTFEYVSQPFLMDLEGKQGNFKNLREFVFKNIDGYFKIYSKHTPINLVRDLPQGFSALEPLVDLPIGINITRFQTLLALHRSYLTPGDSSSGWTAGAAAYYVGYLQPRTFLLKYNENGTITDAVDCALDPLSETKCTLKSFTVEKGIYQTSNFRVQPTESIVRFPNITNLCPFGEVFNATRFASVYAWNRKRISNCVADYSVLYNSASFSTFKCYGVSPTKLNDLCFTNVYADSFVIRGDEVRQIAPGQTGKIADYNYKLPDDFTGCVIAWNSNNLDSKVGGNYNYLYRLFRKSNLKPFERDISTEIYQAGSTPCNGVEGFNCYFPLQSYGFQPTNGVGYQPYRVVVLSFELLHAPATVCGPKKSTNLVKNKCVNFNFNGLTGTGVLTESNKKFLPFQQFGRDIADTTDAVRDPQTLEILDITPCSFGGVSVITPGTNTSNQVAVLYQDVNCTEVPVAIHADQLTPTWRVYSTGSNVFQTRAGCLIGAEYVNNSYECDIPIGAGICASYQTQTNSPRRARSVASQSIIAYTMSLGAENSVAYSNNSIAIPTNFTISVTTEILPVSMTKTSVDCTMYICGDSTECSNLLLQYGSFCTQLNRALTGIAVEQDKNTQEVFAQVKQIYKTPPIKDFGGFNFSQILPDPSKPSKRSFIEDLLFNKVTLADAGFIKQYGDCLGDIAARDLICAQKFNGLTVLPPLLTDEMIAQYTSALLAGTITSGWTFGAGAALQIPFAMQMAYRFNGCGVTQNVLYENQKLIANQFNSAIGKIQDSLSSTASALGKLQDVVNQNAQALNTLVKQLSSNFGAISSVLNDILSRLDKVEAEVQIDRLITGRLQSLQTYVTQQLIRAAEIRASANLAATKMSECVLGQSKRVDFCGKGCHLMSFPQSAPHGVVFLHVTYVPAQEKNFTTAPAICHDGKAHFPREGVFVSNGTHWFVTQRNFYEPQIITTDNTFVSGNCDVVIGIVNNTVYDPLQPELDS

SEQ ID NO: 3246 - protein, 1147 aa, Artificial Sequence
  SARS-CoV-2/England/20102000506/2020__EPI_ISL_415147 spike protein (1-1147)(I909C_Y1047C)
MFVFLVLLPLVSSQCVNLTTRTQLPPAYTNSFTRGVYYPDKVFRSSVLHSTQDLFLPFFSNVTWFHAIHVSGTNGTKRFDNPVLPFNDGVYFASTEKSNIIRGWIFGTTLDSKTQSLLIVNNATNVVIKVCEFQFCNDPFLGVYYHKNNKSWMESEFRVYSSANNCTFEYVSQPFLMDLEGKQGNFKNLREFVFKNIDGYFKIYSKHTPINLVRDLPQGFSALEPLVDLPIGINITRFQTLLALHRSYLTPGDSSSGWTAGAAAYYVGYLQPRTFLLKYNENGTITDAVDCALDPLSETKCTLKSFTVEKGIYQTSNFRVQPTESIVRFPNITNLCPFGEVFNATRFASVYAWNRKRISNCVADYSVLYNSASFSTFKCYGVSPTKLNDLCFTNVYADSFVIRGDEVRQIAPGQTGKIADYNYKLPDDFTGCVIAWNSNNLDSKVGGNYNYLYRLFRKSNLKPFERDISTEIYQAGSTPCNGVEGFNCYFPLQSYGFQPTNGVGYQPYRVVVLSFELLHAPATVCGPKKSTNLVKNKCVNFNFNGLTGTGVLTESNKKFLPFQQFGRDIADTTDAVRDPQTLEILDITPCSFGGVSVITPGTNTSNQVAVLYQGVNCTEVPVAIHADQLTPTWRVYSTGSNVFQTRAGCLIGAEHVNNSYECDIPIGAGICASYQTQTNSPRRARSVASQSIIAYTMSLGAENSVAYSNNSIAIPTNFTISVTTEILPVSMTKTSVDCTMYICGDSTECSNLLLQYGSFCTQLNRALTGIAVEQDKNTQEVFAQVKQIYKTPPIKDFGGFNFSQILPDPSKPSKRSFIEDLLFNKVTLADAGFIKQYGYCLGDIAARDLICAQKFNGLTVLPPLLTDEMIAQYTSALLAGTITSGWTFGAGAALQIPFAMQMAYRFNGCGVTQNVLYENQKLIANQFNSAIGKIQDSLSSTASALGKLQDVVNQNAQALNTLVKQLSSNFGAISSVLNDILSRLDKVEAEVQIDRLITGRLQSLQTYVTQQLIRAAEIRASANLAATKMSECVLGQSKRVDFCGKGCHLMSFPQSAPHGVVFLHVTYVPAQEKNFTTAPAICHDGKAHFPREGVFVSNGTHWFVTQRNFYEPQIITTDNTFVSGNCDVVIGIVNNTVYDPLQPELDS

SEQ ID NO: 3247 - protein, 1147 aa, Artificial Sequence
  SARS-CoV-2/Belgium/VAG-03013/2020__EPI_ISL_415155 spike protein (1-1147)(I909C_Y1047C)
MFVFLVLLPLVSSQCVNLTTRTQLPPAYTNSFTRGVYYPDKVFRSSVLHSTQDLFLPFFSNVTWFHAIHVSGTNGTKRFDNPVLPFNDGVYFASTEKSNIIRGWIFGTTLDSKTQSLLIVNNATNVVIKVCEFQFCNDPFLGVYYHKNNKSWMESEFRVYSSANNCTFEYVSQPFLMDLEGKQGNFKNLREFVFKNIDGYFKIYSKHTPINLVRDLPQGFSALEPLVDLPIGINITRFQTLLALHRSYLTPGDSSSGWTAGAAAYYVGYLQPRTFLLKYNENGTITDAVDCALDPLSETKCTLKSFTVEKGIYQTSNFRVQPTESIVRFPNITNLCPFGEVFNATRFASVYAWNRKRISNCVADYSVLYNSASFSTFKCYGVSPTKLNDLCFTNVYADSFVIRGDEVRQIAPGQTGKIADYNYKLPDDFTGCVIAWNSNNLDSKVGGNYNYLYRLFRKSNLKPFERDISTEIYQAGSTPCNGVEGFNCYFPLQSYGFQPTNGVGYQPYRVVVLSFELLHAPATVCGPKKSTNLVKNKCVNFNFNGLTGTGVLTESNKKFLPFQQFGRDIADTTDAVRDPQTLEILDITPCSFGGVSVITPGTNTSNQVAVLYQGVNCTEVPVAIHADQLTPTWRVYSTGSNVFQTRAGCLIGAEHVNNSYECDIPIGAGICASYQTQTNSPRRARSVASQSIIAYTMSLGAENSVAYSNNSIAIPTNFTISVTTEILPVSMTKTSVDCTMYICGDSTECSNLLLQYGSFCTQLNRALTGIAVEQDKNTQEVFAQVKQIYKTPPIKDFGGFNFSQILPDPSKPSKRSFIEDLLFNKVTLADAGFIKQYGDCLGDIAARDLICAQKFNGLTVLPPLLTDEMIAQYTSALLAGTITSGWTFGAGAALQIPFAMQMAYRFNGCGVTQNVLYENQKLIANQFNSAIGKIQDSLSSTATALGKLQDVVNQNAQALNTLVKQLSSNFGAISSVLNDILSRLDKVEAEVQIDRLITGRLQSLQTYVTQQLIRAAEIRASANLAATKMSECVLGQSKRVDFCGKGCHLMSFPQSAPHGVVFLHVTYVPAQEKNFTTAPAICHDGKAHFPREGVFVSNGTHWFVTQRNFYEPQIITTDNTFVSGNCDVVIGIVNNTVYDPLQPELDS

SEQ ID NO: 3248 - protein, 1147 aa, Artificial Sequence
  SARS-CoV-2/Belgium/BC-03016/2020__EPI_ISL_415157 spike protein (1-1147)(I909C_Y1047C)
MFVFLVLLPLVSSQCVNLTTRTQLPPAYTNSFTRGVYYPDKVFRSSVLHSTQDLFLPFFSNVTWFHAIHVSGTNGTKRFDNPVLPFNDGVYFASTEKSNIIRGWIFGTTLDSKTQSLLIVNNATNVVIKVCEFQFCNDPFLGVYYHKNNKSWMESEFRVYSSANNCTFEYVSQPFLMDLEGKQGNFKNLREFVFKNIDGYFKIYSKHTPINLVRDLPQGFSALEPLVDLPIGINITRFQTLLALHRSYLTPGDSSSGWTAGAAAYYVGYLQPRTFLLKYNENGTITDAVDCALDPLSETKCTLKSFTVEKGIYQTSNFRVQPTESIVRFPNITNLCPFGEVFNATRFASVYAWNRKRISNCVADYSVLYNSASFSTFKCYGVSPTKLNDLCFTNVYADSFVIRGDEVRQIAPGQTGKIADYNYKLPDDFTGCVIAWNSNNLDSKVGGNYNYLYRLFRKSNLKPFERDISTEIYQAGSTPCNGVEGFNCYFPLQSYGFQPTNGVGYQPYRVVVLSFELLHAPATVCGPKKSTNLVKNKCVNFNFNGLTGTGVLTESNKKFLPFQQFGRDIADTTDAVRDPQTLEILDITPCSFGGVSVITPGTNTSNQVAVLYQGVNCTEVPVAIHADQLTPTWRVYSTGSNVFQTRAGCLIGAEHVNNSYECDIPIGAGICASYQTQTNSPRRARSVASQSIIAYTMSLGAENSVAYSNNSIAIPTNFTISVTTEILPVSMTKTSVDCTMYICGDSTECSNLLLQYGSFCTQLNRALTGIAVEQDKNTQEVFAQVKQIYKTPPIKDFGGFNFSQILPDPSKPSKRSFIEDLLFNKVTLADAGFIKQYGDCLGDIAARDLICAQKFNGLTVLPPLLTDEMIAQYTSALLAGTITSGWTFGAGAALQIPFAMQMAYRFNGCGVTQNVLYENQKLIANQFNSAIGKIQDSLSSTAPALGKLQDVVNQNAQALNTLVKQLSSNFGAISSVLNDILSRLDKVEAEVQIDRLITGRLQSLQTYVTQQLIRAAEIRASANLAATKMSECVLGQSKRVDFCGKGCHLMSFPQSAPHGVVFLHVTYVPAQEKNFTTAPAICHDGKAHFPREGVFVSNGTHWFVTQRNFYEPQIITTDNTFVSGNCDVVIGIVNNTVYDPLQPELDS

SEQ ID NO: 3249 - protein, 1147 aa, Artificial Sequence
  SARS-CoV-2/Germany/BavPat3/2020__EPI_ISL_414521 spike protein (1-1147)(I909C_Y1047C)
MFVFLVLLPLVSSQCVNLTTRTQLPPAYTNSFTRGVYYPDKVFRSSVLHSTQDLFLPFFSNVTWFHAIHVSGTNGTKRFDNPVLPFNDGVYFASTEKSNIIRGWIFGTTLDSKTQSLLIVNNATNVVIKVCEFQFCNDPFLGVYYHKNNKSWMESEFRVYSSANNCTFEYVSQPFLMDLEGKQGNFKNLREFVFKNIDGYFKIYSKHTPINLVRDLPQGFSALEPLVDLPIGINITRFQTLLALHRSYLTPGDSSSGWTAGAAAYYVGYLQPRTFLLKYNENGTITDAVDCALDPLSETKCTLKSFTVEKGIYQTSNFRVQPTESIVRFPNITNLCPFGEVFNATRFASVYAWNRKRISNCVADYSVLYNSASFSTFKCYGVSPTKLNDLCFTNVYADSFVIRGDEVRQIAPGQTGKIADYNYKLPDDFTGCVIAWNSNNLDSKVGGNYNYLYRLFRKSNLKPFERDISTEIYQAGSTPCNGVEGFNCYFPLQSYGFQPTNGVGYQPYRVVVLSFELLHAPATVCGPKKSTNLVKNKCVNFNFNGLTGTGVLTESNKKFLPFQQFGRDIADTTDAVRDPQTLEILDITPCSFGGVSVITPGTNTSNQVAVLYQDVNCTEVPVAIHADQLTPTWRVYSTGSNVFQTRAGCLIGAEHVNNSYECDIPIGAGICASYQTQTNSPRRARSVASQSIIAYTMSLGAENSVAYSNNSIAIPTNFTISVTTEILPVSMTKTSVDCTMYICGDSTECSNLLLQYGSFCTQLNRALTGIAVEQDKNTQQVFAQVKQIYKTPPIKDFGGFNFSQILPDPSKPSKRSFIEDLLFNKVTLADAGFIKQYGDCLGDIAARDLICAQKFNGLTVLPPLLTDEMIAQYTSALLAGTITSGWTFGAGAALQIPFAMQMAYRFNGCGVTQNVLYENQKLIANQFNSAIGKIQDSLSSTASALGKLQDVVNQNAQALNTLVKQLSSNFGAISSVLNDILSRLDKVEAEVQIDRLITGRLQSLQTYVTQQLIRAAEIRASANLAATKMSECVLGQSKRVDFCGKGCHLMSFPQSAPHGVVFLHVTYVPAQEKNFTTAPAICHDGKAHFPREGVFVSNGTHWFVTQRNFYEPQIITTDNTFVSGNCDVVIGIVNNTVYDPLQPELDS

SEQ ID NO: 3250 - protein, 1147 aa, Artificial Sequence
  SARS-CoV-2/France/HF1805/2020__EPI_ISL_414628 spike protein (1-1147)(I909C_Y1047C)
MFVFLVLLPLVSSQCVNLTTRTQLPPAYTNSFTRGVYYPDKVFRSSVLHSTQDLFLPFFSNVTWFHAIHVSGTNGTKRFDNPVLPFNDGVYFASTEKSNIIRGWIFGTTLDSKTQSLLIVNNATNVVIKVCEFQFCNDPFLGVYYHKNNKSWMESEFRVYSSANNCTFEYVSQPFLMDLEGKQGNFKNLREFVFKNIDGYFKIYSKHTPINLVRDLPQGFSALEPLVDLPIGINITRFQTLLALHRSYLTPGDSSSGWTAGAAAYYVGYLQPRTFLLKYNENGTITDAVDCALDPLSETKCTLKSFTVEKGIYQTSNFRVQPTESIVRFPNITNLCPFGEVFNATRFASVYAWNRKRISNCVADYSVLYNSASFSTFKCYGVSPTKLNDLCFTNVYADSFVIRGDEVRQIAPGQTGKIADYNYKLPDDFTGCVIAWNSNNLDSKVGGNYNYLYRLFRKSNLKPFERDISTEIYQAGSTPCNGVEGFNCYFPLQSYGFQPTNGVGYQPYRVVVLSFELLHAPATVCGPKKSTNLVKNKCVNFNFNGLTGTGVLTESNKKFLPFQQFGRDIADTTDAVRDPQTLEILDITPCSFGGVSVITPGTNTSNQVAVLYQGVNCTEVPVAIHADQLTPTWRVYSTGSNVFQTRAGCLIGAEHVNNSYECDIPIGAGICASYQTQTNSPRRARSVASQSIIAYTMSLGAENSVAYSNNSIAIPTNFTISVTTEILPVSMTKTSVDCTMYICGDSTECSNLLLQYGSFCTQLNRALTGIAVEQDKNTQEVFAQVKQIYKTPPIKDFGGFNFSQILPDPSKPSKRSFIEDLLFNKVTLADAGFIKQYGDCLGDIAARDLICAQKFNGLTVLPPLLTDEMIAQYTSALLAGTITSGWTFGAGAALQIPFAMQMAYRFNGCGVTQNVLYENQKLIANQFNSAIGKIQDSLSSTASALGKLQDVVNQNAQALNTLVKQLSSNFGAISSVLNDILSRLDKVEAEVQIDRLITGRLQSLQTYVTQQLIRAAEIRASANLAATKMSECVLGQSKRVDFCGKGCHLMSFPQSAPHGVVFLHVTYVPAQEKNFTTAPAICHDGKAHFPREGVFVSNGTHWFVTQRNFYEPQIITTDNTFVSGNCDVVIGVVNNTVYDPLQPELDS

SEQ ID NO: 3251 - protein, 1147 aa, Artificial Sequence
  SARS-CoV-2/Netherlands/ZuidHolland_9/2020__EPI_ISL_414445 spike protein (1-1147)(I909C_Y1047C)
MFVFLVLLPLVSSQCVNLTTRTQLPPAYTNSFTRGVYYPDKVFRSSVLHSTQDLFLPFFSNVTWFHAIHVSGTNGTKRFDNPVLPFNDGVYFASTEKSNIIRGWIFGTTLDSKTQSLLIVNNATNVVIKVCEFQFCNDPFLGVYYHKNNKSWMESEFRVYSSANNCTFEYVSQPFLMDLEGKQGNFKNLREFVFKNIDGYFKIYSKHTPINLVRDLPQGFSALEPLVDLPIGINITRFQTLLALHRSYLTPGDSSSGWTAGAAAYYVGYLQPRTFLLKYNENGTITDAVDCALDPLSETKCTLKSFTVEKGIYQTSNFRVQPTESIVRFPNITNLCPFGEVFNATRFASVYAWNRKRISNCVADYSVLYNSASFSTFKCYGVSPTKLNDLCFTNVYADSFVIRGDEVRQIAPGQTGKIADYNYKLPDDFTGCVIAWNSNNLDSKVGGNYNYLYRLFRKSNLKPFERDISTEIYQAGSTPCNGVEGFNCYFPLQSYGFQPTNGVGYQPYRVVVLSFELLHAPATVCGPKKSTNLVKNKCVNFNFNGLTGTGVLTESNKKFLPFQQFGRDIADTTDAVRDPQTLEILDITPCSFGGVSVITPGTNTSNQVAVLYQGVNCTEVPVAIHADQLTPTWRVYSTGSNVFQTRAGCLIGAEHVNNSYECDIPIGAGICASYQTQTNSPRRARSVASQSIIAYTMSLGAENSVAYSNNSIAIPTNFTISVTTEILPVSMTKTSVDCTMYICGDSTECSNLLLQYGSFCTQLNRALTGIAVEQDKNTQEVFAQVKQIYKTPPIKDFGGFNFSQILPDPSKPSKRSFIEDLLFNKVTLADAGFIKQYGDCLGDIAARDLICVQKFNGLTVLPPLLTDEMIAQYTSALLAGTITSGWTFGAGAALQIPFAMQMAYRFNGCGVTQNVLYENQKLIANQFNSAIGKIQDSLSSTASALGKLQDVVNQNAQALNTLVKQLSSNFGAISSVLNDILSRLDKVEAEVQIDRLITGRLQSLQTYVTQQLIRAAEIRASANLAATKMSECVLGQSKRVDFCGKGCHLMSFPQSAPHGVVFLHVTYVPAQEKNFTTAPAICHDGKAHFPREGVFVSNGTHWFVTQRNFYEPQIITTDNTFVSGNCDVVIGIVNNTVYDPLQPELDS

SEQ ID NO: 3252 - protein, 1147 aa, Artificial Sequence
  SARS-CoV-2/Finland/FIN03032020A/2020__EPI_ISL_413602 spike protein (1-1147)(I909C_Y1047C)
MFVFLVLLPLVSSQCVNLTTRTQLPPAYTNSFTRGVYYPDKVFRSSVLHSTQDLFLPFFSNVTWFHAIHVSGTNGTKRFDNPVLPFNDGVYFASTEKSNIIRGWIFGTTLDSKTQSLLIVNNATNVVIKVCEFQFCNDPFLGVYYHKNNKSWMESEFRVYSSANNCTFEYVSQPFLMDLEGKQGNFKNLREFVFKNIDGYFKIYSKHTPINLVRDLPQGFSALEPLVDLPIGINITRFQTLLALHRSYLTPGDSSSGWTAGAAAYYVGYLQPRTFLLKYNENGTITDAVDCALDPLSETKCTLKSFTVEKGIYQTSNFRVQPTESIVRFPNITNLCPFGEVFNATRFASVYAWNRKRISNCVADYSVLYNSASFSTFKCYGVSPTKLNDLCFTNVYADSFVIRGDEVRQIAPGQTGKIADYNYKLPDDFTGCVISWNSNNLDSKVGGNYNYLYRLFRKSNLKPFERDISTEIYQAGSTPCNGVEGFNCYFPLQSYGFQPTNGVGYQPYRVVVLSFELLHAPATVCGPKKSTNLVKNKCVNFNFNGLTGTGVLTESNKKFLPFQQFGRDIADTTDAVRDPQTLEILDITPCSFGGVSVITPGTNTSNQVAVLYQGVNCTEVPVAIHADQLTPTWRVYSTGSNVFQTRAGCLIGAEHVNNSYECDIPIGAGICASYQTQTNSPRRARSVASQSIIAYTMSLGAENSVAYSNNSIAIPTNFTISVTTEILPVSMTKTSVDCTMYICGDSTECSNLLLQYGSFCTQLNRALTGIAVEQDKNTQEVFAQVKQIYKTPPIKDFGGFNFSQILPDPSKPSKRSFIEDLLFNKVTLADAGFIKQYGDCLGDIAARDLICAQKFNGLTVLPPLLTDEMIAQYTSALLAGTITSGWTFGAGAALQIPFAMQMAYRFNGCGVTQNVLYENQKLIANQFNSAIGKIQDSLSSTASALGKLQDVVNQNAQALNTLVKQLSSNFGAISSVLNDILSRLDKVEAEVQIDRLITGRLQSLQTYVTQQLIRAAEIRASANLAATKMSECVLGQSKRVDFCGKGCHLMSFPQSAPHGVVFLHVTYVPAQEKNFTTAPAICHDGKAHFPREGVFVSNGTHWFVTQRNFYEPQIITTDNTFVSGNCDVVIGIVNNTVYDPLQPELDS

SEQ ID NO: 3253 - protein, 1147 aa, Artificial Sequence
  SARS-CoV-2/France/GE1977/2020__EPI_ISL_414632 spike protein (1-1147)(I909C_Y1047C)
MFVFLVLLPLVSSQCVNLTTRTQLPPAYTNSFTRGVYYPDKVFRSSVLHSTQDLFLPFFSNVTWFHAIHVSGTNGTKRFDNPVLPFNDGVYFASTEKSNIIRGWIFGTTLDSKTQSLLIVNNATNVVIKVCEFQFCNDPFLGVYYHKNNKSWMESEFRVYSSANNCTFEYVSQPFLMDLEGKQGNFKNLREFVFKNIDGYFKIYSKHTPINLVRDLPQGFSALEPLVDLPIGINITRFQTLLALHRSYLTPGDSSSGWTAGAAAYYVGYLQPRTFLLKYNENGTITDAVDCALDPLSETKCTLKSFTVEKGIYQTSNFRVQPTESIVRFPNITNLCPFGEVFNATRFASVYAWNRKRISNCVADYSVLYNSASFSTFKCYGVSPTKLNDLCFTNVYADSFVIRGDEVRQIAPGQTGKIADYNYKLPDDFTGCVIAWNSNNLDSKVGGNYNYLYRLFRKSNLKPFERDISTEIYQAGSTPCNGVEGFNCYFPLQSYGFQPTNGVGYQPYRVVVLSFELLHAPATVCGPKKSTNLVKNKCVNFNFNGLTGTGVLTESNKKFLPFQQFGRDIADTTDAVRDPQTLEILDITPCSFGGVSVITPGTNTSNQVAVLYQGVNCTEVPVAIHADQLTPTWRVYSTGSNVFQTRAGCLIGAEHVNNSYECDIPIGAGICASYQTQTNSPRRARSVASQSIIAYTMSLGAENSVAYSNNSIAIPTNFTISVTTEILPVSMTKTSVDCTMYICGDSTECSNLLLQYGSFCTQLNRALTGIAVEQDKNTQEVFAQVKQIYKTPPIKDFGGFNFSQILPDPSKPSKRSFIEDLLFNKVTLADAGFIKQYGDCLGDIAARDLICAQKFNGLTVLPPLLTDEMIAQYTSALLAGTITSGWTFGAGAALQIPFAMQMAYRFNGCGVTQNVLYENQKLIANQFNSAIGKIQDSLFSTASALGKLQDVVNQNAQALNTLVKQLSSNFGAISSVLNDILSRLDKVEAEVQIDRLITGRLQSLQTYVTQQLIRAAEIRASANLAATKMSECVLGQSKRVDFCGKGCHLMSFPQSAPHGVVFLHVTYVPAQEKNFTTAPAICHDGKAHFPREGVFVSNGTHWFVTQRNFYEPQIITTDNTFVSGNCDVVIGIVNNTVYDPLQPELDS

SEQ ID NO: 3254 - protein, 1147 aa, Artificial Sequence
  SARS-CoV-2/Finland/FIN-313/2020__EPI_ISL_414641 spike protein (1-1147)(I909C_Y1047C)
MFVFLVLLPLVSSQCVNLTTRTQLPPAYTNSFTRGVYYPDKVFRSSVLHSTQDLFLPFFSNVTWFHAIHVSGTNGTKRFDNPVLPFNDGVYFASTEKSNIIRGWIFGTTLDSKTQSLLIVNNATNVVIKVCEFQFCNDPFLGVYYHKNNKSWMESEFRVYSSANNCTFEYVSQPFLMDLEGKQGNFKNLREFVFKNIDGYFKIYSKHTPINLVRDLPQGFSALEPLVDLPIGINITRFKTLLALHRSYLTPGDSSSGWTAGAAAYYVGYLQPRTFLLKYNENGTITDAVDCALDPLSETKCTLKSFTVEKGIYQTSNFRVQPTESIVRFPNITNLCPFGEVFNATRFASVYAWNRKRISNCVADYSVLYNSASFSTFKCYGVSPTKLNDLCFTNVYADSFVIRGDEVRQIAPGQTGKIADYNYKLPDDFTGCVIAWNSNNLDSKVGGNYNYLYRLFRKSNLKPFERDISTEIYQAGSTPCNGVEGFNCYFPLQSYGFQPTNGVGYQPYRVVVLSFELLHAPATVCGPKKSTNLVKNKCVNFNFNGLTGTGVLTESNKKFLPFQQFGRDIADTTDAVRDPQTLEILDITPCSFGGVSVITPGTNTSNQVAVLYQGVNCTEVPVAIHADQLTPTWRVYSTGSNVFQTRAGCLIGAEHVNNSYECDIPIGAGICASYQTQTNSPRRARSVASQSIIAYTMSLGAENSVAYSNNSIAIPTNFTISVTTEILPVSMTKTSVDCTMYICGDSTECSNLLLQYGSFCTQLNRALTGIAVEQDKNTQEVFAQVKQIYKTPPIKDFGGFNFSQILPDPSKPSKRSFIEDLLFNKVTLADAGFIKQYGDCLGDIAARDLICAQKFNGLTVLPPLLTDEMIAQYTSALLAGTITSGWTFGAGAALQIPFAMQMAYRFNGCGVTQNVLYENQKLIANQFNSAIGKIQDSLSSTASALGKLQDVVNQNAQALNTLVKQLSSNFGAISSVLNDILSRLDKVEAEVQIDRLITGRLQSLQTYVTQQLIRAAEIRASANLAATKMSECVLGQSKRVDFCGKGCHLMSFPQSAPHGVVFLHVTYVPAQEKNFTTAPAICHDGKAHFPREGVFVSNGTHWFVTQRNFYEPQIITTDNTFVSGNCDVVIGIVNNTVYDPLQPELDS

SEQ ID NO: 3255 - protein, 1147 aa, Artificial Sequence
  SARS-CoV-2/Netherlands/ZuidHolland_2/2020__EPI_ISL_414556 spike protein (1-1147)(I909C_Y1047C)
MFVFLVLLPLVSSQCVNLTTRTQLPPAYTNSFTRGVYYPDKVFRSSVLHSTQDLFLPFFSNVTWFHAIHVSGTNGTKRFDNPVLPFNDGVYFASTEKSNIIRGWIFGTTLDSKTQSLLIVNNATNVVIKVCEFQFCNDPFLGVYYHKNNKSWMESEFRVYSSANNCTFEYVSQPFLMDLEGKQGNFKNLREFVFKNIDGYFKIYSKHTPINLVRDLPQGFSALEPLVDLPIGINITRFQTLLALHRSYLTPGDSSSGWTAGAAAYYVGYLQPRTFLLKYNENGTITDAVDCALDPLSETKCTLKSFTVEKGIYQTSNFRVQPTESIVRFPNITNLCPFGEVFNATRFASVYAWNRKRISNCVADYSVLYNSASFSTFKCYGVSPTKLNDLCFTNVYADSFVIRGDEVRQIAPGQTGKIADYNYKLPDDFTGCVIAWNSNNLDSKVGGNYNYLYRLFRKSNLKPFERDISTEIYQAGSTPCNGVEGFNCYFPLQSYGFQPTNGVGYQPYRVVVLSFELLHAPATVCGPKKSTNLVKNKCVNFNFNGLTGTGVLTESNKKFLPFQQFGRDIADTTDAVRDPQTLEILDITPCSFGGVSVITPGTNTSNQVAVLYQGVNCTEVPVAIHADQLTPTWRVYSTGSNVFQTRAGCLIGAEHVNNSYECDIPIGAGICASYQTQTNSPRRARSVASQSIIAYTMSLGAENSVAYSNNSIAIPTNFTISVTTEILPVSMTKTSVDCTMYICGDSTECSNLLLQYGSFCTQLNRALTGIALEQDKNTQEVFAQVKQIYKTPPIKDFGGFNFSQILPDPSKPSKRSFIEDLLFNKVTLADAGFIKQYGDCLGDIAARDLICAQKFNGLTVLPPLLTDEMIAQYTSALLAGTITSGWTFGAGAALQIPFAMQMAYRFNGCGVTQNVLYENQKLIANQFNSAIGKIQDSLSSTASALGKLQDVVNQNAQALNTLVKQLSSNFGAISSVLNDILSRLDKVEAEVQIDRLITGRLQSLQTYVTQQLIRAAEIRASANLAATKMSECVLGQSKRVDFCGKGCHLMSFPQSAPHGVVFLHVTYVPAQEKNFTTAPAICHDGKAHFPREGVFVSNGTHWFVTQRNFYEPQIITTDNTFVSGNCDVVIGIVNNTVYDPLQPELDS

SEQ ID NO: 3256 - protein, 1147 aa, Artificial Sequence
  SARS-CoV-2/USA/WA-UW31/2020__EPI_ISL_414618 spike protein (1-1147)(I909C_Y1047C)
MFVFLVLLPLVSSQCVNLTTRTQLPPAYTNSFTRGVYYPDKVFRSSVLHSTQDLFLPFFSNVTWFHAIHVSGTNGTKRFDNPVLPFNDGVYFASTEKSNIIRGWIFGTTLDSKTQSLLIVNNATNVVIKVCEFQFCNDPFLGVYYHKNNKSWMESEFRVYSSANNCTFEYVSQPFLMDLEGKQGNFKNLREFVFKNIDGYFKIYSKHTPINLVRDLPQGFSALEPLVDLPIGINITRFQTLLALHRSYLTPGDSSSGWTAGAAAYYVGYLQPRTFLLKYNENGTITDAVDCALDPLSETKCTLKSFTVEKGIYQTSNFRVQPTESIVRFPNITNLCPFGEVFNATRFASVYAWNRKRISNCVADYSVLYNSASFSTFKCYGVSPTKLNDLCFTNVYADSFVIRGDEVRQIAPGQTGKIADYNYKLPDDFTGCVIAWNSNNLDSKVGGNYNYLYRLFRKSNLKPFERDISTEIYQAGSTPCNGAEGFNCYFPLQSYGFQPTNGVGYQPYRVVVLSFELLHAPATVCGPKKSTNLVKNKCVNFNFNGLTGTGVLTESNKKFLPFQQFGRDIADTTDAVRDPQTLEILDITPCSFGGVSVITPGTNTSNQVAVLYQDVNCTEVPVAIHADQLTPTWRVYSTGSNVFQTRAGCLIGAEHVNNSYECDIPIGAGICASYQTQTNSPRRARSVASQSIIAYTMSLGAENSVAYSNNSIAIPTNFTISVTTEILPVSMTKTSVDCTMYICGDSTECSNLLLQYGSFCTQLNRALTGIAVEQDKNTQEVFAQVKQIYKTPPIKDFGGFNFSQILPDPSKPSKRSFIEDLLFNKVTLADAGFIKQYGDCLGDIAARDLICAQKFNGLTVLPPLLTDEMIAQYTSALLAGTITSGWTFGAGAALQIPFAMQMAYRFNGCGVTQNVLYENQKLIANQFNSAIGKIQDSLSSTASALGKLQDVVNQNAQALNTLVKQLSSNFGAISSVLNDILSRLDKVEAEVQIDRLITGRLQSLQTYVTQQLIRAAEIRASANLAATKMSECVLGQSKRVDFCGKGCHLMSFPQSAPHGVVFLHVTYVPAQEKNFTTAPAICHDGKAHFPREGVFVSNGTHWFVTQRNFYEPQIITTDNTFVSGNCDVVIGIVNNTVYDPLQPELDS

SEQ ID NO: 3257 - protein, 1147 aa, Artificial Sequence
  SARS-CoV-2/South Korea/SNU01/2020__EPI_ISL_411929 spike protein (1-1147)(I909C_Y1047C)
MFVFLVLLPLVSSQCVNLTTRTQLPPAYTNSFTRGVYYPDKVFRSSVLHSTQDLFLPFFSNVTWFHAIHVSGTNGTKRFDNPVLPFNDGVYFASTEKSNIIRGWIFGTTLDSKTQSLLIVNNATNVVIKVCEFQFCNDPFLGVYYHKNNKSWMESEFRVYSSANNCTFEYVSQPFLMDLEGKQGNFKNLREFVFKNIDGYFKIYSKHTPINLVRDLPQGFWALEPLVDLPIGINITRFQTLLALHRSYLTPGDSSSGWTAGAAAYYVGYLQPRTFLLKYNENGTITDAVDCALDPLSETKCTLKSFTVEKGIYQTSNFRVQPTESIVRFPNITNLCPFGEVFNATRFASVYAWNRKRISNCVADYSVLYNSASFSTFKCYGVSPTKLNDLCFTNVYADSFVIRGDEVRQIAPGQTGKIADYNYKLPDDFTGCVIAWNSNNLDSKVGGNYNYLYRLFRKSNLKPFERDISTEIYQAGSTPCNGVEGFNCYFPLQSYGFQPTNGVGYQPYRVVVLSFELLHAPATVCGPKKSTNLVKNKCVNFNFNGLTGTGVLTESNKKFLPFQQFGRDIADTTDAVRDPQTLEILDITPCSFGGVSVITPGTNTSNQVAVLYQDVNCTEVPVAIHADQLTPTWRVYSTGSNVFQTRAGCLIGAEHVNNSYECDIPIGAGICASYQTQTNSPRRARSVASQSIIAYTMSLGAENSVAYSNNSIAIPTNFTISVTTEILPVSMTKTSVDCTMYICGDSTECSNLLLQYGSFCTQLNRALTGIAVEQDKNTQEVFAQVKQIYKTPPIKDFGGFNFSQILPDPSKPSKRSFIEDLLFNKVTLADAGFIKQYGDCLGDIAARDLICAQKFNGLTVLPPLLTDEMIAQYTSALLAGTITSGWTFGAGAALQIPFAMQMAYRFNGCGVTQNVLYENQKLIANQFNSAIGKIQDSLSSTASALGKLQDVVNQNAQALNTLVKQLSSNFGAISSVLNDILSRLDKVEAEVQIDRLITGRLQSLQTYVTQQLIRAAEIRASANLAATKMSECVLGQSKRVDFCGKGCHLMSFPQSAPHGVVFLHVTYVPAQEKNFTTAPAICHDGKAHFPREGVFVSNGTHWFVTQRNFYEPQIITTDNTFVSGNCDVVIGIVNNTVYDPLQPELDS

SEQ ID NO: 3258 - protein, 1147 aa, Artificial Sequence
  SARS-CoV-2/China/WF0004/2020__EPI_ISL_413694 spike protein (1-1147)(I909C_Y1047C)
MFVFLVLLPLVSSQCVNLTTRTQLPPAYTNSFTRGVYYPDKVFRSSVLHSTQDLFLPFFSNVTWFHAIHVSGTNGTKRFDNPVLPFNDGVYFASTEKSNIIRGWIFGTTLDSKTQSLLIVNNATNVVIKVCEFQFCNDPFLGVYYHKNNKSWTESEFRVYSSANNCTFEYVSQPFLMDLEGKQGNFKNLREFVFKNIDGYFKIYSKHTPINLVRDLPQGFSALEPLVDLPIGINITRFQTLLALHRSYLTPGDSSSGWTAGAAAYYVGYLQPRTFLLKYNENGTITDAVDCALDPLSETKCTLKSFTVEKGIYQTSNFRVQPTESIVRFPNITNLCPFGEVFNATRFASVYAWNRKRISNCVADYSVLYNSASFSTFKCYGVSPTKLNDLCFTNVYADSFVIRGDEVRQIAPGQTGKIADYNYKLPDDFTGCVIAWNSNNLDSKVGGNYNYLYRLFRKSNLKPFERDISTEIYQAGSTPCNGVEGFNCYFPLQSYGFQPTNGVGYQPYRVVVLSFELLHAPATVCGPKKSTNLVKNKCVNFNFNGLTGTGVLTESNKKFLPFQQFGRDIADTTDAVRDPQTLEILDITPCSFGGVSVITPGTNTSNQVAVLYQDVNCTEVPVAIHADQLTPTWRVYSTGSNVFQTRAGCLIGAEHVNNSYECDIPIGAGICASYQTQTNSPRRARSVASQSIIAYTMSLGAENSVAYSNNSIAIPTNFTISVTTEILPVSMTKTSVDCTMYICGDSTECSNLLLQYGSFCTQLNRALTGIAVEQDKNTQEVFAQVKQIYKTPPIKDFGGFNFSQILPDPSKPSKRSFIEDLLFNKVTLADAGFIKQYGDCLGDIAARDLICAQKFNGLTVLPPLLTDEMIAQYTSALLAGTITSGWTFGAGAALQIPFAMQMAYRFNGCGVTQNVLYENQKLIANQFNSAIGKIQDSLSSTASALGKLQDVVNQNAQALNTLVKQLSSNFGAISSVLNDILSRLDKVEAEVQIDRLITGRLQSLQTYVTQQLIRAAEIRASANLAATKMSECVLGQSKRFDFCGKGCHLMSFPQSAPHGVVFLHVTYVPAQEKNFTTAPAICHDGKAHFPREGVFVSNGTHWFVTQRNFYEPQIITTDNTFVSGNCDVVIGIVNNTVYDPLQPELDS

SEQ ID NO: 3259 - protein, 1147 aa, Artificial Sequence
  SARS-CoV-2/China/WF0028/2020__EPI_ISL_413791 spike protein (1-1147)(I909C_Y1047C)
MFVFLVLLPLVSSQCVNLTTRTQLPPAYTNSFTRGVYYPDKVFRSSVLHSTQDLFLPFFSNVTWFHAIHVSGTNGTKRFDNPVLPFNDGVYFASTEKSNIIRGWIFGTTLDSKTQSLLIVNNATNVVIKVCEFQFCNDPFLGVYYHKNNKSWMESEFRVYSSANNCTFEYVSQPFLMDLEGKQGNFKNLREFVFKNIDGYFKIYSKHTPINLVRDLPQGFSALEPLVDLPIGINITRFQTLLALHRSYLTPGDSSSGWTAGAAAYYVGYLQPRTFLLKYNENGTITDAVDCALDPLSETKCTLKSFTVEKGIYQTSNFRVQPTESIVRFPNITNLCPFGEVFNATRFASVYAWNRKRISNCVADYSVLYNSASFSTFKCYGVSPTKLNDLCFTNVYADSFVIRGDEVRQIAPGQTGKIADYNYKLPDDFTGCVIAWNSNNLDSKVGGNYNYLYRLFRKSNLKPFERDISTEIYQAGSTPCNGVEGFNCYFPLQSYGFQPTNGVGYQPYRVVVLSFELLHAPATVCGPKKSTNLVKNKCVNFNFNGLTGTGVLTESNKKFLPFQQFGRDIADTTDAVRDPQTLEILDITPCSFGGVSVITPGTNTSNQVAVLYQDVNCTEVPVAIHADQLTPTWRVYSTGSNVFQTRAGCLIGAEHVNNSYECDIPIGAGICASYQTQTNSPRRARSVASQSIIAYTMSLGAENSVAYSNNSIAIPTNFTISVTTEILPVSMTKTSVDCTMYICGDSTECSNLLLQYGSFCTQLNRALTGIAVEQDKNTQEVFAQVKQIYKTPPIKDFGGFNFSQILPDPSKPSKRSFIEDLLFNKVTLADAGFIKQYGDCLGDIAARDLICAQKFNGLTVLPPLLTDEMIAQYTSALLAGTITSGWTFGAGAALQIPFAMQMAYRFNGCGVTQNVLYENQKLIANQFNSAIGKIQDSLSSTASALGKLQDVVNQNAQALNTLVKQLSSNFGAISSVLNDILSRLDKVEAEVQIDRLITGRLQSLQTYVTQQLIRAAEIRASANLAATKMSECVLGQSKRVDFCGKGCHLMSFPQSAPHGVVFLHVTYVPAQEKNFTTAPAICHDGKAHFPREGVFVSNGTHWFVTQRNFYEPQIITTDNTFVSGNCDVVIGIVNNTVYDPLQPELES

SEQ ID NO: 3260 - protein, 1147 aa, Artificial Sequence
  SARS-CoV-2/2019-nCoV/USA-CruiseA-18/2020__MT159716.1 spike protein (1-1147)(I909C_Y1047C)
MFVFLVLLPLVSSQCVNLTTRTQLPPAYTNSFTRGVYYPDKVFRSSVLHSTQDLFLPFFSNVTWFHAIHVSGTNGTKRFDNPVLPFNDGVYFASTEKSNIIRGWIFGTTLDSKTQSLLIVNNATNVVIKVCEFQFCNDPFLGVYYHKNNKSWMESELRVYSSANNCTFEYVSQPFLMDLEGKQGNFKNLREFVFKNIDGYFKIYSKHTPINLVRDLPQGFSALEPLVDLPIGINITRFQTLLALHRSYLTPGDSSSGWTAGAAAYYVGYLQPRTFLLKYNENGTITDAVDCALDPLSETKCTLKSFTVEKGIYQTSNFRVQPTESIVRFPNITNLCPFGEVFNATRFASVYAWNRKRISNCVADYSVLYNSASFSTFKCYGVSPTKLNDLCFTNVYADSFVIRGDEVRQIAPGQTGKIADYNYKLPDDFTGCVIAWNSNNLDSKVGGNYNYLYRLFRKSNLKPFERDISTEIYQAGSTPCNGVEGFNCYFPLQSYGFQPTNGVGYQPYRVVVLSFELLHAPATVCGPKKSTNLVKNKCVNFNFNGLTGTGVLTESNKKFLPFQQFGRDIADTTDAVRDPQTLEILDITPCSFGGVSVITPGTNTSNQVAVLYQDVNCTEVPVAIHADQLTPTWRVYSTGSNVFQTRAGCLIGAEHVNNSYECDIPIGAGICASYQTQTNSPRRARSVASQSIIAYTMSLGAENSVAYSNNSIAIPTNFTISVTTEILPVSMTKTSVDCTMYICGDSTECSNLLLQYGSFCTQLNRALTGIAVEQDKNTQEVFAQVKQIYKTPPIKDFGGFNFSQILPDPSKPSKRSFIEDLLFNKVTLADAGFIKQYGDCLGDIAARDLICAQKFNGLTVLPPLLTDEMIAQYTSALLAGTITSGWTFGAGAALQIPFAMQMAYRFNGCGVTQNVLYENQKLIANQFNSAIGKIQDSLSSTASALGKLQDVVNQNAQALNTLVKQLSSNFGAISSVLNDILSRLDKVEAEVQIDRLITGRLQSLQTYVTQQLIRAAEIRASANLAATKMSECVLGQSKRVDFCGKGCHLMSFPQSAPHGVVFLHVTYVPAQEKNFTTAPAICHDGKAHFPREGVFVSNGTHWFVTQRNFYEPQIITTDNTFVSGNCDVVIGIVNNTVYDPLQPELDS

SEQ ID NO: 3261 - protein, 1147 aa, Artificial Sequence
  SARS-CoV-2/SARS-CoV-2/Yunnan-01/human/2020/CHN__MT049951.1 spike protein (1-1147)(I909C_Y1047C)
MFVFLVLLPLVSSQCVNLTTRTQLPPANTNSFTRGVYYPDKVFRSSVLHSTQDLFLPFFSNVTWFHAIHVSGTNGTKRFDNPVLPFNDGVYFASTEKSNIIRGWIFGTTLDSKTQSLLIVNNATNVVIKVCEFQFCNDPFLGVYYHKNNKSWMESEFRVYSSANNCTFEYVSQPFLMDLEGKQGNFKNLREFVFKNIDGYFKIYSKHTPINLVRDLPQGFSALEPLVDLPIGINITRFQTLLALHRSYLTPGDSSSGWTAGAAAYYVGYLQPRTFLLKYNENGTITDAVDCALDPLSETKCTLKSFTVEKGIYQTSNFRVQPTESIVRFPNITNLCPFGEVFNATRFASVYAWNRKRISNCVADYSVLYNSASFSTFKCYGVSPTKLNDLCFTNVYADSFVIRGDEVRQIAPGQTGKIADYNYKLPDDFTGCVIAWNSNNLDSKVGGNYNYLYRLFRKSNLKPFERDISTEIYQAGSTPCNGVEGFNCYFPLQSYGFQPTNGVGYQPYRVVVLSFELLHAPATVCGPKKSTNLVKNKCVNFNFNGLTGTGVLTESNKKFLPFQQFGRDIADTTDAVRDPQTLEILDITPCSFGGVSVITPGTNTSNQVAVLYQDVNCTEVPVAIHADQLTPTWRVYSTGSNVFQTRAGCLIGAEHVNNSYECDIPIGAGICASYQTQTNSPRRARSVASQSIIAYTMSLGAENSVAYSNNSIAIPTNFTISVTTEILPVSMTKTSVDCTMYICGDSTECSNLLLQYGSFCTQLNRALTGIAVEQDKNTQEVFAQVKQIYKTPPIKDFGGFNFSQILPDPSKPSKRSFIEDLLFNKVTLADAGFIKQYGDCLGDIAARDLICAQKFNGLTVLPPLLTDEMIAQYTSALLAGTITSGWTFGAGAALQIPFAMQMAYRFNGCGVTQNVLYENQKLIANQFNSAIGKIQDSLSSTASALGKLQDVVNQNAQALNTLVKQLSSNFGAISSVLNDILSRLDKVEAEVQIDRLITGRLQSLQTYVTQQLIRAAEIRASANLAATKMSECVLGQSKRVDFCGKGCHLMSFPQSAPHGVVFLHVTYVPAQEKNFTTAPAICHDGKAHFPREGVFVSNGTHWFVTQRNFYEPQIITTDNTFVSGNCDVVIGIVNNTVYDPLQPELDS

SEQ ID NO: 3262 - protein, 1147 aa, Artificial Sequence
  SARS-CoV-2/USA/WA-UW292/2020__EPI_ISL_418077 spike protein (1-1147)(I909C_Y1047C)
MFVFLVLLPLVSSQCVNLTTRTQLPPAYTNSFTRGVYYPDKVFRSSVLHSTQDLFLPFFSNVTWFHAIHVSGTNGTKRFDNPVLPFNDGVYFASTEKSNIIRGWIFGTTLDSKTQSLLIVNNATNVVIKVCEFQFCNDPFLGVYYHKNNKSWMESEFRVYSSANNCTFEYVSQPFLMDLEGKQGNFKNLREFVFKNIDGYFKIYSKHTPINLVRDLPQGFSALEPLVDLPIGINITRFQTLLALHRSYLTPGDSSSGWTAGAAAYYVGYLQPRTFLLKYNENGTITDAVDCALDPLSETKCTLKSFTVEKGIYQTSNFRVQPTESIVRFPNITNLCPFGEVFNATRFASVYAWNRKRISNCVADYSVLYNSASFSTFKCYGVSPTKLNDLCFTNVYADSFVIRGDEVRQIAPGQTGKIADYNYKLPDDFTGCVIAWNSNNLDSKVGGNYNYLYRLFRKSNLKPFERDISTEIYQASSTPCNGVEGFNCYFPLQSYGFQPTNGVGYQPYRVVVLSFELLHAPATVCGPKKSTNLVKNKCVNFNFNGLTGTGVLTESNKKFLPFQQFGRDIADTTDAVRDPQTLEILDITPCSFGGVSVITPGTNTSNQVAVLYQDVNCTEVPVAIHADQLTPTWRVYSTGSNVFQTRAGCLIGAEHVNNSYECDIPIGAGICASYQTQTNSPRRARSVASQSIIAYTMSLGAENSVAYSNNSIAIPTNFTISVTTEILPVSMTKTSVDCTMYICGDSTECSNLLLQYGSFCTQLNRALTGIAVEQDKNTQEVFAQVKQIYKTPPIKDFGGFNFSQILPDPSKPSKRSFIEDLLFNKVTLADAGFIKQYGDCLGDIAARDLICAQKFNGLTVLPPLLTDEMIAQYTSALLAGTITSGWTFGAGAALQIPFAMQMAYRFNGCGVTQNVLYENQKLIANQFNSAIGKIQDSLSSTASALGKLQDVVNQNAQALNTLVKQLSSNFGAISSVLNDILSRLDKVEAEVQIDRLITGRLQSLQTYVTQQLIRAAEIRASANLAATKMSECVLGQSKRVDFCGKGCHLMSFPQSAPHGVVFLHVTYVPAQEKNFTTAPAICHDGKAHFPREGVFVSNGTHWFVTQRNFYEPQIITTDNTFVSGNCDVVIGIVNNTVYDPLQPELDS

SEQ ID NO: 3263 - protein, 1147 aa, Artificial Sequence
  SARS-CoV-2/Iceland/192/2020__EPI_ISL_417819 spike protein (1-1147)(I909C_Y1047C)
MFVFFVLLPLVSSQCVNLTTRTQLPPAYTNSFTRGVYYPDKVFRSSVLHSTQDLFLPFFSNVTWFHAIHVSGTNGTKRFDNPVLPFNDGVYFASTEKSNIIRGWIFGTTLDSKTQSLLIVNNATNVVIKVCEFQFCNDPFLGVYYHKNNKSWMESEFRVYSSANNCTFEYVSQPFLMDLEGKQGNFKNLREFVFKNIDGYFKIYSKHTPINLVRDLPQGFSALEPLVDLPIGINITRFQTLLALHRSYLTPGDSSSGWTAGAAAYYVGYLQPRTFLLKYNENGTITDAVDCALDPLSETKCTLKSFTVEKGIYQTSNFRVQPTESIVRFPNITNLCPFGEVFNATRFASVYAWNRKRISNCVADYSVLYNSASFSTFKCYGVSPTKLNDLCFTNVYADSFVIRGDEVRQIAPGQTGKIADYNYKLPDDFTGCVIAWNSNNLDSKVGGNYNYLYRLFRKSNLKPFERDISTEIYQAGSTPCNGVEGFNCYFPLQSYGFQPTNGVGYQPYRVVVLSFELLHAPATVCGPKKSTNLVKNKCVNFNFNGLTGTGVLTESNKKFLPFQQFGRDIADTTDAVRDPQTLEILDITPCSFGGVSVITPGTNTSNQVAVLYQGVNCTEVPVAIHADQLTPTWRVYSTGSNVFQTRAGCLIGAEHVNNSYECDIPIGAGICASYQTQTNSPRRARSVASQSIIAYTMSLGAENSVAYSNNSIAIPTNFTISVTTEILPVSMTKTSVDCTMYICGDSTECSNLLLQYGSFCTQLNRALTGIAVEQDKNTQEVFAQVKQIYKTPPIKDFGGFNFSQILPDPSKPSKRSFIEDLLFNKVTLADAGFIKQYGDCLGDIAARDLICAQKFNGLTVLPPLLTDEMIAQYTSALLAGTITSGWTFGAGAALQIPFAMQMAYRFNGCGVTQNVLYENQKLIANQFNSAIGKIQDSLSSTASALGKLQDVVNQNAQALNTLVKQLSSNFGAISSVLNDILSRLDKVEAEVQIDRLITGRLQSLQTYVTQQLIRAAEIRASANLAATKMSECVLGQSKRVDFCGKGCHLMSFPQSAPHGVVFLHVTYVPAQEKNFTTAPAICHDGKAHFPREGVFVSNGTHWFVTQRNFYEPQIITTDNTFVSGNCDVVIGIVNNTVYDPLQPELDS

SEQ ID NO: 3264 - protein, 1147 aa, Artificial Sequence
  SARS-CoV-2/Belgium/ULG-6939/2020__EPI_ISL_417020 spike protein (1-1147)(I909C_Y1047C)
MFVFLVLLPLVSSQCVNLTTRTQLPPAYTNSFTRGVYYPDKVFRSSVLHSTQDLFLPFFSNVTWFHAIHVSGTNGTKRFDNPVLPFNDGVYFASTEKSNIIRGWIFGTTLDSKTQSLLIVNNATNVVIKVCEFQFCNDPFLGVYYHKNNKSWMESEFRVYSSANNCTFEYVSQPFLMDLEGKQGNFKNLREFVFKNIDGYFKIYSKHTPINLVRDLPQGFSALEPLVDLPIGINITRFQTLLALHRSYLTPGDSSSGWTAGAAAYYVGYLQPRTFLLKYNENGTITDAVDCALDPLSETKCTLKSFTVEKGIYQTSNFRVQPTESIVRFPNITNLCPFGEVFNATRFASVYAWNRKRISNCVADYSVLYNSASFSTFKCYGVSPTKLNDLCFTNVYADSFVIRGDEVRQIAPGQTGKIADYNYKLPDDFTGCVIAWNSNNLDSKVGGNYNYLYRLFRKSNLKPFERDISTEIYQAGSTPCNGVEGFNCYFPLQSYGFQPTNGVGYQPYRVVVLSFELLHAPATVCGPKKSTNLVKNKCVNFNFNGLTGTGVLTESNKKFLPFQQFGRDIADTTDAVRDPQTLEILDITPCSFGGVSVITPGTNTSNQVAVLYQGVNCTEVPVAIHADQLTPTWRVYSTGSNVFQTRAGCLIGAEHVNNSYECDIPIGAGICASYQTQTNSPRRARSVASQSIIAYTMSLGAENSVVYSNNSIAIPTNFTISVTTEILPVSMTKTSVDCTMYICGDSTECSNLLLQYGSFCTQLNRALTGIAVEQDKNTQEVFAQVKQIYKTPPIKDFGGFNFSQILPDPSKPSKRSFIEDLLFNKVTLADAGFIKQYGDCLGDIAARDLICAQKFNGLTVLPPLLTDEMIAQYTSALLAGTITSGWTFGAGAALQIPFAMQMAYRFNGCGVTQNVLYENQKLIANQFNSAIGKIQDSLSSTASALGKLQDVVNQNAQALNTLVKQLSSNFGAISSVLNDILSRLDKVEAEVQIDRLITGRLQSLQTYVTQQLIRAAEIRASANLAATKMSECVLGQSKRVDFCGKGCHLMSFPQSAPHGVVFLHVTYVPAQEKNFTTAPAICHDGKAHFPREGVFVSNGTHWFVTQRNFYEPQIITTDNTFVSGNCDVVIGIVNNTVYDPLQPELDS

SEQ ID NO: 3265 - protein, 1147 aa, Artificial Sequence
  SARS-CoV-2/France/HF2496/2020__EPI_ISL_418231 spike protein (1-1147)(I909C_Y1047C)
MFVFLVLLPLVSSQCVNLTTRTQLPPAYTNSFTRGVYYPDKVFRSSVLHSTQDLFLPFFSNVTWFHAIHVSGTNGTKRFDNPVLPFNDGVYFASTEKSNIIRGWIFGTTLDSKTQSLLIVNNATNVVIKVCEFQFCNDPFLGVYYHKNNKSWMESEFRVYSSANNCTFEYVSQPFLMDLEGKQGNFKNLREFVFKNIDGYFKIYSKHTPINLVRDLPQGFSALEPLVDLPIGINITRFQTLLALHRSYLTPGDSSSGWTAGAAAYYVGYLQPRTFLLKYNENGTITDAVDCALDPLSETKCTLKSFTVEKGIYQTSNFRVQPTESIVRFPNITNLCPFGEVFNATRFASVYAWNRKRISNCVADYSVLYNSASFSTFKCYGVSPTKLNDLCFTNVYADSFVIRGDEVRQIAPGQTGKIADYNYKLPDDFTGCVIAWNSNNLDSKVGGNYNYLYRLFRKSNLKPFERDISTEIYQAGSTPCNGVEGFNCYFPLQSYGFQPTNGVGYQPYRVVVLSFELLHAPATVCGPKKSTNLVKNKCVNFNFNGLTGTGVLTESNKKFLPFQQFGRDIADTTDAVRDPQTLEILDITPCSFGGVSVITPGTNTSNQVAVLYQGVNCTEVPVAIHADQLTPTWRVYSTGSNVFQTRAGCLIGAEHVNNSYECDIPIGAGICASYQTQTNSPRRARSVASQSIIAYTMSLGAENSVAYSNNSIAIPTNFTISVTTEILPVSMTKTSVDCTMYICGDSTECSNLLLQYGSFCTQLNRALTGIAVEQDKNTQEVFAQVKQIYKTPPIKDFGGFNFSQILPDPSKPSKRSFIEDLLFNKVTLADAGFIKQYGDCLGDIVARDLICAQKFNGLTVLPPLLTDEMIAQYTSALLAGTITSGWTFGAGAALQIPFAMQMAYRFNGCGVTQNVLYENQKLIANQFNSAIGKIQDSLSSTASALGKLQDVVNQNAQALNTLVKQLSSNFGAISSVLNDILSRLDKVEAEVQIDRLITGRLQSLQTYVTQQLIRAAEIRASANLAATKMSECVLGQSKRVDFCGKGCHLMSFPQSAPHGVVFLHVTYVPAQEKNFTTAPAICHDGKAHFPREGVFVSNGTHWFVTQRNFYEPQIITTDNTFVSGNCDVVIGIVNNTVYDPLQPELDS

SEQ ID NO: 3266 - protein, 1147 aa, Artificial Sequence
  SARS-CoV-2/USA/WA-UW291/2020__EPI_ISL_418076 spike protein (1-1147)(I909C_Y1047C)
MFVFLVLLPLVSSQCVNLTTRTQLPPAYTNSFTRGVYYPDKVFRSSVLHSTQDLFLPFFSNVTWFHAIHVSGTNGTKRFDNPVLPFNDGVYFASTEKSNIIRGWIFGTTLDSKTQSLLIVNNATNVVIKVCEFQFCNDPFLGVYYHKNNKSWMESEFRVYSSANNCTFEYVSQPFLMDLEGKQGNFKNLREFVFKNIDGYFKIYSKHTPINLVRDLPQGFSALEPLVDLPIGINITRFQTLLALHRSYLTPGDSSSGWTAGAAAYYVGYLQPRTFLLKYNENGTITDAVDCALDPLSETKCTLKSFTVEKGIYQTSNFRVQPTESIVRFPNITNLCPFGEVFNATRFASVYAWNRKRISNCVADYSVLYNSASFSTFKCYGVSPTKLNDLCFTNVYADSFVIRGDEVRQIAPGQTGKIADYNYKLPDDFTGCVIAWNSNNLDSKVGGNYNYLYRLFRKSNLKPFERDISTEIYQAGSTPCNGVEGFNCYFPLQSYGFQPTNGVGYQPYRVVVLSFELLHAPATVCGPKKSTNLVKNKCVNFNFNGLTGTGVLTESNKKFLPFQQFGRDIADTTDAVRDPQTLEILDITPCSFGGVSVITPGTNTSNQVAVLYQGVNCTEVPVAIHADQLTPTWRVYSTGSNVFQTRAGCLIGAEHVNNSYECDIPIGAGICASYQTQTNSPRRARSVASQSIIAYTMSLGAENSVAYSNNSIAIPTNFTISVTTEILPVSMTKTSVDCTMYICGDSTECSNLLLQYGSFCTQLNRALTGIAVEQDKNTQEVFAQVKQIYKTPPIKDFGGFNFSQILPDPSKPSKRSFIEDLLFNKVTLADAGFIKQYGDCLGDIAARDLICAQKFNGLTVLPPLLTDEMIAQYTSALLAGTITSGWTFGAGAALQIPFAMQMAYRFNGCGVTQNVLYENQKLIANQFNSAIGKIQYSLSSTASALGKLQDVVNQNAQALNTLVKQLSSNFGAISSVLNDILSRLDKVEAEVQIDRLITGRLQSLQTYVTQQLIRAAEIRASANLAATKMSECVLGQSKRVDFCGKGCHLMSFPQSAPHGVVFLHVTYVPAQEKNFTTAPAICHDGKAHFPREGVFVSNGTHWFVTQRNFYEPQIITTDNTFVSGNCDVVIGIVNNTVYDPLQPELDS

SEQ ID NO: 3267 - protein, 1147 aa, Artificial Sequence; identical to SEQ ID NO: 3230
  SARS-CoV-2/Portugal/PT0034/2020__EPI_ISL_418019 spike protein (1-1147)(I909C_Y1047C)

SEQ ID NO: 3268 - protein, 1147 aa, Artificial Sequence; identical to SEQ ID NO: 3222
  SARS-CoV-2/Iceland/202/2020__EPI_ISL_417750 spike protein (1-1147)(I909C_Y1047C)

SEQ ID NO: 3269 - protein, 1147 aa, Artificial Sequence
  SARS-CoV-2/USA/WA-UW261/2020__EPI_ISL_418046 spike protein (1-1147)(I909C_Y1047C)
MFVFLVLLPLVSSQCVNLTTRTQLPPAYTNSFTRGVYYPDKVFRSSVLHSTQDLFLPFFSNVTWFHAIHVSGTNGTKRFDNPVLPFNDGVYFASTEKSNIIRGWIFGTTLDSKTQSLLIVNNATNVVIKVCEFQFCNDPFLGVYYHKNNKSWMESEFRVYSSANNCTFEYVSQPFLMDLEGKQGNFKNLREFVFKNIDGYFKIYSKHTPINLVRDLPQGFSALEPLVDLPIGINITRFQTLLALHRSYLTPGDSSSGWTAGAAAYYVGYLQPRTFLLKYNENGTITDAVDCALDPLSETKCTLKSFTVEKGIYQTSNFRVQPTESIVRFPNITNLCPFGEVFNATRFTSVYAWNRKRISNCVADYSVLYNSASFSTFKCYGVSPTKLNDLCFTNVYADSFVIRGDEVRQIAPGQTGKIADYNYKLPDDFTGCVIAWNSNNLDSKVGGNYNYLYRLFRKSNLKPFERDISTEIYQAGSTPCNGVEGFNCYFPLQSYGFQPTNGVGYQPYRVVVLSFELLHAPATVCGPKKSTNLVKNKCVNFNFNGLTGTGVLTESNKKFLPFQQFGRDIADTTDAVRDPQTLEILDITPCSFGGVSVITPGTNTSNQVAVLYQDVNCTEVPVAIHADQLTPTWRVYSTGSNVFQTRAGCLIGAEHVNNSYECDIPIGAGICASYQTQTNSPRRARSVASQSIIAYTMSLGAENSVAYSNNSIAIPTNFTISVTTEILPVSMTKTSVDCTMYICGDSTECSNLLLQYGSFCTQLNRALTGIAVEQDKNTQEVFAQVKQIYKTPPIKDFGGFNFSQILPDPSKPSKRSFIEDLLFNKVTLADAGFIKQYGDCLGDIAARDLICAQKFNGLTVLPPLLTDEMIAQYTSALLAGTITSGWTFGAGAALQIPFAMQMAYRFNGCGVTQNVLYENQKLIANQFNSAIGKIQDSLSSTASALGKLQDVVNQNAQALNTLVKQLSSNFGAISSVLNDILSRLDKVEAEVQIDRLITGRLQSLQTYVTQQLIRAAEIRASANLAATKMSECVLGQSKRVDFCGKGCHLMSFPQSAPHGVVFLHVTYVPAQEKNFTTAPAICHDGKAHFPREGVFVSNGTHWFVTQRNFYEPQIITTDNTFVSGNCDVVIGIVNNTVYDPLQPELDS

SEQ ID NO: 3270 - protein, 1147 aa, Artificial Sequence
  SARS-CoV-2/Portugal/PT0035/2020__EPI_ISL_418020 spike protein (1-1147)(I909C_Y1047C)
MFVFLVLLPLVSSQCVNLTTRTQLPPAYTNSFTRGVYYPDKVFRSSVLHSTQDLFLPFFSNVTWFHAIHVSGTNGTKRFDNPVLPFNDGVYFASTEKSNIIRGWIFGTTLDSKTQSLLIVNNATNVVIKVCEFQFCNDPFLGVYYHKNNKSWMESEFRVYSSANNCTFEYVSQPFLMDLEGKQGNFKNLREFVFKNIDGYFKIYSKHTPINLVRDLPQGFSALEPLVDLPIGINITRFQTLLALHRSYLTPGDSSSGWTAGAAAYYVGYLQPRTFLLKYNENGTITDAVDCALDPLSETKCTLKSFTVEKGIYQTSNFRVQPTESIVRFPNITNLCPFGEVFNATRFASVYAWNRKRISNCVADYSVLYNSASFSTFKCYGVSPTKLNDLCFTNVYADSFVIRGDEVRQIAPGQTGKIADYNYKLPDDFTGCVIAWNSNNLDSKVGGNYNYLYRLFRKSNLKPFERDISTEIYQAGSTPCNGVEGFNCYFPLQSYGFQPTNGVGYQPYRVVVLSFELLHAPATVCGPKKSTNLVKNKCVNFNFNGLTGTGVLTESNKKFLPFQQFGRDIADTTDAVRDPQTLEILDITPCSFGGVSVITPGTNTSNQVAVLYQDVNCTEVPVAIHADQLTPTWRVYSTGSNVFQTRAGCLIGAEHVNNSYECDIPIGAGICASYQTQTNSPRRARSVASQSIIAYTMSLGAENSVAYSNNSIAIPTNFTISVTTEILPVSMTKTSVDCTMYICGDSTECSNLLLQYGSFCTQLNRALTGIAVEQDKNTQEVFAQVKQIYKTPPIKDFGGFNFSQILPDPSKPSKRSFIEDLLFNKVTLADAGFIKQYGDCLGDISARDLICAQKFNGLTVLPPLLTDEMIAQYTSALLAGTITSGWTFGAGAALQIPFAMQMAYRFNGCGVTQNVLYENQKLIANQFNSAIGKIQDSLSSTASALGKLQDVVNQNAQALNTLVKQLSSNFGAISSVLNDILSRLDKVEAEVQIDRLITGRLQSLQTYVTQQLIRAAEIRASANLAATKMSECVLGQSKRVDFCGKGCHLMSFPQSAPHGVVFLHVTYVPAQEKNFTTAPAICHDGKAHFPREGVFVSNGTHWFVTQRNFYEPQIITTDNTFVSGNCDVVIGIVNNTVYDPLQPELDS

SEQ ID NO: 3271 - protein, 1147 aa, Artificial Sequence
  SARS-CoV-2/USA/NY-NYUMC7/2020__EPI_ISL_418192 spike protein (1-1147)(I909C_Y1047C)
MFVFLVLLPLVSSQCVNLTTRTQLPPAYTNSFTRGVYYPDKVFRSSVLHSTQDLFLPFFSNVTWFHAIHVSGTNGTKRFDNPVLPFNDGVYFASTEKSNIIRGWIFGTTLDSKTQSLLIVNNATNVVIKVCEFQFCNDPFLGVYHHKNNKSWMESEFRVYSSANNCTFEYVSQPFLMDLEGKQGNFKNLREFVFKNIDGYFKIYSKHTPINLVRDLPQGFSALEPLVDLPIGINITRFQTLLALHRSYLTPGDSSSGWTAGAAAYYVGYLQPRTFLLKYNENGTITDAVDCALDPLSETKCTLKSFTVEKGIYQTSNFRVQPTESIVRFPNITNLCPFGEVFNATRFASVYAWNRKRISNCVADYSVLYNSASFSTFKCYGVSPTKLNDLCFTNVYADSFVIRGDEVRQIAPGQTGKIADYNYKLPDDFTGCVIAWNSNNLDSKVGGNYNYLYRLFRKSNLKPFERDISTEIYQAGSTPCNGVEGFNCYFPLQSYGFQPTNGVGYQPYRVVVLSFELLHAPATVCGPKKSTNLVKNKCVNFNFNGLTGTGVLTESNKKFLPFQQFGRDIADTTDAVRDPQTLEILDITPCSFGGVSVITPGTNTSNQVAVLYQGVNCTEVPVAIHADQLTPTWRVYSTGSNVFQTRAGCLIGAEHVNNSYECDIPIGAGICASYQTQTNSPRRARSVASQSIIAYTMSLGAENSVAYSNNSIAIPTNFTISVTTEILPVSMTKTSVDCTMYICGDSTECSNLLLQYGSFCTQLNRALTGIAVEQDKNTQEVFAQVKQIYKTPPIKDFGGFNFSQILPDPSKPSKRSFIEDLLFNKVTLADAGFIKQYGDCLGDIAARDLICAQKFNGLTVLPPLLTDEMIAQYTSALLAGTITSGWTFGAGAALQIPFAMQMAYRFNGCGVTQNVLYENQKLIANQFNSAIGKIQDSLSSTASALGKLQDVVNQNAQALNTLVKQLSSNFGAISSVLNDILSRLDKVEAEVQIDRLITGRLQSLQTYVTQQLIRAAEIRASANLAATKMSECVLGQSKRVDFCGKGCHLMSFPQSAPHGVVFLHVTYVPAQEKNFTTAPAICHDGKAHFPREGVFVSNGTHWFVTQRNFYEPQIITTDNTFVSGNCDVVIGIVNNTVYDPLQPELDS

SEQ ID NO: 3272 - protein, 1147 aa, Artificial Sequence
  SARS-CoV-2/Iceland/189/2020__EPI_ISL_417709 spike protein (1-1147)(I909C_Y1047C)
MFVFLVLLPLVSSQCVNLTTRTQLPPAYTNSFTRGVYYPDKVFRSSVLHSTQDLFLPFFSNVTWFHAIHVSGTNGTKRFDNPVLPFNDGVYFASTEKSNIIRGWIFGTTLDSKTQSLLIVNNATNVVIKVCEFQFCNDPFLGVYYHKNNKSWMESEFRVYSSANNCTFEYVSQPFLMDLEGKQGNFKNLREFVFKNIDGYFKIYSKHTPINLVRDLPQGFSALEPLVDLPIGINITRFQTLLALHRSYLTPGDSSSGWTAGAAAYYVGYLQPRTFLLKYNENGTITDAVDCALDPLSETKCTLKSFTVEKGIYQTSNFRVQPTESIVRFPNITNLCPFGEVFNATRFASVYAWNRKRISNCVADYSVLYNSASFSTFKCYGVSPTKLNDLCFTNVYADSFVIRGDEVRQIAPGQTGKIADYNYKLPDDFTGCVIAWNSNNLDSKVGGNYNYLYRLFRKSNLKPFERDISTEIYQAGSTPCNGVEGFNCYFPLQSYGFQPTNGVGYQPYRVVVLSFELLHAPATVCGPKKSTNLVKNKCVNFNFNGLTGTGVLTESNKKFLPFQQFGRDIADTTDAVRDPQTLEILDITPCSFGGVSVITPGTNTSNQVAVLYQGVNCTEVPVAIHADQLTPTWRVYSTGSNVFQTRAGCLIGAEHVNNSYECDIPIGAGICASYQTQTNSPRRARSVASQSIIAYTMSLGAENSVAYSNNSIAIPTNFTISVTTEILPVSMTKTSVDCTMYICGDSTECSNLLLQYGSFCTQLNRALTGIAVEQDKNTQEVFAQVKQIYKTPPIKDFGGFNFSQILPDPSKPSKRSFIEDLLFNKVTLADAGFTKQYGDCLGDIAARDLICAQKFNGLTVLPPLLTDEMIAQYTSALLAGTITSGWTFGAGAALQIPFAMQMAYRFNGCGVTQNVLYENQKLIANQFNSAIGKIQDSLSSTASALGKLQDVVNQNAQALNTLVKQLSSNFGAISSVLNDILSRLDKVEAEVQIDRLITGRLQSLQTYVTQQLIRAAEIRASANLAATKMSECVLGQSKRVDFCGKGCHLMSFPQSAPHGVVFLHVTYVPAQEKNFTTAPAICHDGKAHFPREGVFVSNGTHWFVTQRNFYEPQIITTDNTFVSGNCDVVIGIVNNTVYDPLQPELDS

SEQ ID NO: 3273 - protein, 1147 aa, Artificial Sequence
  SARS-CoV-2/Australia/NSW56/2020__EPI_ISL_417408 spike protein (1-1147)(I909C_Y1047C)
MFVFLVLLPLVSSQCVNLTTRTQLPPAYTNSFTRGVYYPDKVFRSSVLHSTQDLFLPFFSNVTWFHAIHVSGTNGTKRFDNPVLPFNDGVYFASTEKSNIIRGWIFGTTLDSKTQSLLIVNNATNVVIKVCEFQFCNDPFLGVYYHKNNKSWMESEFRVYSSANNCTFEYVSQPFLMDLEGKQGNFKNLREFVFKNIDGYFKIYSKHTPINLVRDLPQGFSALEPLVDLPIGINITRFQTLLALHRSYLTPGDSSSGWTAGAAAYYVGYLQPRTFLLKYNENGTITDAVDCALDPLSETKCTLKSFTVEKGIYQTSNFRVQPTESIVRFPNITNLCPFGEVFNATRFASVYAWNRKRISNCVADYSVLYNSASFSTFKCYGVSPTKLNDLCFTNVYADSFVIRGDEVRQIAPGQTGKIADYNYKLPDDFTGCVIAWNSNNLDSKVGGNYNYLYRLFRKSNLKPFERDISTEIYQAGSTPCNGVEGFNCYFPLQSYGFQPTNGVGYQPYRVVVLSFELLHAPATVCGPKKSTNLVKNKCVNFNFNGLTGTGVLTESNKKFLPFQQFGRDIADTTDAVRDPQTLEILDITPCSFGGVSVITPGTNTSNQVAVLYQDVNCTEVPVAIHADQLTPTWRVYSTGSNVFQTRAGCLIGAEHVNNSYECDIPIGAGICASYQTQTNSPRRARSVASQSIIAYTMSLGAENSVAYSNNSIAIPTNFTISVTTEILPVSMTKTSVDCTMYICGDSTECSNLLLQYGSFCTQLNRALTGIAVEQDKNTQEVFAQVKQIYKTPPIKDFGGFNFSQILPDSSKPSKRSFIEDLLFNKVTLADAGFIKQYGDCLGDIAARDLICAQKFNGLTVLPPLLTDEMIAQYTSALLAGTITSGWTFGAGAALQIPFAMQMAYRFNGCGVTQNVLYENQKLIANQFNSAIGKIQDSLSSTASALGKLQDVVNQNAQALNTLVKQLSSNFGAISSVLNDILSRLDKVEAEVQIDRLITGRLQSLQTYVTQQLIRAAEIRASANLAATKMSECVLGQSKRVDFCGKGCHLMSFPQSAPHGVVFLHVTYVPAQEKNFTTAPAICHDGKAHFPREGVFVSNGTHWFVTQRNFYEPQIITTDNTFVSGNCDVVIGIVNNTVYDPLQPELDS

SEQ ID NO: 3274 - protein, 1147 aa, Artificial Sequence
  SARS-CoV-2/Iceland/280/2020__EPI_ISL_417608 spike protein (1-1147)(I909C_Y1047C)
MFVFLVLLPLVSSQCVNLTTRTQLPPAYTNSFTRGVYYPDKVFRSSVLHSTQDLFLPFFSNVTWFHAIHVSGTNGTKRFDNPVLPFNDGVYFASTEKSNIIRGWIFGTTLDSKTQSLLIVNNATNVVIKVCEFQFCNDPFLGVYYHKNNKSWMESEFRVYSSANNCTFEYVSQPFLMDLEGKQGNFKNLREFVFKNIDGYFKIYSKHTPINLVRDLPQGFSALEPLVDLPIGINITRFQTLLALHRSYLTPGDSSSGWTAGAAAYYVGYLQPRTFLLKYNENGTITDAVDCALDPLSETKCTLKSFTVEKGIYQTSNFRVQPTESIVRFPNITNLCPFGEVFNATRFASVYAWNRKRISNCVADYSVLYNSASFSTFKCYGVSPTKLNDLCFTNVYADSFVIRGDEVRQIAPGQTGKIADYNYKLPDDFTGCVIAWNSNNLDSKVGGNYNYLYRLFRKSNLKPFERDISTEIYQAGSTPCNGVEGFNCYFPLQSYGFQPTNGVGYQPYRVVVLSFELLHAPATVCGPKKSTNLVKNKCVNFNFNGLTGTGVLTESNKKFLPFQQFGRDIADTTDAVRDPQTLEILDITPCSFGGVSVITPGTNTSNQVAVLYQGVNCTEVPVAIHADQLTPTWRVYSTGSNVFQTRAGCLIGAEHVNNSYECDIPIGAGICASYHTQTNSPRRARSVASQSIIAYTMSLGAENSVAYSNNSIAIPTNFTISVTTEILPVSMTKTSVDCTMYICGDSTECSNLLLQYGSFCTQLNRALTGIAVEQDKNTQEVFAQVKQIYKTPPIKDFGGFNFSQILPDPSKPSKRSFIEDLLFNKVTLADAGFIKQYGDCLGDIAARDLICAQKFNGLTVLPPLLTDEMIAQYTSALLAGTITSGWTFGAGAALQIPFAMQMAYRFNGCGVTQNVLYENQKLIANQFNSAIGKIQDSLSSTASALGKLQDVVNQNAQALNTLVKQLSSNFGAISSVLNDILSRLDKVEAEVQIDRLITGRLQSLQTYVTQQLIRAAEIRASANLAATKMSECVLGQSKRVDFCGKGCHLMSFPQSAPHGVVFLHVTYVPAQEKNFTTAPAICHDGKAHFPREGVFVSNGTHWFVTQRNFYEPQIITTDNTFVSGNCDVVIGIVNNTVYDPLQPELDS

SEQ ID NO: 3275 - protein, 1147 aa, Artificial Sequence; identical to SEQ ID NO: 3230
  SARS-CoV-2/Iceland/247/2020__EPI_ISL_417575 spike protein (1-1147)(I909C_Y1047C)

SEQ ID NO: 3276 - protein, 1147 aa, Artificial Sequence
  SARS-CoV-2/Iceland/238/2020__EPI_ISL_417566 spike protein (1-1147)(I909C_Y1047C)
MFVFLVLLPLVSSQCVNLTTRTQLPPAYTNSFTRGVYYPDKVFRSSVLHSTQDLFLPFFSNVTWFHAIHVSGTNGTKRFDNPVLPFNDGVYFASTEKSNIIRGWIFGTTLDSKTQSLLIVNNATNVVIKVCEFQFCNDPFLGVYYHKNNKSWMESEFRVYSSANNCTFEYVSQPFLMDLEGKQGNFKNLREFVFKNIDGYFKIYSKHTPINLVRDLPQGFSALEPLVDLPIGINITRFQTLLALHRSYLTPGDSSSGWTAGAAAYYVGYLQPRTFLLKYNENGTITDAVDCALDPLSETKCTLKSFTVEKGIYQTSNFRVQPTESIVRFPNITNLCPFGEVFNATRFASVYAWNRKRISNCVADYSVLYNSASFSTFKCYGVSPTKLNDLCFTNVYADSFVIRGDEVRQIAPGQTGKIADYNYKLPDDFTGCVIAWNSNNLDSKVGGNYNYLYRLFRKSNLKPFERDISTEIYQAGSTPCNGVEGFNCYFPLQSYGFQPTNGVGYQPYRVVVLSFELLHAPATVCGPKKSTNLVKNKCVNFNFNGLTGTGVLTESNKKFLPFQQFGRDIADTTDAVRDPQTLEILDITPCSFGGVSVITPGTNTSNQVAVLYQGVNCTEVPVAIHADQLTPTWRVYSTGSNVFQTRAGCLIGAEHVNNSYECDIPIGAGICASYQTQTNSPRRARSVASQSIIAYTMSLGAENSVAYSNNSIAIPTNFTISVTTEILPVSMTKTSVDCTMYICGDSTECSNLLLQYGSFCTQLNRALTGIAVEQDKNTQEVFAQVKQIYKTPPIKDFGGFNFSQILPDPSKPSKRSFIEDLLFNKVTLADVGFIKQYGDCLGDIAARDLICAQKFNGLTVLPPLLTDEMIAQYTSALLAGTITSGWTFGAGAALQIPFAMQMAYRFNGCGVTQNVLYENQKLIANQFNSAIGKIQDSLSSTASALGKLQDVVNQNAQALNTLVKQLSSNFGAISSVLNDILSRLDKVEAEVQIDRLITGRLQSLQTYVTQQLIRAAEIRASANLAATKMSECVLGQSKRVDFCGKGCHLMSFPQSAPHGVVFLHVTYVPAQEKNFTTAPAICHDGKAHFPREGVFVSNGTHWFVTQRNFYEPQIITTDNTFVSGNCDVVIGIVNNTVYDPLQPELDS

SEQ ID NO: 3277 - protein, 1147 aa, Artificial Sequence
  SARS-CoV-2/Greece/16/2020__EPI_ISL_418265 spike protein (1-1147)(I909C_Y1047C)
MFVFLVLLPLVSSQCVNLTTRTQLPPAYTNSFTRGVYYPDKVFRSSVLHSTQDLFLPFFSNVTWFHAIHVSGTNGTKRFDNPVLPFNDGVYFASTEKSNIIRGWIFGTTLDSKTQSLLIVNNATNVVIKVCEFQFCNDPFLGVYYHKNNKSWMESEFRVYSSANNCTFEYVSQPFLMDLEGKQGNFKNLREFVFKNVDGYFKIYSKHTPINLVRDLPQGFSALEPLVDLPIGINITRFQTLLALHRSYLTPGDSSSGWTAGAAAYYVGYLQPRTFLLKYNENGTITDAVDCALDPLSETKCTLKSFTVEKGIYQTSNFRVQPTESIVRFPNITNLCPFGEVFNATRFASVYAWNRKRISNCVADYSVLYNSASFSTFKCYGVSPTKLNDLCFTNVYADSFVIRGDEVRQIAPGQTGKIADYNYKLPDDFTGCVIAWNSNNLDSKVGGNYNYLYRLFRKSNLKPFERDISTEIYQAGSTPCNGVEGFNCYFPLQSYGFQPTNGVGYQPYRVVVLSFELLHAPATVCGPKKSTNLVKNKCVNFNFNGLTGTGVLTESNKKFLPFQQFGRDIADTTDAVRDPQTLEILDITPCSFGGVSVITPGTNTSNQVAVLYQDVNCTEVPVAIHADQLTPTWRVYSTGSNVFQTRAGCLIGAEHVNNSYECDIPIGAGICASYQTQTNSPRRARSVASQSIIAYTMSLGAENSVAYSNNSIAIPTNFTISVTTEILPVSMTKTSVDCTMYICGDSTECSNLLLQYGSFCTQLNRALTGIAVEQDKNTQEVFAQVKQIYKTPPIKDFGGFNFSQILPDPSKPSKRSFIEDLLFNKVTLADAGFIKQYGDCLGDIAARDLICAQKFNGLTVLPPLLTDEMIAQYTSALLAGTITSGWTFGAGAALQIPFAMQMAYRFNGCGVTQNVLYENQKLIANQFNSAIGKIQDSLSSTASALGKLQDVVNQNAQALNTLVKQLSSNFGAISSVLNDILSRLDKVEAEVQIDRLITGRLQSLQTYVTQQLIRAAEIRASANLAATKMSECVLGQSKRVDFCGKGCHLMSFPQSAPHGVVFLHVTYVPAQEKNFTTAPAICHDGKAHFPREGVFVSNGTHWFVTQRNFYEPQIITTDNTFVSGNCDVVIGIVNNTVYDPLQPELDS

SEQ ID NO: 3278 - protein, 1147 aa, Artificial Sequence
  SARS-CoV-2/Iceland/319/2020__EPI_ISL_417648 spike protein (1-1147)(I909C_Y1047C)
MFVFLVLLPLVSSQCVNLTTRTQLPPAYTNSFTRGVYYPDKVFRSSVLHSTQDLFLPFFSNVTWFHAIHVSGTNGTKRFDNPVLPFNDGVYFASTEKSNIIRGWIFGTTLDSKTQSLLIVNNATNVVIKVCEFQFCNDPFLGVYYHKNNKSWMESEFRVYSSANNCTFEYVSQPFLIDLEGKQGNFKNLREFVFKNIDGYFKIYSKHTPINLVRDLPQGFSALEPLVDLPIGINITRFQTLLALHRSYLTPGDSSSGWTAGAAAYYVGYLQPRTFLLKYNENGTITDAVDCALDPLSETKCTLKSFTVEKGIYQTSNFRVQPTESIVRFPNITNLCPFGEVFNATRFASVYAWNRKRISNCVADYSVLYNSASFSTFKCYGVSPTKLNDLCFTNVYADSFVIRGDEVRQIAPGQTGKIADYNYKLPDDFTGCVIAWNSNNLDSKVGGNYNYLYRLFRKSNLKPFERDISTEIYQAGSTPCNGVEGFNCYFPLQSYGFQPTNGVGYQPYRVVVLSFELLHAPATVCGPKKSTNLVKNKCVNFNFNGLTGTGVLTESNKKFLPFQQFGRDIADTTDAVRDPQTLEILDITPCSFGGVSVITPGTNTSNQVAVLYQGVNCTEVPVAIHADQLTPTWRVYSTGSNVFQTRAGCLIGAEHVNNSYECDIPIGAGICASYQTQTNSPRRARSVASQSIIAYTMSLGAENSVAYSNNSIAIPTNFTISVTTEILPVSMTKTSVDCTMYICGDSTECSNLLLQYGSFCTQLNRALTGIAVEQDKNTQEVFAQVKQIYKTPPIKDFGGFNFSQILPDPSKPSKRSFIEDLLFNKVTLADAGFIKQYGDCLGDIAARDLICAQKFNGLTVLPPLLTDEMIAQYTSALLAGTITSGWTFGAGAALQIPFAMQMAYRFNGCGVTQNVLYENQKLIANQFNSAIGKIQDSLSSTASALGKLQDVVNQNAQALNTLVKQLSSNFGAISSVLNDILSRLDKVEAEVQIDRLITGRLQSLQTYVTQQLIRAAEIRASANLAATKMSECVLGQSKRVDFCGKGCHLMSFPQSAPHGVVFLHVTYVPAQEKNFTTAPAICHDGKAHFPREGVFVSNGTHWFVTQRNFYEPQIITTDNTFVSGNCDVVIGIVNNTVYDPLQPELDS

SEQ ID NO: 3279 - protein, 1147 aa, Artificial Sequence
  SARS-CoV-2/Congo/94/2020__EPI_ISL_417947 spike protein (1-1147)(I909C_Y1047C)
MFVFLVLLPLVSSQCVNLTTRTQLPPAYTNSFTRGVYYPDKVFRSSVLHSTQDLFLPFFSNVTWFHAIHVSGTNGTKRFDNPVLPFNDGVYFASTEKSNIIRGWIFGTTLDSKTQSLLIVNNATNVVIKVCEFQFCNDPFLGVYYHKNNKSWMESEFRVYSSANNCTFEYVSQPFLMDLEGKQGNFKNLREFVFKNIDGYFKIYSKHTPINLVRDLPQGFSALEPLVDLPIGINITRFQTLLALHRSYLTPGDSSSGWTAGAAAYYVGYLQPRTFLLKYNENGTITDAVDCALDPLSETKCTLKSFTVEKGIYQTSNFRVQPTESIVRFPNITNLCPFGEVFNATRFASVYAWNRKRISNCVADYSVLYNSASFSTFKCYGVSPTKLNDLCFTNVYADSFVIRGDEVRQIAPGQTGKIADYNYKLPDDFTGCVIAWNSNNLDSKVGGNYNYLYRLFRKSNLKPFERDISTEIYQAGSTPCNGVEGFNCYFPLQSYGFQPTNGVGYQPYRVVVLSFELLHAPATVCGPKKSTNLVKNKCVNFNFNGLTGTGVLTESNKKFLPFQQFGRDIADTTDAVRDPQTLEILDITPCSFGGVSVITPGTNTSNQVAVLYQGVNCTEVPVAIHADQLTPTWRVYSTGSNVFQTRAGCLIGAEHVNNSYECDIPIGAGICASYQTQTNSPRRARSVASQSIIAYTMSLGAENSVAYSNNSIAIPTNFTISVTTEILPVSMTKTSVDCTMYICGDSTECSNLLLQYGSFCTQLNRALTGIAVEQDKNTQEVFAQVKQIYKTPPIKDFGGFNFSQILPDPSKPSKRSFIEDILFNKVTLADAGFIKQYGDCLGDIAARDLICAQKFNGLTVLPPLLTDEMIAQYTSALLAGTITSGWTFGAGAALQIPFAMQMAYRFNGCGVTQNVLYENQKLIANQFNSAIGKIQDSLSSTASALGKLQDVVNQNAQALNTLVKQLSSNFGAISSVLNDILSRLDKVEAEVQIDRLITGRLQSLQTYVTQQLIRAAEIRASANLAATKMSECVLGQSKRVDFCGKGCHLMSFPQSAPHGVVFLHVTYVPAQEKNFTTAPAICHDGKAHFPREGVFVSNGTHWFVTQRNFYEPQIITTDNTFVSGNCDVVIGIVNNTVYDPLQPELDS

SEQ ID NO: 3280 - protein, 1147 aa, Artificial Sequence
  SARS-CoV-2/Congo/158/2020__EPI_ISL_417950 spike protein (1-1147)(I909C_Y1047C)
MFVFLVLLPLVSSQCVNLTTRTQLPPAYTNSFTRGVYYPDKVFRSSVLHSTQDLFLPFFSNVTWFHAIHVSGTNGTKRFDNPVLPFNDGVYFASTEKSNIIRGWIFGTTLDSKTQSLLIVNNATNVVIKVCEFQFCNDPFLGVYYHKNNKSWMESEFRVYSSANNCTFEYVSQPFLMDLEGKQGNFKNLREFVFKNIDGYFKIYSKHTPINLVRDLPQGFSALEPLVDLPIGINITRFQTLLALHRSYLTPGDSSSGWTAGAAAYYVGYLQPRTFLLKYNENGTITDAVDCALDPLSETKCTLKSFTVEKGIYQTSNFRVQPTESIVRFPNITNLCPFGEVFNATRFASVYAWNRKRISNCVADYSVLYNSASFSTFKCYGVSPTKLNDLCFTNVYADSFVIRGDEVRQIAPGQTGKIADYNYKLPDDFTGCVIAWNSNNLDSKVGGNYNYLYRLFRKSNLKPFERDISTEIYQAGSTPCNGVEGFNCYFPLQSYGFQPTNGVGYQPYRVVVLSFELLHAPATVCGPKKSTNLVKNKCVNFNFNGLTGTGVLTESNKKFLPFQQFGRDIADTTDAVRDPQTLEILDITPCSFGGVSVITPGTNTSNQVAVLYQDVNCTEVPVAIHADQLTPTWRVYSTGSNVFQTRAGCLIGAEHVNNSYECDIPIGAGICASYQTQTNSPRRARSVASQSIIAYTMSLGAENSVAYSNNSIAIPTNFTISVTTEILPVSMTKTSVDCTMYICGDSTECSNLLLQYGSFCTQLNRALTGIAVEQDKNTQEVFAQVKQIYKTPPIKDFGGFNFSQILPDPSKPSKRSFIEDLLFNKVTLADAGFIKQYGDCLGDIAARDLICAQKFNGLTVLPPLLTDEMIAQYTSALLAGTITSGWTFGAGAALQIPFAMQMAYRFNGCGVTQNVLYENQKLIANQFNSAIGKIQDSLSSTASALGKLQDVVNQNAQALNTLVKQLSSNFGAISSVLNDILSRLDKVEAEVQIDRLITGRLQSLQTYVTQQLIRAAEIRASANLAATKMSECVLGQSKRVDFCGKGCHLMSFPQSAPHGVVFLHVTYVPAQEKNFTTAPAICHDGKAHFPREGVFVSNGTHWFVTQRNFYEPQIITTDNTFLSGNCDVVIGIVNNTVYDPLQPELDS

SEQ ID NO: 3281 - protein, 1147 aa, Artificial Sequence
  SARS-CoV-2/USA/UT-00034/2020__EPI_ISL_417977 spike protein (1-1147)(I909C_Y1047C)
MFVFLVLLPLVSSQCVNLTTRTQLPPAYTNSFTRGVYYPDKVFRSSVLHSTQDLFLPFFSNVTWFHAIHVSGTNGTKRFDNPVLPFNDGVYFASTEKSNIIRGWIFGTTLDSKTQSLLIVNNATNVVIKVCEFQFCNDPFLGVYYYKNNKSWMESEFRVYSSANNCTFEYVSQPFLMDLEGKQGNFKNLREFVFKNIDGYFKIYSKHTPINLVRDLPQGFSALEPLVDLPIGINITRFQTLLALHRSYLTPGDSSSGWTAGAAAYYVGYLQPRTFLLKYNENGTITDAVDCALDPLSETKCTLKSFTVEKGIYQTSNFRVQPTESIVRFPNITNLCPFGEVFNATRFASVYAWNRKRISNCVADYSVLYNSASFSTFKCYGVSPTKLNDLCFTNVYADSFVIRGDEVRQIAPGQTGKIADYNYKLPDDFTGCVIAWNSNNLDSKVGGNYNYLYRLFRKSNLKPFERDISTEIYQAGSTPCNGVEGFNCYFPLQSYGFQPTNGVGYQPYRVVVLSFELLHAPATVCGPKKSTNLVKNKCVNFNFNGLTGTGVLTESNKKFLPFQQFGRDIADTTDAVRDPQTLEILDITPCSFGGVSVITPGTNTSNQVAVLYQGVNCTEVPVAIHADQLTPTWRVYSTGSNVFQTRAGCLIGAEHVNNSYECDIPIGAGICASYQTQTNSPRRARSVASQSIIAYTMSLGAENSVAYSNNSIAIPTNFTISVTTEILPVSMTKTSVDCTMYICGDSTECSNLLLQYGSFCTQLNRALTGIAVEQDKNTQEVFAQVKQIYKTPPIKDFGGFNFSQILPDPSKPSKRSFIEDLLFNKVTLADAGFIKQYGDCLGDIAARDLICAQKFNGLTVLPPLLTDEMIAQYTSALLAGTITSGWTFGAGAALQIPFAMQMAYRFNGCGVTQNVLYENQKLIANQFNSAIGKIQDSLSSTASALGKLQDVVNQNAQALNTLVKQLSSNFGAISSVLNDILSRLDKVEAEVQIDRLITGRLQSLQTYVTQQLIRAAEIRASANLAATKMSECVLGQSKRVDFCGKGCHLMSFPQSAPHGVVFLHVTYVPAQEKNFTTAPAICHDGKAHFPREGVFVSNGTHWFVTQRNFYEPQIITTDNTFVSGNCDVVIGIVNNTVYDPLQPELDS

SEQ ID NO: 3282 - protein, 1147 aa, Artificial Sequence
  SARS-CoV-2/USA/UT-00033/2020__EPI_ISL_417976 spike protein (1-1147)(I909C_Y1047C)
MFVFLVLLPLVSSQCVNLTTRTQLPPAYTNSFTRGVYYPDKVFRSSVLHSTQDLFLPFFSNVTWFHAIHVSGTNGTKRFDNPVLPFNDGVYFASTEKSNIIRGWIFGTTLDSKTQSLLIVNNATNVVIKVCEFQFCNDPFLGVYYHKNNKSWMESEFRVYSSANNCTFEYVSQPFLMDLEGKQGNFKNLREFVFKNIDGYFKIYSKHTPINLVRDLPQGFSALEPLVDLPIGINITRFQTLLALHRSYLTPGDSSSGLTAGAAAYYVGYLQPRTFLLKYNENGTITDAVDCALDPLSETKCTLKSFTVEKGIYQTSNFRVQPTESIVRFPNITNLCPFGEVFNATRFASVYAWNRKRISNCVADYSVLYNSASFSTFKCYGVSPTKLNDLCFTNVYADSFVIRGDEVRQIAPGQTGKIADYNYKLPDDFTGCVIAWNSNNLDSKVGGNYNYLYRLFRKSNLKPFERDISTEIYQAGSTPCNGVEGFNCYFPLQSYGFQPTNGVGYQPYRVVVLSFELLHAPATVCGPKKSTNLVKNKCVNFNFNGLTGTGVLTESNKKFLPFQQFGRDIADTTDAVRDPQTLEILDITPCSFGGVSVITPGTNTSNQVAVLYQGVNCTEVPVAIHADQLTPTWRVYSTGSNVFQTRAGCLIGAEHVNNSYECDIPIGAGICASYQTQTNSPRRARSVASQSIIAYTMSLGAENSVAYSNNSIAIPTNFTISVTTEILPVSMTKTSVDCTMYICGDSTECSNLLLQYGSFCTQLNRALTGIAVEQDKNTQEVFAQVKQIYKTPPIKDFGGFNFSQILPDPSKPSKRSFIEDLLFNKVTLADAGFIKQYGDCLGDIAARDLICAQKFNGLTVLPPLLTDEMIAQYTSALLAGTITSGWTFGAGAALQIPFAMQMAYRFNGCGVTQNVLYENQKLIANQFNSAIGKIQDSLSSTASALGKLQDVVNQNAQALNTLVKQLSSNFGAISSVLNDILSRLDKVEAEVQIDRLITGRLQSLQTYVTQQLIRAAEIRASANLAATKMSECVLGQSKRVDFCGKGCHLMSFPQSAPHGVVFLHVTYVPAQEKNFTTAPAICHDGKAHFPREGVFVSNGTHWFVTQRNFYEPQIITTDNTFVSGNCDVVIGIVNNTVYDPLQPELDS

SEQ ID NO: 3283 - protein, 1147 aa, Artificial Sequence
  SARS-CoV-2/USA/WI-13/2020__EPI_ISL_417516 spike protein (1-1147)(I909C_Y1047C)
MFVFLVLLPLVSSQCVNLTTRTQLPPAYTNSFTRGVYYPDKVFRSSVLHSTQDLFLPFFSNVTWFHAIHVSGTNGTKRFDNPVLPFNDGVYFASTEKSNIIRGWIFGTTLDSKTQSLLIVNNATNVVIKVCEFQFCNDPFLGVYYHKNNKSWMESEFRVYSSANNCTFEYVSQPFLMDLEGKQGNFKNLREFVFKNIDGYFKIYSKHTPINLVRDLPQGFSALEPLVDLPIGINITRFQTLLALHRSYLTPGDSSSGWTAGAAAYYVGYLQPRTFLLKYNENGTITDAVDCALDPLSETKCTLKSFTVEKGIYQTSNFRVLPTESIVRFPNITNLCPFGEVFNATRFASVYAWNRKRISNCVADYSVLYNSASFSTFKCYGVSPTKLNDLCFTNVYADSFVIRGDEVRQIAPGQTGKIADYNYKLPDDFTGCVIAWNSNNLDSKVGGNYNYLYRLFRKSNLKPFERDISTEIYQAGSTPCNGVEGFNCYFPLQSYGFQPTNGVGYQPYRVVVLSFELLHAPATVCGPKKSTNLVKNKCVNFNFNGLTGTGVLTESNKKFLPFQQFGRDIADTTDAVRDPQTLEILDITPCSFGGVSVITPGTNTSNQVAVLYQGVNCTEVPVAIHADQLTPTWRVYSTGSNVFQTRAGCLIGAEHVNNSYECDIPIGAGICASYQTQTNSPRRARSVASQSIIAYTMSLGAENSVAYSNNSIAIPTNFTISVTTEILPVSMTKTSVDCTMYICGDSTECSNLLLQYGSFCTQLNRALTGIAVEQDKNTQEVFAQVKQIYKTPPIKDFGGFNFSQILPDPSKPSKRSFIEDLLFNKVTLADAGFIKQYGDCLGDIAARDLICAQKFNGLTVLPPLLTDEMIAQYTSALLAGTITSGWTFGAGAALQIPFAMQMAYRFNGCGVTQNVLYENQKLIANQFNSAIGKIQDSLSSTASALGKLQDVVNQNAQALNTLVKQLSSNFGAISSVLNDILSRLDKVEAEVQIDRLITGRLQSLQTYVTQQLIRAAEIRASANLAATKMSECVLGQSKRVDFCGKGCHLMSFPQSAPHGVVFLHVTYVPAQEKNFTTAPAICHDGKAHFPREGVFVSNGTHWFVTQRNFYEPQIITTDNTFVSGNCDVVIGIVNNTVYDPLQPELDS

SEQ ID NO: 3284 - protein, 1146 aa, Artificial Sequence
  SARS-CoV-2/India/1-27/2020__EPI_ISL_413522 spike protein (1-1146)(I908C_Y1046C)
MFVFLVLLPLVSSQCVNLTTRTQLPPAYTNSFTRGVYYPDKVFRSSVLHSTQDLFLPFFSNVTWFHAIHVSGTNGTKRFDNPVLPFNDGVYFASTEKSNIIRGWIFGTTLDSKTQSLLIVNNATNVVIKVCEFQFCNDPFLGVYHKNNKSWMESEFRVYSSANNCTFEYVSQPFLMDLEGKQGNFKNLREFVFKNIDGYFKIYSKHTPINLVRDLPQGFSALEPLVDLPIGINITRFQTLLALHRSYLTPGDSSSGWTAGAAAYYVGYLQPRTFLLKYNENGTITDAVDCALDPLSETKCTLKSFTVEKGIYQTSNFRVQPTESIVRFPNITNLCPFGEVFNATRFASVYAWNRKRISNCVADYSVLYNSASFSTFKCYGVSPTKLNDLCFTNVYADSFVIRGDEVIQIAPGQTGKIADYNYKLPDDFTGCVIAWNSNNLDSKVGGNYNYLYRLFRKSNLKPFERDISTEIYQAGSTPCNGVEGFNCYFPLQSYGFQPTNGVGYQPYRVVVLSFELLHAPATVCGPKKSTNLVKNKCVNFNFNGLTGTGVLTESNKKFLPFQQFGRDIADTTDAVRDPQTLEILDITPCSFGGVSVITPGTNTSNQVAVLYQDVNCTEVPVAIHADQLTPTWRVYSTGSNVFQTRAGCLIGAEHVNNSYECDIPIGAGICASYQTQTNSPRRARSVASQSIIAYTMSLGAENSVAYSNNSIAIPTNFTISVTTEILPVSMTKTSVDCTMYICGDSTECSNLLLQYGSFCTQLNRALTGIAVEQDKNTQEVFAQVKQIYKTPPIKDFGGFNFSQILPDPSKPSKRSFIEDLLFNKVTLADAGFIKQYGDCLGDIAARDLICAQKFNGLTVLPPLLTDEMIAQYTSALLAGTITSGWTFGAGAALQIPFAMQMAYRFNGCGVTQNVLYENQKLIANQFNSAIGKIQDSLSSTASALGKLQDVVNQNAQALNTLVKQLSSNFGAISSVLNDILSRLDKVEAEVQIDRLITGRLQSLQTYVTQQLIRAAEIRASANLAATKMSECVLGQSKRVDFCGKGCHLMSFPQSAPHGVVFLHVTYVPAQEKNFTTAPAICHDGKAHFPREGVFVSNGTHWFVTQRNFYEPQIITTDNTFVSGNCDVVIGIVNNTVYDPLQPELDS

SEQ ID NO: 3285 - protein, 1141 aa, Artificial Sequence
  SARS-CoV-2/pangolin/Guangxi/P4L/2017__EPI_ISL_410538 spike protein (1-1141)(I903C_Y1041C)
MFVFLFVLPLVSSQCVNLTTRTGIPPGYTNSSTRGVYYPDKVFRSSILHLTQDLFLPFFSNVTWFNTINYQGGFKKFDNPVLPFNDGVYFASTEKSNIIRGWIFGTTLDARTQSLLIVNNATNVVIKVCEFQFCTDPFLGVYYHNNNKTWVENEFRVYSSANNCTFEYISQPFLMDLEGKQGNFKNLREFVFKNVDGYFKIYSKHTPIDLVRDLPRGFAALEPLVDLPIGINITRFQTLLALHRSYLTPGNLESGWTTGAAAYYVGYLQQRTFLLSYNQNGTITDAVDCSLDPLSETKCTLKSLTVEKGIYQTSNFRVQPTISIVRFPNITNLCPFGEVFNASKFASVYAWNRKRISNCVADYSVLYNSTSFSTFKCYGVSPTKLNDLCFTNVYADSFVVKGDEVRQIAPGQTGVIADYNYKLPDDFTGCVIAWNSVKQDALTGGNYGYLYRLFRKSKLKPFERDISTEIYQAGSTPCNGQVGLNCYYPLERYGFHPTTGVNYQPFRVVVLSFELLNGPATVCGPKLSTTLVKDKCVNFNFNGLTGTGVLTTSKKQFLPFQQFGRDISDTTDAVRDPQTLEILDITPCSFGGVSVITPGTNTSNQVAVLYQDVNCTEVPMAIHAEQLTPAWRVYSAGANVFQTRAGCLVGAEHVNNSYECDIPVGAGICASYHSMSSLRSVNQRSIIAYTMSLGAENSVAYSNNSIAIPTNFTISVTTEILPVSMTKTSVDCTMYICGDSIECSNLLLQYGSFCTQLNRALTGIAVEQDKNTQEVFAQVKQIYKTPPIKDFGGFNFSQILPDPSKPSKRSFIEDLLFNKVTLADAGFIKQYGDCLGDIAARDLICAQKFNGLTVLPPLLTDEMIAQYTSALLAGTITSGWTFGAGAALQIPFAMQMAYRFNGCGVTQNVLYENQKLIANQFNSAIGKIQDSLSSTASALGKLQDVVNQNAQALNTLVKQLSSNFGAISSVLNDILSRLDKVEAEVQIDRLITGRLQSLQTYVTQQLIRAAEIRASANLAATKMSECVLGQSKRVDFCGKGCHLMSFPQSAPHGVVFLHVTYVPAQEKNFTTAPAICHEGKAHFPREGVFVSNGTHWFITQRNFYEPQIITTDNTFVSGSCDVVIGIVNNTVYDPLQPELDS

SEQ ID NO: 3286 - protein, 1141 aa, Artificial Sequence
  SARS-CoV-2/pangolin/Guangxi/P5L/2017__EPI_ISL_410540 spike protein (1-1141)(I903C_Y1041C)
MFVFLFVLPLVSSQCVNLTTRTGIPPGYTNSSTRGVYYPDKVFRSSILHLTQDLFLPFFSNVTWFNTINYQGGFKKFDNPVLPFNDGVYFASTEKSNIIRGWIFGTTLDARTQSLLIVNNATNVVIKVCEFQFCTDPFLGVYYHNNNKTWVENEFRVYSSANNCTFEYISQPFLMDLEGKQGNFKNLREFVFKNVDGYFKIYSKHTPIDLVRDLPRGFAALEPLVDLPIGINITRFQTLLALHRSYLTPGKLESGWTTGAAAYYVGYLQQRTFLLSYNQNGTITDAVDCSLDPLSETKCTLKSLTVEKGIYQTSNFRVQPTISIVRFPNITNLCPFGEVFNASKFASVYAWNRKRISNCVADYSVLYNSTSFSTFKCYGVSPTKLNDLCFTNVYADSFVVKGDEVRQIAPGQTGVIADYNYKLPDDFTGCVIAWNSVKQDALTGGNYGYLYRLFRKSKLKPFERDISTEIYQAGSTPCNGQVGLNCYYPLERYGFHPTTGVNYQPFRVVVLSFELLNGPATVCGPKLSTTLVKDKCVNFNFNGLTGTGVLTTSKKQFLPFQQFGRDISDTTDAVRDPQTLEILDITPCSFGGVSVITPGTNTSNQVAVLYQDVNCTEVPMAIHAEQLTPAWRVYSAGANVFQTRAGCLVGAEHVNNSYECDIPVGAGICASYHSMSSFRSVNQRSIIAYTMSLGAENSVAYSNNSIAIPTNFTISVTTEILPVSMTKTSVDCTMYICGDSIECSNLLLQYGSFCTQLNRALTGIAVEQDKNTQEVFAQVKQIYKTPPIKDFGGFNFSQILPDPSKPSKRSFIEDLLFNKVTLADAGFIKQYGDCLGDIAARDLICAQKFNGLTVLPPLLTDEMIAQYTSALLAGTITSGWTFGAGAALQIPFAMQMAYRFNGCGVTQNVLYENQKLIANQFNSAIGKIQDSLSSTASALGKLQDVVNQNAQALNTLVKQLSSNFGAISSVLNDILSRLDKVEAEVQIDRLITGRLQSLQTYVTQQLIRAAEIRASANLAATKMSECVLGQSKRVDFCGKGCHLMSFPQSAPHGVVFLHVTYVPAQEKNFTTAPAICHEGKAHFPREGVFVSNGTHWFITQRNFYEPQIITTDNTFVSGSCDVVIGIVNNTVYDPLQPELDS

SEQ ID NO: 3287 - protein, 1141 aa, Artificial Sequence
  SARS-CoV-2/pangolin/Guangxi/P5E/2017__EPI_ISL_410541 spike protein (1-1141)(I903C_Y1041C)
MFVFLFVLPLVSSQCVNLTTRTGIPPGYTNSSTRGVYYPDKVFRSSILHLTQDLFLPFFSNVTWFNTITYQGGSKKFDNPVLPFNDGVYFASTEKSNIIRGWIFGTTLDARTQSLLIVNNATNVVIKVCEFQFCTDPFLGVYYHNNNKTWVENEFRVYSSANNCTFEYISQPFLMDLEGKQGNFKNLREFVFKNVDGYFKIYSKHTPIDLVRDLPRGFAALEPLVDLPIGINITRFQTLLALHRSYLTPGKLESGWTTGAAAYYVGYLQQRTFLLSYNQNGTITDAVDCSLDPLSETKCTLKSLTVEKGIYQTSNFRVQPTISIVRFPNITNLCPFGEVFNASKFASVYAWNRKRISNCVADYSVLYNSTSFSTFKCYGVSPTKLNDLCFTNVYADSFVVKGDEVRQIAPGQTGVIADYNYKLPDDFTGCVIAWNSVKQDALTGDNYGYLYRLFRKSKLKPFERDISTEIYQAGSTPCNGQVGLNCYYPLERYGFHPTTGVNYQPFRVVVLSFELLNGPATVCGPKLSTTLVKDKCVNFNFNGLTGTGVLTTSKKQFLPFQQFGRDISDTTDAVRDPQTLEILDITPCSFGGVSVITPGTNTSNQVAVLYQDVNCTEVPMAIHAEQLTPAWRVYSAGANVFQTRAGCLVGAEHVNNSYECDIPVGAGICASYHSMSSFRSVNQRSIIAYTMSLGAENSVAYSNNSIAIPTNFTISVTTEILPVSMTKTSVDCTMYICGDSIECSNLLLQYGSFCTQLNRALTGIAVEQDKNTQEVFAQVKQIYKTPPIKDFGGFNFSQILPDPSKPSKRSFIEDLLFNKVTLADAGFIKQYGDCLGDIAARDLICAQKFNGLTVLPPLLTDEMIAQYTSALLAGTITSGWTFGAGAALQIPFAMQMAYRFNGCGVTQNVLYENQKLIANQFNSAIGKIQDSLSSTASALGKLQDVVNQNAQALNTLVKQLSSNFGAISSVLNDILSRLDKVEAEVQIDRLITGRLQSLQTYVTQQLIRAAEIRASANLAATKMSECVLGQSKRVDFCGKGCHLMSFPQSAPHGVVFLHVTYVPAQEKNFTTAPAICHEGKAHFPREGVFVSNGTHWFITQRNFYEPQIITTDNTFVSGSCDVVIGIVNNTVYDPLQPELDS

SEQ ID NO: 3288 - protein, 1139 aa, Artificial Sequence
  SARS-CoV-2/pangolin/Guangxi/P1E/2017__EPI_ISL_410539 spike protein (1-1139)(I901C_Y1039C)
MFVFLFVLPLVSSQCVNLTTRTGIQPGYTNSSTRGVYYPDKVFRSSILHLTQDLFLPFFSNVTWFNTINYQGGFKKFDNPVLPFNDGVYFASTEKSNIIRGWIFGTTLDARTQSLLIVNNATNVVIKVCEFQFCTDPFLGVYYHNNNKTWVENEFRVYSSANNCTFEYISQPFLMDLEGKQGNFKNLREFVFKNVDGYFKIYSKHTPIDLVRDLPRGFAALEPLVDLPIGINITRFQTLLALHRSYLTPGKLESGWTTGAAAYYVGYLQQRTFLLSYNQNGTITDAVDCSLDPLSETKCTLKSLTVEKGIYQTSNFRVQPTISIVRFPNITNLCPFGEVFNASKFASVYAWNRKRISNCVADYSVLYNSTSFSTFKCYGVSPTKLNDLCFTNVYADSFVVKGDEVRQIAPGQTGVIADYNYKLPDDFTGCVIAWNSVKQDALTGGNYLYRLFRKSKLKPFERDISTEIYQAGSTPCNGQVGLNCYYPLERYGFHPTTGVNYQPFRVVVLSFELLNGPATVCGPKLSTTLVKDKCVNFNFNGLTGTGVLTTSKKQFLPFQQFGRDISDTTDAVRDPQTLEILDITPCSFGGVSVITPGTNTSNQVAVLYQDVNCTEVPMAIHAEQLTPAWRVYSAGANVFQTRAGCLVGAEHVNNSYECDIPVGAGICASYHSMSSLRSVNQRSIIAYTMSLGAENSVAYSNNSIAIPTNFTISVTTEILPVSMTKTSVDCTMYICGDSIECSNLLLQYGSFCTQLNRALTGIAVEQDKNTQEVFAQVKQIYKTPPIKDFGGFNFSQILPDPSKPSKRSFIEDLLFNKVTLADAGFIKQYGDCLGDIAARDLICAQKFNGLTVLPPLLTDEMIAQYTSALLAGTITSGWTFGAGAALQIPFAMQMAYRFNGCGVTQNVLYENQKLIANQFNSAIGKIQDSLSSTASALGKLQDVVNQNAQALNTLVKQLSSNFGAISSVLNDILSRLDKVEAEVQIDRLITGRLQSLQTYVTQQLIRAAEIRASANLAATKMSECVLGQSKRVDFCGKGCHLMSFPQSAPHGVVFLHVTYVPAQEKNFTTAPAICHEGKAHFPREGVFVSNGTHWFITQRNFYEPQIITTDNTFVSGSCDVVIGIVNNTVYDPLQPELDS

SEQ ID NO: 3289 - protein, 1147 aa, Artificial Sequence
  SARS-CoV-2/Wuhan/WIV05/2019__EPI_ISL_402128 spike protein (1-1147)(Q965C_S1003C)
MFVFLVLLPLVSSQCVNLTTRTQLPPAYTNSFTRGVYYPDKVFRSSVLHSTQDLFLPFFSNVTWFHAIHVSGTNGTKRFDNPVLPFNDGVYFASTEKSNIIRGWIFGTTLDSKTQSLLIVNNATNVVIKVCEFQFCNDPFLGVYYHKNNKSWMESEFRVYSSANNCTFEYVSQPFLMDLEGKQGNFKNLREFVFKNIDGYFKIYSKHTPINLVRDLPQGFSALEPLVDLPIGINITRFQTLLALHRSYLTPGDSSSGWTAGAAAYYVGYLQPRTFLLKYNENGTITDAVDCALDPLSETKCTLKSFTVEKGIYQTSNFRVQPTESIVRFPNITNLCPFGEVFNATRFASVYAWNRKRISNCVADYSVLYNSASFSTFKCYGVSPTKLNDLCFTNVYADSFVIRGDEVRQIAPGQTGKIADYNYKLPDDFTGCVIAWNSNNLDSKVGGNYNYLYRLFRKSNLKPFERDISTEIYQAGSTPCNGVEGFNCYFPLQSYGFQPTNGVGYQPYRVVVLSFELLHAPATVCGPKKSTNLVKNKCVNFNFNGLTGTGVLTESNKKFLPFQQFGRDIADTTDAVRDPQTLEILDITPCSFGGVSVITPGTNTSNQVAVLYQDVNCTEVPVAIHADQLTPTWRVYSTGSNVFQTRAGCLIGAEHVNNSYECDIPIGAGICASYQTQTNSPRRARSVASQSIIAYTMSLGAENSVAYSNNSIAIPTNFTISVTTEILPVSMTKTSVDCTMYICGDSTECSNLLLQYGSFCTQLNRALTGIAVEQDKNTQEVFAQVKQIYKTPPIKDFGGFNFSQILPDPSKPSKRSFIEDLLFNKVTLADAGFIKQYGDCLGDIAARDLICAQKFNGLTVLPPLLTDEMIAQYTSALLAGTITSGWTFGAGAALQIPFAMQMAYRFNGIGVTQNVLYENQKLIANQFNSAIGKIQDSLSSTASALGKLQDVVNQNAQALNTLVKCLSSNFGAISSVLNDILSRLDKVEAEVQIDRLITGRLQCLQTYVTQQLIRAAEIRASANLAATKMSECVLGQSKRVDFCGKGYHLMSFPQSAPHGVVFLHVTYVPAQEKNFTTAPAICHDGKAHFPREGVFVSNGTHWFVTQRNFYEPQIITTDNTFVSGNCDVVIGIVNNTVYDPLQPELDS

SEQ ID NO: 3290 - protein, 1143 aa, Artificial Sequence
  SARS-CoV-2/bat/Yunnan/RaTG13/2013__EPI_ISL_402131 spike protein (1-1143)(Q961C_S999C)
MFVFLVLLPLVSSQCVNLTTRTQLPPAYTNSSTRGVYYPDKVFRSSVLHLTQDLFLPFFSNVTWFHAIHVSGTNGIKRFDNPVLPFNDGVYFASTEKSNIIRGWIFGTTLDSKTQSLLIVNNATNVVIKVCEFQFCNDPFLGVYYHKNNKSWMESEFRVYSSANNCTFEYVSQPFLMDLEGKQGNFKNLREFVFKNIDGYFKIYSKHTPINLVRDLPPGFSALEPLVDLPIGINITRFQTLLALHRSYLTPGDSSSGWTAGAAAYYVGYLQPRTFLLKYNENGTITDAVDCALDPLSETKCTLKSFTVEKGIYQTSNFRVQPTDSIVRFPNITNLCPFGEVFNATTFASVYAWNRKRISNCVADYSVLYNSTSFSTFKCYGVSPTKLNDLCFTNVYADSFVITGDEVRQIAPGQTGKIADYNYKLPDDFTGCVIAWNSKHIDAKEGGNFNYLYRLFRKANLKPFERDISTEIYQAGSKPCNGQTGLNCYYPLYRYGFYPTDGVGHQPYRVVVLSFELLNAPATVCGPKKSTNLVKNKCVNFNFNGLTGTGVLTESNKKFLPFQQFGRDIADTTDAVRDPQTLEILDITPCSFGGVSVITPGTNASNQVAVLYQDVNCTEVPVAIHADQLTPTWRVYSTGSNVFQTRAGCLIGAEHVNNSYECDIPIGAGICASYQTQTNSRSVASQSIIAYTMSLGAENSVAYSNNSIAIPTNFTISVTTEILPVSMTKTSVDCTMYICGDSTECSNLLLQYGSFCTQLNRALTGIAVEQDKNTQEVFAQVKQIYKTPPIKDFGGFNFSQILPDPSKPSKRSFIEDLLFNKVTLADAGFIKQYGDCLGDIAARDLICAQKFNGLTVLPPLLTDEMIAQYTSALLAGTITSGWTFGAGAALQIPFAMQMAYRFNGIGVTQNVLYENQKLIANQFNSAIGKIQDSLSSTASALGKLQDVVNQNAQALNTLVKCLSSNFGAISSVLNDILSRLDKVEAEVQIDRLITGRLQCLQTYVTQQLIRAAEIRASANLAATKMSECVLGQSKRVDFCGKGYHLMSFPQSAPHGVVFLHVTYVPAQEKNFTTAPAICHDGKAHFPREGVFVSNGTHWFVTQRNFYEPQIITTDNTFVSGSCDVVIGIVNNTVYDPLQPELDS

SEQ ID NO: 3291 - protein, 1147 aa, Artificial Sequence
  SARS-CoV-2/Wuhan/HBCDC-HB-01/2019__EPI_ISL_402132 spike protein (1-1147)(Q965C_S1003C)
MFVFLVLLPLVSSQCVNLTTRTQLPPAYTNSITRGVYYPDKVFRSSVLHSTQDLFLPFFSNVTWFHAIHVSGTNGTKRFDNPVLPFNDGVYFASTEKSNIIRGWIFGTTLDSKTQSLLIVNNATNVVIKVCEFQFCNDPFLGVYYHKNNKSWMESEFRVYSSANNCTFEYVSQPFLMDLEGKQGNFKNLREFVFKNIDGYFKIYSKHTPINLVRDLPQGFSALEPLVDLPIGINITRFQTLLALHRSYLTPGDSSSGWTAGAAAYYVGYLQPRTFLLKYNENGTITDAVDCALDPLSETKCTLKSFTVEKGIYQTSNFRVQPTESIVRFPNITNLCPFGEVFNATRFASVYAWNRKRISNCVADYSVLYNSASFSTFKCYGVSPTKLNDLCFTNVYADSFVIRGDEVRQIAPGQTGKIADYNYKLPDDFTGCVIAWNSNNLDSKVGGNYNYLYRLFRKSNLKPFERDISTEIYQAGSTPCNGVEGFNCYFPLQSYGFQPTNGVGYQPYRVVVLSFELLHAPATVCGPKKSTNLVKNKCVNFNFNGLTGTGVLTESNKKFLPFQQFGRDIADTTDAVRDPQTLEILDITPCSFGGVSVITPGTNTSNQVAVLYQDVNCTEVPVAIHADQLTPTWRVYSTGSNVFQTRAGCLIGAEHVNNSYECDIPIGAGICASYQTQTNSPRRARSVASQSIIAYTMSLGAENSVAYSNNSIAIPTNFTISVTTEILPVSMTKTSVDCTMYICGDSTECSNLLLQYGSFCTQLNRALTGIAVEQDKNTQEVFAQVKQIYKTPPIKDFGGFNFSQILPDPSKPSKRSFIEDLLFNKVTLADAGFIKQYGDCLGDIAARDLICAQKFNGLTVLPPLLTDEMIAQYTSALLAGTITSGWTFGAGAALQIPFAMQMAYRFNGIGVTQNVLYENQKLIANQFNSAIGKIQDSLSSTASALGKLQDVVNQNAQALNTLVKCLSSNFGAISSVLNDILSRLDKVEAEVQIDRLITGRLQCLQTYVTQQLIRAAEIRASANLAATKMSECVLGQSKRVDFCGKGYHLMSFPQSAPHGVVFLHVTYVPAQEKNFTTAPAICHDGKAHFPREGVFVSNGTHWFVTQRNFYEPQIITTDNTFVSGNCDVVIGIVNNTVYDPLQPELDS

SEQ ID NO: 3292 - protein, 1147 aa, Artificial Sequence
  SARS-CoV-2/Guangdong/20SF028/2020__EPI_ISL_403936 spike protein (1-1147)(Q965C_S1003C)
MFVFLVLLPLVSSQCVNLTTRTQLPPAYTNSFTRGVYYPDKVFRSSVLYSTQDLFLPFFSNVTWFHAIHVSGTNGTKRFDNPVLPFNDGVYFASTEKSNIIRGWIFGTTLDSKTQSLLIVNNATNVVIKVCEFQFCNDPFLGVYYHKNNKSWMESEFRVYSSANNCTFEYVSQPFLMDLEGKQGNFKNLREFVFKNIDGYFKIYSKHTPINLVRDLPQGFSALEPLVDLPIGINITRFQTLLALHRSYLTPGDSSSGWTAGAAAYYVGYLQPRTFLLKYNENGTITDAVDCALDPLSETKCTLKSFTVEKGIYQTSNFRVQPTESIVRFPNITNLCPFGEVFNATRFASVYAWNRKRISNCVADYSVLYNSASFSTFKCYGVSPTKLNDLCFTNVYADSFVIRGDEVRQIAPGQTGKIADYNYKLPDDFTGCVIAWNSNNLDSKVGGNYNYLYRLFRKSNLKPFERDISTEIYQAGSTPCNGVEGFNCYFPLQSYGFQPTNGVGYQPYRVVVLSFELLHAPATVCGPKKSTNLVKNKCVNFNFNGLTGTGVLTESNKKFLPFQQFGRDIADTTDAVRDPQTLEILDITPCSFGGVSVITPGTNTSNQVAVLYQDVNCTEVPVAIHADQLTPTWRVYSTGSNVFQTRAGCLIGAEHVNNSYECDIPIGAGICASYQTQTNSPRRARSVASQSIIAYTMSLGAENSVAYSNNSIAIPTNFTISVTTEILPVSMTKTSVDCTMYICGDSTECSNLLLQYGSFCTQLNRALTGIAVEQDKNTQEVFAQVKQIYKTPPIKDFGGFNFSQILPDPSKPSKRSFIEDLLFNKVTLADAGFIKQYGDCLGDIAARDLICAQKFNGLTVLPPLLTDEMIAQYTSALLAGTITSGWTFGAGAALQIPFAMQMAYRFNGIGVTQNVLYENQKLIANQFNSAIGKIQDSLSSTASALGKLQDVVNQNAQALNTLVKCLSSNFGAISSVLNDILSRLDKVEAEVQIDRLITGRLQCLQTYVTQQLIRAAEIRASANLAATKMSECVLGQSKRVDFCGKGYHLMSFPQSAPHGVVFLHVTYVPAQEKNFTTAPAICHDGKAHFPREGVFVSNGTHWFVTQRNFYEPQIITTDNTFVSGNCDVVIGIVNNTVYDPLQPELDS

SEQ ID NO: 3293 - protein, 1147 aa, Artificial Sequence
  SARS-CoV-2/Shenzhen/SZTH-001/2020__EPI_ISL_406592 spike protein (1-1147)(Q965C_S1003C)
MFVFLVLLPLVSSQCVNLTTRTQLPPAYTNSFTRGVYYPDKVFRSSVLHSTQDLFLPFFSNVTWFHAIHVSGTNGTKRFDNPVLPFNDGVYFASTEKSNIIRGWIFGTTLDSKTQSLLIVNNATNVVIKVCEFQFCNDPFLGVYYHKNNKSWMESEFRVYSSANNCTFEYVSQPFLMDLEGKQGNFKNLREFVFKNIDGYFKIYSKHTPINLVRDLPQGFSALEPLVDLPIGINITRFQTLLALHRSYLTPGDSSSGWTAGAAAYYVGYLQPRTFLLKYNENGTITDAVDCALDPLSETKCTLKSFTVEKGIYQTSNFRVQPTESIVRFPNITNLCPFGEVFNATRFASVYAWNRKRISNCVADYSVLYNSASFSTFKCYGVSPTKLNDLCFTNVYADSFVIRGDEVRQIAPGQTGKIADYNYKLPDDFTGCVIAWNSNNLDSKVGGNYNYLYRLFRKSNLKPFERDISTEIYQAGSTPCNGVEGFNCYFPLQSYGFQPTNGVGYQPYRVVVLSFELLHAPATVCGPKKSTNLVKNKCVNFNFNGLTGTGVLTESNKKFLPFQQFGRDIADTTDAVRDPQTLEILDITPCSFGGVSVITPGTNTSNQVAVLYQDVNCTEVPVAIHADQLTPTWRVYSTGSNVFQTRAGCLIGAEHVNNSYECDIPIGAGICASYQTQTNSPRRARSVASQSIIAYTMSLGAENSVAYSNNSIAIPTNFTISVTTEILPVSMTKTSVDCTMYICGDSTECSNLLLQYGSFCTQLNRALTGIAVEQDKNTQEVFAQVKQIYKTPPIKDFGGFNFSQILPDPSKPSKRSFIEDLLFNKVTLADAGFIKQYGDCLGDIAARDLICAQKFNGLTVLPPLLTDEMIAQYTSALLAGTITSGWTFGAGAALQIPFAMQMAYRFNGIGVTQNVLYENQKLIANQFNSAIGKIQDSLSSTASALGKLQDVVNQNAQALNTLVKCLSSNFGAISSVLNDILSRLDKVEAEVQIDRLITGRLQCLQTYVTQQLIRAAEIRASANLAATKMSECVLGQSKRVDFCGKGYHLMSFPQSAPHGVVFLHVTYVPAQEKNFTTAPAICHDGKAHFPREGVFVSNGTHWFVTQRNFYEPQIITTDNTFVSGNCDVLIGIVNNTVYDPLQPELDS

SEQ ID NO: 3294 - protein, 1147 aa, Artificial Sequence
  SARS-CoV-2/Shenzhen/SZTH-004/2020__EPI_ISL_406595 spike protein (1-1147)(Q965C_S1003C)
MFVFLVLLPLVSSQCVNLTTRTQLPPAYTNSFTRGVYYPDKVFRSSVLHSTQDLFLPFFSNVTWFHAIHVSGTNGTKRFDNPVLPFNDGVYFASTEKSNIIRGWIFGTTLDSKTQSLLIVNNATNVVIKVCEFQFCNDPFLGVYYHKNNKSWMESEFRVYSSANNCTFEYVSQPFLMDLEGKQGNFKNLREFVFKNIDGYFKIYSKHTPINLVRDLPQGFSALEPLVDLPIGINITRFQTLLALHRSYLTPGDSSSGWTAGAAAYYVGYLQPRTFLLKYNENGTITDAVDCALDPLSETKCTLKSFTVEKGIYQTSNFRVQPTESIVRFPNITNLCPFGEVFNATRFASVYAWDRKRISNCVAYYSVLYNSASFSTFKCYGVSPTKLNDLCFTNVYADSFVIRGDEVRQIAPGQTGKIADYNYKLPDDFTGCVIAWNSNNLDSKVGGNYNYLYRLFRKSNLKPFERDISTEIYQAGSTPCNGVEGFNCYFPLQSYGFQPTNGVGYQPYRVVVLSFELLHAPATVCGPKKSTNLVKNKCVNFNFNGLTGTGVLTESNKKFLPFQQFGRDIADTTDAVRDPQTLEILDITPCSFGGVSVITPGTNTSNQVAVLYQDVNCTEVPVAIHADQLTPTWRVYSTGSNVFQTRAGCLIGAEHVNNSYECDIPIGAGICASYQTQTNSPRRARSVASQSIIAYTMSLGAENSVAYSNNSIAIPTNFTISVTTEILPVSMTKTSVDCTMYICGDSTECSNLLLQYGSFCTQLNRALTGIAVEQDKNTQEVFAQVKQIYKTPPIKDFGGFNFSQILPDPSKPSKRSFIEDLLFNKVTLADAGFIKQYGDCLGDIAARDLICAQKFNGLTVLPPLLTDEMIAQYTSALLAGTITSGWTFGAGAALQIPFAMQMAYRFNGIGVTQNVLYENQKLIANQFNSAIGKIQDSLSSTASALGKLQDVVNQNAQALNTLVKCLSSNFGAISSVLNDILSRLDKVEAEVQIDRLITGRLQCLQTYVTQQLIRAAEIRASANLAATKMSECVLGQSKRVDFCGKGYHLMSFPQSAPHGVVFLHVTYVPAQEKNFTTAPAICHDGKAHFPREGVFVSNGTHWFVTQRNFYEPQIITTDNTFVSGNCDVVIGIVNNTVYDPLQPELDS

SEQ ID NO: 3295 - protein, 1147 aa, Artificial Sequence
  SARS-CoV-2/France/IDF0372/2020__EPI_ISL_406596 spike protein (1-1147)(Q965C_S1003C)
MFVFLVLLPLVSSQCVNLTTRTQLPPAYTNSFTRGVYYPDKVFRSSVLHSTQDLFLPFFSNVTWFHAIHVSGTNGTKRFDNPVLPFNDGVYFASTEKSNIIRGWIFGTTLDSKTQSLLIVNNATNVVIKVCEFQFCNDPFLGVYYHKNNKSWMESEFRVYSSANNCTFEYVSQPFLMDLEGKQGNFKNLREFVFKNIDGYFKIYSKHTPINLVRDLPQGFSALEPLVDLPIGINITRFQTLLALHRSYLTPGDSSSGWTAGAAAYYVGYLQPRTFLLKYNENGTITDAVDCALDPLSETKCTLKSFTVEKGIYQTSNFRVQPTESIVRFPNITNLCPFGEVFNATRFASVYAWNRKRISNCVADYSFLYNSASFSTFKCYGVSPTKLNDLCFTNVYADSFVIRGDEVRQIAPGQTGKIADYNYKLPDDFTGCVIAWNSNNLDSKVGGNYNYLYRLFRKSNLKPFERDISTEIYQAGSTPCNGVEGFNCYFPLQSYGFQPTNGVGYQPYRVVVLSFELLHAPATVCGPKKSTNLVKNKCVNFNFNGLTGTGVLTESNKKFLPFQQFGRDIADTTDAVRDPQTLEILDITPCSFGGVSVITPGTNTSNQVAVLYQDVNCTEVPVAIHADQLTPTWRVYSTGSNVFQTRAGCLIGAEHVNNSYECDIPIGAGICASYQTQTNSPRRARSVASQSIIAYTMSLGAENSVAYSNNSIAIPTNFTISVTTEILPVSMTKTSVDCTMYICGDSTECSNLLLQYGSFCTQLNRALTGIAVEQDKNTQEVFAQVKQIYKTPPIKDFGGFNFSQILPDPSKPSKRSFIEDLLFNKVTLADAGFIKQYGDCLGDIAARDLICAQKFNGLTVLPPLLTDEMIAQYTSALLAGTITSGWTFGAGAALQIPFAMQMAYRFNGIGVTQNVLYENQKLIANQFNSAIGKIQDSLSSTASALGKLQDVVNQNAQALNTLVKCLSSNFGAISSVLNDILSRLDKVEAEVQIDRLITGRLQCLQTYVTQQLIRAAEIRASANLAATKMSECVLGQSKRVDFCGKGYHLMSFPQSAPHGVVFLHVTYVPAQEKNFTTAPAICHDGKAHFPREGVFVSNGTHWFVTQRNFYEPQIITTDNTFVSGNCDVVIGIVNNTVYDPLQPELDS

SEQ ID NO: 3296 - protein, 1147 aa, Artificial Sequence
  SARS-CoV-2/Australia/VIC01/2020__EPI_ISL_406844 spike protein (1-1147)(Q965C_S1003C)
MFVFLVLLPLVSSQCVNLTTRTQLPPAYTNSFTRGVYYPDKVFRSSVLHSTQDLFLPFFSNVTWFHAIHVSGTNGTKRFDNPVLPFNDGVYFASTEKSNIIRGWIFGTTLDSKTQSLLIVNNATNVVIKVCEFQFCNDPFLGVYYHKNNKSWMESEFRVYSSANNCTFEYVSQPFLMDLEGKQGNFKNLREFVFKNIDGYFKIYSKHTPINLVRDLPQGFSALEPLVDLPIGINITRFQTLLALHRRYLTPGDSSSGWTAGAAAYYVGYLQPRTFLLKYNENGTITDAVDCALDPLSETKCTLKSFTVEKGIYQTSNFRVQPTESIVRFPNITNLCPFGEVFNATRFASVYAWNRKRISNCVADYSVLYNSASFSTFKCYGVSPTKLNDLCFTNVYADSFVIRGDEVRQIAPGQTGKIADYNYKLPDDFTGCVIAWNSNNLDSKVGGNYNYLYRLFRKSNLKPFERDISTEIYQAGSTPCNGVEGFNCYFPLQSYGFQPTNGVGYQPYRVVVLSFELLHAPATVCGPKKSTNLVKNKCVNFNFNGLTGTGVLTESNKKFLPFQQFGRDIADTTDAVRDPQTLEILDITPCSFGGVSVITPGTNTSNQVAVLYQDVNCTEVPVAIHADQLTPTWRVYSTGSNVFQTRAGCLIGAEHVNNSYECDIPIGAGICASYQTQTNSPRRARSVASQSIIAYTMSLGAENSVAYSNNSIAIPTNFTISVTTEILPVSMTKTSVDCTMYICGDSTECSNLLLQYGSFCTQLNRALTGIAVEQDKNTQEVFAQVKQIYKTPPIKDFGGFNFSQILPDPSKPSKRSFIEDLLFNKVTLADAGFIKQYGDCLGDIAARDLICAQKFNGLTVLPPLLTDEMIAQYTSALLAGTITSGWTFGAGAALQIPFAMQMAYRFNGIGVTQNVLYENQKLIANQFNSAIGKIQDSLSSTASALGKLQDVVNQNAQALNTLVKCLSSNFGAISSVLNDILSRLDKVEAEVQIDRLITGRLQCLQTYVTQQLIRAAEIRASANLAATKMSECVLGQSKRVDFCGKGYHLMSFPQSAPHGVVFLHVTYVPAQEKNFTTAPAICHDGKAHFPREGVFVSNGTHWFVTQRNFYEPQIITTDNTFVSGNCDVVIGIVNNTVYDPLQPELDS

SEQ ID NO: 3297 - protein, 1147 aa, Artificial Sequence
  SARS-CoV-2/Germany/BavPat1/2020__EPI_ISL_406862 spike protein (1-1147)(Q965C_S1003C)
MFVFLVLLPLVSSQCVNLTTRTQLPPAYTNSFTRGVYYPDKVFRSSVLHSTQDLFLPFFSNVTWFHAIHVSGTNGTKRFDNPVLPFNDGVYFASTEKSNIIRGWIFGTTLDSKTQSLLIVNNATNVVIKVCEFQFCNDPFLGVYYHKNNKSWMESEFRVYSSANNCTFEYVSQPFLMDLEGKQGNFKNLREFVFKNIDGYFKIYSKHTPINLVRDLPQGFSALEPLVDLPIGINITRFQTLLALHRSYLTPGDSSSGWTAGAAAYYVGYLQPRTFLLKYNENGTITDAVDCALDPLSETKCTLKSFTVEKGIYQTSNFRVQPTESIVRFPNITNLCPFGEVFNATRFASVYAWNRKRISNCVADYSVLYNSASFSTFKCYGVSPTKLNDLCFTNVYADSFVIRGDEVRQIAPGQTGKIADYNYKLPDDFTGCVIAWNSNNLDSKVGGNYNYLYRLFRKSNLKPFERDISTEIYQAGSTPCNGVEGFNCYFPLQSYGFQPTNGVGYQPYRVVVLSFELLHAPATVCGPKKSTNLVKNKCVNFNFNGLTGTGVLTESNKKFLPFQQFGRDIADTTDAVRDPQTLEILDITPCSFGGVSVITPGTNTSNQVAVLYQGVNCTEVPVAIHADQLTPTWRVYSTGSNVFQTRAGCLIGAEHVNNSYECDIPIGAGICASYQTQTNSPRRARSVASQSIIAYTMSLGAENSVAYSNNSIAIPTNFTISVTTEILPVSMTKTSVDCTMYICGDSTECSNLLLQYGSFCTQLNRALTGIAVEQDKNTQEVFAQVKQIYKTPPIKDFGGFNFSQILPDPSKPSKRSFIEDLLFNKVTLADAGFIKQYGDCLGDIAARDLICAQKFNGLTVLPPLLTDEMIAQYTSALLAGTITSGWTFGAGAALQIPFAMQMAYRFNGIGVTQNVLYENQKLIANQFNSAIGKIQDSLSSTASALGKLQDVVNQNAQALNTLVKCLSSNFGAISSVLNDILSRLDKVEAEVQIDRLITGRLQCLQTYVTQQLIRAAEIRASANLAATKMSECVLGQSKRVDFCGKGYHLMSFPQSAPHGVVFLHVTYVPAQEKNFTTAPAICHDGKAHFPREGVFVSNGTHWFVTQRNFYEPQIITTDNTFVSGNCDVVIGIVNNTVYDPLQPELDS

SEQ ID NO: 3298 - protein, 1147 aa, Artificial Sequence
  SARS-CoV-2/Wuhan/HBCDC-HB-02/2020__EPI_ISL_412978 spike protein (1-1147)(Q965C_S1003C)
MFVFLVLLPLVSSQCVNLTTRTQLPPAYTNSFTRGVYYPDKVFRSSVLHSTQDLFLPFFSNVTWFHAIHVSGTNGTKRFDNPVLPFNDGVYFASTEKSNIIRGWIFGTTLDSKTQSLLIVNNATNVVIKVCEFQFCNDPFLGVYYHKNNKSWMESEFRVYSSANNCTFEYVSQPFLMDLEGKQGNFKNLREFVFKNIDGYFKIYSKHTPINLVRDLPQGFSALEPLVDLPIGINITRFQTLLALHRSYLTPGDSSSGWTAGAAAYYVGYLQPRTFLLKYNENGTITDAVDCALDPLSETKCTLKSFTVEKGIYQTSNFRVQPTESIVRFPNITNLCPFGEVFNATRFASVYAWNRKRISNCVADYSVLYNSASFSTFKCYGVSPTKLNDLCFTNVYADSFVIRGDEVRQIAPGQTGKIADYNYKLPDDFTGCVIAWNSNNLDSKVGGNYNYLYRLFRKSNLKPFERDISTEIYQAGSTPCNGVEGFNCYFPLQSYGFQPTNGVGYQPYRVVVLSFELLHAPATVCGPKKSTNLVKNKCVNFNFNGLTGTGVLTESNKKFLPFQQFGRDIADTTDAVRDPQTLEILDITPCSFGGVSVITPGTNTSNQVAVLYQDVNCTEVPVAIHADQLTPTWRVYSTGSNVFQTRAGCLIGAEHVNNSYECDIPIGAGICASYQTQTNSPRRARSVASQSIIAYTMSLGAENSVAYSNNSIAIPTNFTISVTTEILPVSMTKTSVDCTMYICGDSTECSNFLLQYGSFCTQLNRALTGIAVEQDKNTQEVFAQVKQIYKTPPIKDFGGFNFSQILPDPSKPSKRSFIEDLLFNKVTLADAGFIKQYGDCLGDIAARDLICAQKFNGLTVLPPLLTDEMIAQYTSALLAGTITSGWTFGAGAALQIPFAMQMAYRFNGIGVTQNVLYENQKLIANQFNSAIGKIQDSLSSTASALGKLQDVVNQNAQALNTLVKCLSSNFGAISSVLNDILSRLDKVEAEVQIDRLITGRLQCLQTYVTQQLIRAAEIRASANLAATKMSECVLGQSKRVDFCGKGYHLMSFPQSAPHGVVFLHVTYVPAQEKNFTTAPAICHDGKAHFPREGVFVSNGTHWFVTQRNFYEPQIITTDNTFVSGNCDVVIGIVNNTVYDPLQPELDS

SEQ ID NO: 3299 - protein, 1147 aa, Artificial Sequence
  SARS-CoV-2/Australia/QLD02/2020__EPI_ISL_407896 spike protein (1-1147)(Q965C_S1003C)
MFVFLVLLPLVSSQCVNLTTRTQLPPAYTNSFTRGVYYPDKVFRSSVLHSTQDLFLPFFSNVTWFHAIHVSGTNGTKRFDNPVLPFNDGVYFASTEKSNIIRGWIFGTTLDSKTQSLLIVNNATNVVIKVCEFQFCNDPFLGVYYHKNNKSWMESEFRVYSSANNCTFEYVSQPFLMDLEGKQGNFKNLREFVFKNIDGYFKIYSKHTPINLVRDLPQGFSALEPLVDLPIGINITRFQTLLALHRSYLTPGDSSSGWTAGAAAYYVGYLQPRTFLLKYNENGTITDAVDCALDPLSETKCTLKSFTVEKGIYQTSNFRVQPTESIVRFPNITNLCPFGEVFNATRFASVYAWNRKRISNCVADYSVLYNSASFSTFKCYGVSPTKLNDLCFTNVYADSFVIRGDEVRQIAPGQTGKIADYNYKLPDDFTGCVIAWNSNNLDSKVGGNYNYLYRLFRKSNLKPFERDISTEIYQAGSTPCNGVEGFNCYFPLQSYGFQPTNGVGYQPYRVVVLSFELLHAPATVCGPKKSTNLVKNKCVNFNFNGLTGTGVLTESNKKFLPFQQFGRDIADTTDAVRDPQTLEILDITPCSFGGVSVITPGTNTSNQVAVLYQDVNCTEVPVAIHADQLTPTWRVYSTGSNVFQTRAGCLIGAEHVNNSYECDIPIGAGICASYQTQTNSPRRARSVASQSIIAYTMSLGAENSVAYSNNSIAIPTNFTISVTTEILPVSMTKTSVDCTMYICGDSTECSNLLLQYGSFCTQLNRALTGIAVEQDKNTQEVFAQVKQIYKTPPIKDFGGFNFSQILPDPSKPSKRSFIEDLLFNKVTLADAGFIKQYGDCLGDIAARDLICAQKFNGLTVLPPLLTDEMIAQYTSALLAGTITSGWTFGAGAALQIPFAMQMAYRFNGIGVTQNVLYENQKLIANQFNSAIGKIQDSLSSTASALGKLQDVVNQNAQALNTLVKCLSSNFGAISSVLNDILSRLDKVEAEVQIDRLITGRLQCLQTYVTQQLIRAAEIRASANLAATKMSECVLGQSKRVDFCGKGYHLMSFPQSAPHGVVFLHVTYVPAQEKNFTTAPAICHDGKAHFPREGVFVSNGTHWFVTQRNFYEPQIITTDNTFVSGNCDVVIGIVNNTVYDPLQLELDS

SEQ ID NO: 3300 - protein, 1147 aa, Artificial Sequence
  SARS-CoV-2/India/1-31/2020__EPI_ISL_413523 spike protein (1-1147)(Q965C_S1003C)
MFVFLVLLPLVSSQCVNLTTRTQLPPAYTNSFTRGVYYPDKVFRSSVLHSTQDLFLPFFSNVTWFHAIHVSGTNGTKRFDNPVLPFNDGVYFASTEKSNIIRGWIFGTTLDSKTQSLLIVNNATNVVIKVCEFQFCNDPFLGVYYHKNNKSWMESEFRVYSSANNCTFEYVSQPFLMDLEGKQGNFKNLREFVFKNIDGYFKIYSKHTPINLVRDLPQGFSALEPLVDLPIGINITRFQTLLALHRSYLTPGDSSSGWTAGAAAYYVGYLQPRTFLLKYNENGTITDAVDCALDPLSETKCTLKSFTVEKGIYQTSNFRVQPTESIVRFPNITNLCPFGEVFNATRFASVYAWNRKRISNCVADYSVLYNSASFSTFKCYGVSPTKLNDLCFTNVYADSFVIRGDEVRQIAPGQTGKIADYNYKLPDDFTGCVIAWNSNNLDSKVGGNYNYLYRLFRKSNLKPFERDISTEIYQAGSTPCNGVEGFNCYFPLQSYGFQPTNGVGYQPYRVVVLSFELLHAPATVCGPKKSTNLVKNKCVNFNFNGLTGTGVLTESNKKFLPFQQFGRDIADTTDAVRDPQTLEILDITPCSFGGVSVITPGTNTSNQVAVLYQDVNCTEVPVAIHADQLTPTWRVYSTGSNVFQTRAGCLIGAEHVNNSYECDIPIGAGICASYQTQTNSPRRARSVASQSIIAYTMSLGAENSVAYSNNSIAIPTNFTISVTTEILPVSMTKTSVDCTMYICGDSTECSNLLLQYGSFCTQLNRALTGIAVEQDKNTQEVFAQVKQIYKTPPIKDFGGFNFSQILPDPSKPSKRSFIEDLLFNKVTLADAGFIKQYGDCLGDIAARDLICAQKFNGLTVLPPLLTDEMIAQYTSALLAGTITSGWTFGAGAALQIPFAMQMAYRFNGIGVTQNVLYENQKLIANQFNSVIGKIQDSLSSTASALGKLQDVVNQNAQALNTLVKCLSSNFGAISSVLNDILSRLDKVEAEVQIDRLITGRLQCLQTYVTQQLIRAAEIRASANLAATKMSECVLGQSKRVDFCGKGYHLMSFPQSAPHGVVFLHVTYVPAQEKNFTTAPAICHDGKAHFPREGVFVSNGTHWFVTQRNFYEPQIITTDNTFVSGNCDVVIGIVNNTVYDPLQPELDS

SEQ ID NO: 3301 - protein, 1147 aa, Artificial Sequence
  SARS-CoV-2/Guangdong/GD2020087-P0008/2020__EPI_ISL_413863 spike protein (1-1147)(Q965C_S1003C)
MFVFLVLLPLVSSQCVNLTTRTQLPPAYTNSFTRGVYYPDKVFRSSVLHSTQDLFLPFFSNVTWFHAIHVSGTNGTKRFDNPVLPFNDGVYFASTEKSNIIRGWIFGTTLDSKTQSLLIVNNATNVVIKVCEFQFCNDPFLGVYYHKNNKSWMESEFRVYSSANNCTFEYVSQPFLMDLEGKQGNFKNLREFVFKNIDGYFKIYSKHTPINLVRDLPQGFSALEPLVDLPIGINITRFQTLLALHRSYLTPGDSSSGWTAGAAAYYVGYLQPRTFLLKYNENGTITDAVDCALDPLSETKCTLKSFTVEKGIYQTSNFRVQPTESIVRFPNITNLCPFGEVFNATRFASVYAWNRKRISNCVADYSVLYNSASFSTFKCYGVSPTKLNDLCFTNVYADSFVIRGDEVREIAPGQTGKIADYNYKLPDDFTGCVIAWNSNNLDSKVGGNYNYLYRLFRKSNLKPFERDISTEIYQAGSTPCNGVEGFNCYFPLQSYGFQPTNGVGYQPYRVVVLSFELLHAPATVCGPKKSTNLVKNKCVNFNFNGLTGTGVLTESNKKFLPFQQFGRDIADTTDAVRDPQTLEILDITPCSFGGVSVITPGTNTSNQVAVLYQDVNCTEVPVAIHADQLTPTWRVYSTGSNVFQTRAGCLIGAEHVNNSYECDIPIGAGICASYQTQTNSPRRARSVASQSIIAYTMSLGAENSVAYSNNSIAIPTNFTISVTTEILPVSMTKTSVDCTMYICGDSTECSNLLLQYGSFCTQLNRALTGIAVEQDKNTQEVFAQVKQIYKTPPIKDFGGFNFSQILPDPSKPSKRSFIEDLLFNKVTLADAGFIKQYGDCLGDIAARDLICAQKFNGLTVLPPLLTDEMIAQYTSALLAGTITSGWTFGAGAALQIPFAMQMAYRFNGIGVTQNVLYENQKLIANQFNSAIGKIQDSLSSTASALGKLQDVVNQNAQALNTLVKCLSSNFGAISSVLNDILSRLDKVEAEVQIDRLITGRLQCLQTYVTQQLIRAAEIRASANLAATKMSECVLGQSKRVDFCGKGYHLMSFPQSAPHGVVFLHVTYVPAQEKNFTTAPAICHDGKAHFPREGVFVSNGTHWFVTQRNFYEPQIITTDNTFVSGNCDVVIGIVNNTVYDPLQPELDS

SEQ ID NO: 3302 - protein, 1147 aa, Artificial Sequence
  SARS-CoV-2/Sweden/01/2020__EPI_ISL_411951 spike protein (1-1147)(Q965C_S1003C)
MFVFLVLLPLVSSQCVNLTTRTQLPPAYTNSFTRGVYYPDKVFRSSVLHSTQDLFLPFFSNVTWFHAIHVSGTNGTKRFDNPVLPFNDGVYFASTEKSNIIRGWIFGTTLDSKTQSLLIVNNATNVVIKVCEFQFCNDPFLGVYYHKNNKSWMESEFRVYSSANNCTFEYVSQPFLMDLEGKQGNFKNLREFVFKNIDGYFKIYSKHTPINLVRDLPQGFSALEPLVDLPIGINITRFQTLLALHRSYLTPGDSSSGWTAGAAAYYVGYLQPRTFLLKYNENGTITDAVDCALDPLSETKCTLKSFTVEKGIYQTSNFRVQPTESIVRFPNITNLCPFGEVFNATRFASVYAWNRKRISNCVADYSVLYNSASFSTFKCYGVSPTKLNDLCFTNVYADSFVIRGDEVRQIAPGQTGKIADYNYKLPDDFTGCVIAWNSNNLDSKVGGNYNYLYRLFRKSNLKPFERDISTEIYQAGSTPCNGVEGFNCYFPLQSYGFQPTNGVGYQPYRVVVLSFELLHAPATVCGPKKSTNLVKNKCVNFNFNGLTGTGVLTESNKKFLPFQQFGRDIADTTDAVRDPQTLEILDITPCSFGGVSVITPGTNTSNQVAVLYQDVNCTEVPVAIHADQLTPTWRVYSTGSNVFQTRAGCLIGAEHVNNSYECDIPIGAGICASYQTQTNSPRRARSVASQSIIAYTMSLGAENSVAYSNNSIAIPTNFTISVTTEILPVSMTKTSVDCTMYICGDSTECSNLLLQYGSFCTQLNRALTGIAVEQDKNTQEVFAQVKQIYKTPPIKDCGGFNFSQILPDPSKPSKRSFIEDLLFNKVTLADAGFIKQYGDCLGDIAARDLICAQKFNGLTVLPPLLTDEMIAQYTSALLAGTITSGWTFGAGAALQIPFAMQMAYRFNGIGVTQNVLYENQKLIANQFNSAIGKIQDSLSSTASALGKLQDVVNQNAQALNTLVKCLSSNFGAISSVLNDILSRLDKVEAEVQIDRLITGRLQCLQTYVTQQLIRAAEIRASANLAATKMSECVLGQSKRVDFCGKGYHLMSFPQSAPHGVVFLHVTYVPAQEKNFTTAPAICHDGKAHFPREGVFVSNGTHWFVTQRNFYEPQIITTDNTFVSGNCDVVIGIVNNTVYDPLQPELDS

SEQ ID NO: 3303 - protein, 1147 aa, Artificial Sequence
  SARS-CoV-2/Tianmen/HBCDC-HB-07/2020__EPI_ISL_412983 spike protein (1-1147)(Q965C_S1003C)
MFVFLVLLPLVSSQCVNLTTRTQLPPAYTNSFTRGVYYPDKVFRSSVLHSTQDLFLPFFSNVTWFHAIHVSGTNGTKRFDNPVLPFNDGVYFASTEKSNIIRGWIFGTTLDSKTQSLLIVNNATNVVIKVCEFQFCNDPFLGVYYHKNNKSWMESEFRVYSSANNCTFEYVSQPFLMDLEGKQGNFKNLREFVFKNIDGYFKIYSKHTPINLVRDLPQGFSALEPLVDLPIGINITRFQTLLALHRSYLTPGDSSSGWTAGAAAYYVGYLQPRTFLLKYNENGTITDAVDCALDPLSETKCTLKSFTVEKGIYQTSNFRVQPTESIVRFPNITNLCPFGEVFNATRFASVYAWNRKRISNCVADYSVLYNSASFSTFKCYGVSPTKLNDLCFTNVYADSFVIRGDEVRQIAPGQTGKIADYNYKLPDDFTGCVIAWNSNNLDSKVGGNYNYLYRLFRKSNLKPFERDISTEIYQAGSTPCNGVEGFNCYFPLQSYGFQPTNGVGYQPYRVVVLSFELLHAPATVCGPKKSTNLVKNKCVNFNFNGLTGTGVLTESNKKFLPFQQFGRDIADTTDAVRDPQTLEILDITPCSFGGVSVITPGTNTSNQVAVLYQDLNCTEVPVAIHADQLTPTWRVYSTGSNVFQTRAGCLIGAEHVNNSYECDIPIGAGICASYQTQTNSPRRARSVASQSIIAYTMSLGAENSVAYSNNSIAIPTNFTISVTTEILPVSMTKTSVDCTMYICGDSTECSNLLLQYGSFCTQLNRALTGIAVEQDKNTQEVFAQVKQIYKTPPIKDFGGFNFSQILPDPSKPSKRSFIEDLLFNKVTLADAGFIKQYGDCLGDIAARDLICAQKFNGLTVLPPLLTDEMIAQYTSALLAGTITSGWTFGAGAALQIPFAMQMAYRFNGIGVTQNVLYENQKLIANQFNSAIGKIQDSLSSTASALGKLQDVVNQNAQALNTLVKCLSSNFGAISSVLNDILSRLDKVEAEVQIDRLITGRLQCLQTYVTQQLIRAAEIRASANLAATKMSECVLGQSKRVDFCGKGYHLMSFPQSAPHGVVFLHVTYVPAQEKNFTTAPAICHDGKAHFPREGVFVSNGTHWFVTQRNFYEPQIITTDNTFVSGNCDVVIGIVNNTVYDPLQPELDS

SEQ ID NO: 3304 - protein, 1147 aa, Artificial Sequence
  SARS-CoV-2/Hong Kong/case42_VM20002493/2020__EPI_ISL_414527 spike protein (1-1147)(Q965C_S1003C)
MFVFLVLLPLVSSQCVNLTTRTQLPPAYTNSFTRGVYYPDKVFRSSVLHSTQDLFLPFFSNVTWFHAIHVSGTNGTKRFDNPVLPFNDGVYFASTEKSNIIRGWIFGTTLDSKTQSLLIVNNATNVVIKVCEFQFCNDPFLGVYYHKNNKSWMESEFRVYSSANNCTFEYVSQPFLMDLEGKQGNFKNLREFVFKNIDGYFKIYSKHTPINLVRDLPQGFSALEPLVDLPIGINITRFQTLLALHRSYLTPGDSSSGWTAGAAAYYVGYLQPRTFLLKYNENGTITDAVDCALDPLSETKCTLKSFTVEKGIYQTSNFRVQPTESIVRFPNITNLCPFGEVFNATRFASVYAWNRKRISNCVADYSVLYNSASFSTFKCYGVSPTKLNDLCFTNVYADSFVIRGDEVRQIAPGQTGKIADYNYKLPDDFTGCVIAWNSNNLDSKVGGNYNYLYRLFRKSNLKPFERDISTEIYQAGSTPCNGVEGFNCYFPLQSYGFQPTNGVGYQPYRVVVLSFELLHAPATVCGPKKSTNLVKNKCVNFNFNGLTGTGVLTESNKKFLPFQQFGRDIADTTDAVRDPQTLEILDITPCSFGGVSVITPGTNTSNQVAVLYQDVNCTEVPVAIHADQLTPTWRVYSTGSNVFQTRAGCLIGAEHVNNSYECDIPIGAGICASYQTQTNSPRRARSVASQSIIAYTMSLGAENSVAYSNNSIAIPTNFAISVTTEILPVSMTKTSVDCTMYICGDSTECSNLLLQYGSFCTQLNRALTGIAVEQDKNTQEVFAQVKQIYKTPPIKDFGGFNFSQILPDPSKPSKRSFIEDLLFNKVTLADAGFIKQYGDCLGDIAARDLICAQKFNGLTVLPPLLTDEMIAQYTSALLAGTITSGWTFGAGAALQIPFAMQMAYRFNGIGVTQNVLYENQKLIANQFNSAIGKIQDSLSSTASALGKLQDVVNQNAQALNTLVKCLSSNFGAISSVLNDILSRLDKVEAEVQIDRLITGRLQCLQTYVTQQLIRAAEIRASANLAATKMSECVLGQSKRVDFCGKGYHLMSFPQSAPHGVVFLHVTYVPAQEKNFTTAPAICHDGKAHFPREGVFVSNGTHWFVTQRNFYEPQIITTDNTFVSGNCDVVIGIVNNTVYDPLQPELDS

SEQ ID NO: 3305 - protein, 1147 aa, Artificial Sequence
  SARS-CoV-2/USA/CruiseA-23/2020__EPI_ISL_414482 spike protein (1-1147)(Q965C_S1003C)
MFVFLVLLPLVSSQCVNLTTRTQLPPAYTNSFTRGVYYPDKVFRSSVLHSTQDLFLPFFSNVTWFHAIHVSGTNGTKRFDNPVLPFNDGVYFASTEKSNIIRGWIFGTTLDSKTQSLLIVNNATNVVIKVCEFQFCNDPFLGVYYHKNNKSWMESEFRVYSSANNCTFEYVSQPFLMDLEVKQGNFKNLREFVFKNIDGYFKIYSKHTPINLVRDLPQGFSALEPLVDLPIGINITRFQTLLALHRSYLTPGDSSSGWTAGAAAYYVGYLQPRTFLLKYNENGTITDAVDCALDPLSETKCTLKSFTVEKGIYQTSNFRVQPTESIVRFPNITNLCPFGEVFNATRFASVYAWNRKRISNCVADYSVLYNSASFSTFKCYGVSPTKLNDLCFTNVYADSFVIRGDEVRQIAPGQTGKIADYNYKLPDDFTGCVIAWNSNNLDSKVGGNYNYLYRLFRKSNLKPFERDISTEIYQAGSTPCNGVEGFNCYFPLQSYGFQPTNGVGYQPYRVVVLSFELLHAPATVCGPKKSTNLVKNKCVNFNFNGLTGTGVLTESNKKFLPFQQFGRDIADTTDAVRDPQTLEILDITPCSFGGVSVITPGTNTSNQVAVLYQDVNCTEVPVAIHADQLTPTWRVYSTGSNVFQTRAGCLIGAEHVNNSYECDIPIGAGICASYQTQTNSPRRARSVASQSIIAYTMSLGAENSVAYSNNSIAIPTNFTISVTTEILPVSMTKTSVDCTMYICGDSTECSNLLLQYGSFCTQLNRALTGIAVEQDKNTQEVFAQVKQIYKTPPIKDFGGFNFSQILPDPSKPSKRSFIEDLLFNKVTLADAGFIKQYGDCLGDIAARDLICAQKFNGLTVLPPLLTDEMIAQYTSALLAGTITSGWTFGAGAALQIPFAMQMAYRFNGIGVTQNVLYENQKLIANQFNSAIGKIQDSLSSTASALGKLQDVVNQNAQALNTLVKCLSSNFGAISSVLNDILSRLDKVEAEVQIDRLITGRLQCLQTYVTQQLIRAAEIRASANLAATKMSECVLGQSKRVDFCGKGYHLMSFPQSAPHGVVFLHVTYVPAQEKNFTTAPAICHDGKAHFPREGVFVSNGTHWFVTQRNFYEPQIITTDNTFVSGNCDVVIGIVNNTVYDPLQPELDS

SEQ ID NO: 3306 - protein, 1147 aa, Artificial Sequence
  SARS-CoV-2/Hong Kong/case85_VM20002868/2020__EPI_ISL_414519 spike protein (1-1147)(Q965C_S1003C)
MFVFLVLVPLVSSQCVNLTTRTQLPPAYTNSFTRGVYYPDKVFRSSVLHSTQDLFLPFFSNVTWFHAIHVSGTNGTKRFDNPVLPFNDGVYFASTEKSNIIRGWIFGTTLDSKTQSLLIVNNATNVVIKVCEFQFCNDPFLGVYYHKNNKSWMESEFRVYSSANNCTFEYVSQPFLMDLEGKQGNFKNLREFVFKNIDGYFKIYSKHTPINLVRDLPQGFSALEPLVDLPIGINITRFQTLLALHRSYLTPGDSSSGWTAGAAAYYVGYLQPRTFLLKYNENGTITDAVDCALDPLSETKCTLKSFTVEKGIYQTSNFRVQPTESIVRFPNITNLCPFGEVFNATRFASVYAWNRKRISNCVADYSVLYNSASFSTFKCYGVSPTKLNDLCFTNVYADSFVIRGDEVRQIAPGQTGKIADYNYKLPDDFTGCVIAWNSNNLDSKVGGNYNYLYRLFRKSNLKPFERDISTEIYQAGSTPCNGVEGFNCYFPLQSYGFQPTNGVGYQPYRVVVLSFELLHAPATVCGPKKSTNLVKNKCVNFNFNGLTGTGVLTESNKKFLPFQQFGRDIADTTDAVRDPQTLEILDITPCSFGGVSVITPGTNTSNQVAVLYQDVNCTEVPVAIHADQLTPTWRVYSTGSNVFQTRAGCLIGAEHVNNSYECDIPIGAGICASYQTQTNSPRRARSVASQSIIAYTMSLGAENSVAYSNNSIAIPTNFTISVTTEILPVSMTKTSVDCTMYICGDSTECSNLLLQYGSFCTQLNRALTGIAVEQDKNTQEVFAQVKQIYKTPPIKDFGGFNFSQILPDPSKPSKRSFIEDLLFNKVTLADAGFIKQYGDCLGDIAARDLICAQKFNGLTVLPPLLTDEMIAQYTSALLAGTITSGWTFGAGAALQIPFAMQMAYRFNGIGVTQNVLYENQKLIANQFNSAIGKIQDSLSSTASALGKLQDVVNQNAQALNTLVKCLSSNFGAISSVLNDILSRLDKVEAEVQIDRLITGRLQCLQTYVTQQLIRAAEIRASANLAATKMSECVLGQSKRVDFCGKGYHLMSFPQSAPHGVVFLHVTYVPAQEKNFTTAPAICHDGKAHFPREGVFVSNGTHWFVTQRNFYEPQIITTDNTFVSGNCDVVIGIVNNTVYDPLQPELDS

SEQ ID NO: 3307 - protein, 1147 aa, Artificial Sequence; identical to SEQ ID NO: 3297
  SARS-CoV-2/England/200990660/2020__EPI_ISL_414523 spike protein (1-1147)(Q965C_S1003C)

SEQ ID NO: 3308 - protein, 1147 aa, Artificial Sequence
  SARS-CoV-2/Australia/NSW09/2020__EPI_ISL_413595 spike protein (1-1147)(Q965C_S1003C)
MFVFLVLLPLVSSQCVNLTTRTQLPPAYTNSFTRGVYYPDKVFRSSVLHSTQDLFLPFFSNVTWFHAIHVSGTNGTKRFDNPVLPFNDGVYFASTEKSNIIRGWIFGTTLDSKTQSLLIVNNATNVVIKVCEFQFCNDPFLGVYYHKNNKSWMESEFRVYSSANNCTFEYVSQPFLMDLEGKQGNFKNLREFVFKNIDGYFKIYSKHTPINLVRDLPQGFSALEPLVDLPIGINITRFQTLLALHRSYLTPGDSSSGWTAGAAAYYVGYLQPRTFLLKYNENGTITDAVDCALDPLSETKCTLKSFTVEKGIYQTSNFRVQPTESIVRFPNITNLCPFGEVFNATRFASVYAWNRKRISNCVADYSVLYNSASFSTFKCYGVSPTKLNDLCFTNVYADSFVIRGDEVRQIAPGQTGKIADYNYKLPDDFTGCVIAWNSNNLDSKVGGNYNYLYRLFRKSNLKPFERDISTEIYQAGSTPCNGVEGFNCYFPLQSYGFQPTNGVGYQPYRVVVLSFELLHAPATVCGPKKSTNLVKNKCVNFNFNGLTGTGVLTESNKKFLPFQQFGRDIADTTDAVRDPQTLEILDITPCSFGGVSVITPGTNTSNQVAVLYQDVNCTEVPVAIHADQLTPTWRVYSTGSNVFQTRAGCLIGAEHVNNSYECDIPIGAGICASYQTQTNSPRRARSVASQSIIAYTMSLGAENSVAYSNNSIAIPTNFTISVTTEILPVSMTKTSVDCTMYICGDSTECSNLLLQYGSFCTQLNRALTGIAVEQDKNTQEVFAQVKQIYKTPPIKDFGGFNFSQILPDPSKPSKRSFIEDLLFNKVTLADAGFIKQYGDCLGDIAARDLICAQKFNGLTVLPPLLTDEMIAQYTSALLAGTITSGWTFGAGAALQIPFAMQMAYRFNGIGVTQNVLYENQKLIANQFNSAIGKIQDSLSFTASALGKLQDVVNQNAQALNTLVKCLSSNFGAISSVLNDILSRLDKVEAEVQIDRLITGRLQCLQTYVTQQLIRAAEIRASANLAATKMSECVLGQSKRVDFCGKGYHLMSFPQSAPHGVVFLHVTYVPAQEKNFTTAPAICHDGKAHFPREGVFVSNGTHWFVTQRNFYEPQIITTDNTFVSGNCDVVIGIVNNTVYDPLQPELDS

SEQ ID NO: 3309 - protein, 1147 aa, Artificial Sequence; identical to SEQ ID NO: 3289
  SARS-CoV-2/Australia/NSW10/2020__EPI_ISL_413596 spike protein (1-1147)(Q965C_S1003C)

SEQ ID NO: 3310 - protein, 1147 aa, Artificial Sequence
  SARS-CoV-2/Switzerland/1000477797/2020__EPI_ISL_413023 spike protein (1-1147)(Q965C_S1003C)
MFVFLVLLPLVSSQCVNLTTRTQLPPAYTNSFTRGVYYPDKVFRSSVLHSTQDLFLPFFSNVTWFHAIHVSGTNGTKRFDNPVLPFNDGVYFASTEKSNIIRGWIFGTTLDSKTQSLLIVNNATNVVIKVCEFQFCNDPFLGVYYHKNNKSWMESEFRVYSSANNCTFEYVSQPFLMDLEGKQGNFKNLREFVFKNIDGYFNIYSKHTPINLVRDLPQGFSALEPLVDLPIGINITRFQTLLALHRSYLTPGDSSSGWTAGAAAYYVGYLQPRTFLLKYNENGTITDAVDCALDPLSETKCTLKSFTVEKGIYQTSNFRVQPTESIVRFPNITNLCPFGEVFNATRFASVYAWNRKRISNCVADYSVLYNSASFSTFKCYGVSPTKLNDLCFTNVYADSFVIRGDEVRQIAPGQTGKIADYNYKLPDDFTGCVIAWNSNNLDSKVGGNYNYLYRLFRKSNLKPFERDISTEIYQAGSTPCNGVEGFNCYFPLQSYGFQPTNGVGYQPYRVVVLSFELLHAPATVCGPKKSTNLVKNKCVNFNFNGLTGTGVLTESNKKFLPFQQFGRDIADTTDAVRDPQTLEILDITPCSFGGVSVITPGTNTSNQVAVLYQGVNCTEVPVAIHADQLTPTWRVYSTGSNVFQTRAGCLIGAEHVNNSYECDIPIGAGICASYQTQTNSPRRARSVASQSIIAYTMSLGAENSVAYSNNSIAIPTNFTISVTTEILPVSMTKTSVDCTMYICGDSTECSNLLLQYGSFCTQLNRALTGIAVEQDKNTQEVFAQVKQIYKTPPIKDFGGFNFSQILPDPSKPSKRSFIEDLLFNKVTLADAGFIKQYGDCLGDIAARDLICAQKFNGLTVLPPLLTDEMIAQYTSALLAGTITSGWTFGAGAALQIPFAMQMAYRFNGIGVTQNVLYENQKLIANQFNSAIGKIQDSLSSTASALGKLQDVVNQNAQALNTLVKCLSSNFGAISSVLNDILSRLDKVEAEVQIDRLITGRLQCLQTYVTQQLIRAAEIRASANLAATKMSECVLGQSKRVDFCGKGYHLMSFPQSAPHGVVFLHVTYVPAQEKNFTTAPAICHDGKAHFPREGVFVSNGTHWFVTQRNFYEPQIITTDNTFVSGNCDVVIGIVNNTVYDPLQPELDS

SEQ ID NO: 3311 - protein, 1147 aa, Artificial Sequence
  SARS-CoV-2/Belgium/BA-02291/2020__EPI_ISL_415159 spike protein (1-1147)(Q965C_S1003C)
MFVFLVLLPLVSSQCVNLTTRTQLPPAYTNSFTRGVYYPDKVFRSSVLHSTQDLFLPFFSNVTWFHAIHVSGTNGTKRFDNPVLPFNDGVYFASTEKSNIIRGWIFGTTLDSKTQSLLIVNNATNVVIKVCEFQFCNDPFLGVYYHKNNKSWMESEFRVYSSANNCTFEYVSQPFLMDLEGKQGNFKNLREFVFKNIDGYFKIYSKHTPINLVRDLPQGFSALEPLVDLPIGINITRFQTLLALHRSYLTPGDSSSGWTAGAAAYYVGYLQPRTFLLKYNENGTITDAVDCALDPLSETKCTLKSFTVEKGIYQTSNFRVQPTESIVRFPNITNLCPFGEVFNATRFASVYAWNRKRISNCVADYSVLYNSASFSTFKCYGVSPTKLNDLCFTNVYADSFVIRGDEVRQIAPGQTGKIADYNYKLPDDFTGCVIAWNSNNLDSKVGGNYNYLYRLFRRSNLKPFERDISTEIYQAGSTPCNGVEGFNCYFPLQSYGFQPTNGVGYQPYRVVVLSFELLPAPATVCGPKKSTNLVKNKCVNFNFNGLTGTGVLTESNKKFLPFQQFGRDIADTTDAVRDPQTLEILDITPCSFGGVSVITPGTNTSNQVAVLYQGVNCTEVPVAIHADQLTPTWRVYSTGSNVFQTRAGCLIGAEHVNNSYECDIPIGAGICASYQTQTNSPRRARSVASQSIIAYTMSLGAENSVAYSNNSIAIPTNFTISVTTEILPVSMTKTSVDCTMYICGDSTECSNLLLQYGSFCTQLNRALTGIAVEQDKNTQEVFAQVKQIYKTPPIKDFGGFNFSQILPDPSKPSKRSFIEDLLFNKVTLADAGFIKQYGDCLGDIAARDLICAQKFNGLTVLPPLLTDEMIAQYTSALLAGTITSGWTFGAGAALQIPFAMQMAYRFNGIGVTQNVLYENQKLIANQFNSAIGKIQDSLSSAAPALGKLQDVVNQNAQALNTLVKCLSSNFGAISSVLNDILSRLDKVEAEVQIDRLITGRLQCLQTYVTQQLIRAAEIRASANLAATKMSECVLGQSKRVDFCGKGYHLMSFPQSAPHGVVFLHVTYVPAQEKNFTTAPAICHDGKAHFPREGVFVSNGTHWFVTQRNFYEPQIITTDNTFVSGNCDVVIGIVNNTVYDPLQPELDS

SEQ ID NO: 3312 - protein, 1147 aa, Artificial Sequence
  SARS-CoV-2/USA/WA8-UW5/2020__EPI_ISL_413486 spike protein (1-1147)(Q965C_S1003C)
MFVFLVLLPLVSSQCVNLTTRTQLPPAYTNSFTRGVYYPDKVFRSSVLHSTQDLFLPFFSNVTWFHAIHVSGTNGTKRFDNPVLPFNDGVYFASTEKSNIIRGWIFGTTLDSKTQSLLIVNNATNVVIKVCEFQFCNDPFLGVYYHKNNKSWMESEFRVYSSANNCTFEYVSQPFLMDLEGKQGNFKNLREFVFKNIDGYFKIYSKHTPINLVRDLPQGFSALEPLVDLPIGINITRFQTLLALHRSYLTPGDSSSGWTAGAAAYYVGYLQPRTFLLKYNENGTITDAVDCALDPLSETKCTLKSFTVEKGIYQTSNFRVQPTESIVRFPNITNLCPFGEVFNATRFASVYAWNRKRISNCVADYSVLYNSASFSTFKCYGVSPTKLNDLCFTNVYADSFVIRGDEVRQIAPGQTGKIADYNYKLPDDFTGCVIAWNSNNLDSKVGGNYNYLYRLFRKSNLKPFERDISTEIYQAGSTPCNGVEGFNCYFPLQSYGFQPTNGVGYQPYRVVVLSFELLHAPATVCGPKKSTNLVKNKCVNFNFNGLTGTGVLTESNKKFLPFQQFGRDIADTTDAVRDPQTLEILDITPCSFGGVSVITPGTNTSNQVAVLYQDVNCTEVPVAIHADQLTPTWRVYSTGSNVFQTRAGCLIGAEYVNNSYECDIPIGAGICASYQTQTNSPRRARSVASQSIIAYTMSLGAENSVAYSNNSIAIPTNFTISVTTEILPVSMTKTSVDCTMYICGDSTECSNLLLQYGSFCTQLNRALTGIAVEQDKNTQEVFAQVKQIYKTPPIKDFGGFNFSQILPDPSKPSKRSFIEDLLFNKVTLADAGFIKQYGDCLGDIAARDLICAQKFNGLTVLPPLLTDEMIAQYTSALLAGTITSGWTFGAGAALQIPFAMQMAYRFNGIGVTQNVLYENQKLIANQFNSAIGKIQDSLSSTASALGKLQDVVNQNAQALNTLVKCLSSNFGAISSVLNDILSRLDKVEAEVQIDRLITGRLQCLQTYVTQQLIRAAEIRASANLAATKMSECVLGQSKRVDFCGKGYHLMSFPQSAPHGVVFLHVTYVPAQEKNFTTAPAICHDGKAHFPREGVFVSNGTHWFVTQRNFYEPQIITTDNTFVSGNCDVVIGIVNNTVYDPLQPELDS

SEQ ID NO: 3313 - protein, 1147 aa, Artificial Sequence
  SARS-CoV-2/England/20102000506/2020__EPI_ISL_415147 spike protein (1-1147)(Q965C_S1003C)
MFVFLVLLPLVSSQCVNLTTRTQLPPAYTNSFTRGVYYPDKVFRSSVLHSTQDLFLPFFSNVTWFHAIHVSGTNGTKRFDNPVLPFNDGVYFASTEKSNIIRGWIFGTTLDSKTQSLLIVNNATNVVIKVCEFQFCNDPFLGVYYHKNNKSWMESEFRVYSSANNCTFEYVSQPFLMDLEGKQGNFKNLREFVFKNIDGYFKIYSKHTPINLVRDLPQGFSALEPLVDLPIGINITRFQTLLALHRSYLTPGDSSSGWTAGAAAYYVGYLQPRTFLLKYNENGTITDAVDCALDPLSETKCTLKSFTVEKGIYQTSNFRVQPTESIVRFPNITNLCPFGEVFNATRFASVYAWNRKRISNCVADYSVLYNSASFSTFKCYGVSPTKLNDLCFTNVYADSFVIRGDEVRQIAPGQTGKIADYNYKLPDDFTGCVIAWNSNNLDSKVGGNYNYLYRLFRKSNLKPFERDISTEIYQAGSTPCNGVEGFNCYFPLQSYGFQPTNGVGYQPYRVVVLSFELLHAPATVCGPKKSTNLVKNKCVNFNFNGLTGTGVLTESNKKFLPFQQFGRDIADTTDAVRDPQTLEILDITPCSFGGVSVITPGTNTSNQVAVLYQGVNCTEVPVAIHADQLTPTWRVYSTGSNVFQTRAGCLIGAEHVNNSYECDIPIGAGICASYQTQTNSPRRARSVASQSIIAYTMSLGAENSVAYSNNSIAIPTNFTISVTTEILPVSMTKTSVDCTMYICGDSTECSNLLLQYGSFCTQLNRALTGIAVEQDKNTQEVFAQVKQIYKTPPIKDFGGFNFSQILPDPSKPSKRSFIEDLLFNKVTLADAGFIKQYGYCLGDIAARDLICAQKFNGLTVLPPLLTDEMIAQYTSALLAGTITSGWTFGAGAALQIPFAMQMAYRFNGIGVTQNVLYENQKLIANQFNSAIGKIQDSLSSTASALGKLQDVVNQNAQALNTLVKCLSSNFGAISSVLNDILSRLDKVEAEVQIDRLITGRLQCLQTYVTQQLIRAAEIRASANLAATKMSECVLGQSKRVDFCGKGYHLMSFPQSAPHGVVFLHVTYVPAQEKNFTTAPAICHDGKAHFPREGVFVSNGTHWFVTQRNFYEPQIITTDNTFVSGNCDVVIGIVNNTVYDPLQPELDS

SEQ ID NO: 3314 - protein, 1147 aa, Artificial Sequence
  SARS-CoV-2/Belgium/VAG-03013/2020__EPI_ISL_415155 spike protein (1-1147)(Q965C_S1003C)
MFVFLVLLPLVSSQCVNLTTRTQLPPAYTNSFTRGVYYPDKVFRSSVLHSTQDLFLPFFSNVTWFHAIHVSGTNGTKRFDNPVLPFNDGVYFASTEKSNIIRGWIFGTTLDSKTQSLLIVNNATNVVIKVCEFQFCNDPFLGVYYHKNNKSWMESEFRVYSSANNCTFEYVSQPFLMDLEGKQGNFKNLREFVFKNIDGYFKIYSKHTPINLVRDLPQGFSALEPLVDLPIGINITRFQTLLALHRSYLTPGDSSSGWTAGAAAYYVGYLQPRTFLLKYNENGTITDAVDCALDPLSETKCTLKSFTVEKGIYQTSNFRVQPTESIVRFPNITNLCPFGEVFNATRFASVYAWNRKRISNCVADYSVLYNSASFSTFKCYGVSPTKLNDLCFTNVYADSFVIRGDEVRQIAPGQTGKIADYNYKLPDDFTGCVIAWNSNNLDSKVGGNYNYLYRLFRKSNLKPFERDISTEIYQAGSTPCNGVEGFNCYFPLQSYGFQPTNGVGYQPYRVVVLSFELLHAPATVCGPKKSTNLVKNKCVNFNFNGLTGTGVLTESNKKFLPFQQFGRDIADTTDAVRDPQTLEILDITPCSFGGVSVITPGTNTSNQVAVLYQGVNCTEVPVAIHADQLTPTWRVYSTGSNVFQTRAGCLIGAEHVNNSYECDIPIGAGICASYQTQTNSPRRARSVASQSIIAYTMSLGAENSVAYSNNSIAIPTNFTISVTTEILPVSMTKTSVDCTMYICGDSTECSNLLLQYGSFCTQLNRALTGIAVEQDKNTQEVFAQVKQIYKTPPIKDFGGFNFSQILPDPSKPSKRSFIEDLLFNKVTLADAGFIKQYGDCLGDIAARDLICAQKFNGLTVLPPLLTDEMIAQYTSALLAGTITSGWTFGAGAALQIPFAMQMAYRFNGIGVTQNVLYENQKLIANQFNSAIGKIQDSLSSTATALGKLQDVVNQNAQALNTLVKCLSSNFGAISSVLNDILSRLDKVEAEVQIDRLITGRLQCLQTYVTQQLIRAAEIRASANLAATKMSECVLGQSKRVDFCGKGYHLMSFPQSAPHGVVFLHVTYVPAQEKNFTTAPAICHDGKAHFPREGVFVSNGTHWFVTQRNFYEPQIITTDNTFVSGNCDVVIGIVNNTVYDPLQPELDS

SEQ ID NO: 3315 - protein, 1147 aa, Artificial Sequence
  SARS-CoV-2/Belgium/BC-03016/2020__EPI_ISL_415157 spike protein (1-1147)(Q965C_S1003C)
MFVFLVLLPLVSSQCVNLTTRTQLPPAYTNSFTRGVYYPDKVFRSSVLHSTQDLFLPFFSNVTWFHAIHVSGTNGTKRFDNPVLPFNDGVYFASTEKSNIIRGWIFGTTLDSKTQSLLIVNNATNVVIKVCEFQFCNDPFLGVYYHKNNKSWMESEFRVYSSANNCTFEYVSQPFLMDLEGKQGNFKNLREFVFKNIDGYFKIYSKHTPINLVRDLPQGFSALEPLVDLPIGINITRFQTLLALHRSYLTPGDSSSGWTAGAAAYYVGYLQPRTFLLKYNENGTITDAVDCALDPLSETKCTLKSFTVEKGIYQTSNFRVQPTESIVRFPNITNLCPFGEVFNATRFASVYAWNRKRISNCVADYSVLYNSASFSTFKCYGVSPTKLNDLCFTNVYADSFVIRGDEVRQIAPGQTGKIADYNYKLPDDFTGCVIAWNSNNLDSKVGGNYNYLYRLFRKSNLKPFERDISTEIYQAGSTPCNGVEGFNCYFPLQSYGFQPTNGVGYQPYRVVVLSFELLHAPATVCGPKKSTNLVKNKCVNFNFNGLTGTGVLTESNKKFLPFQQFGRDIADTTDAVRDPQTLEILDITPCSFGGVSVITPGTNTSNQVAVLYQGVNCTEVPVAIHADQLTPTWRVYSTGSNVFQTRAGCLIGAEHVNNSYECDIPIGAGICASYQTQTNSPRRARSVASQSIIAYTMSLGAENSVAYSNNSIAIPTNFTISVTTEILPVSMTKTSVDCTMYICGDSTECSNLLLQYGSFCTQLNRALTGIAVEQDKNTQEVFAQVKQIYKTPPIKDFGGFNFSQILPDPSKPSKRSFIEDLLFNKVTLADAGFIKQYGDCLGDIAARDLICAQKFNGLTVLPPLLTDEMIAQYTSALLAGTITSGWTFGAGAALQIPFAMQMAYRFNGIGVTQNVLYENQKLIANQFNSAIGKIQDSLSSTAPALGKLQDVVNQNAQALNTLVKCLSSNFGAISSVLNDILSRLDKVEAEVQIDRLITGRLQCLQTYVTQQLIRAAEIRASANLAATKMSECVLGQSKRVDFCGKGYHLMSFPQSAPHGVVFLHVTYVPAQEKNFTTAPAICHDGKAHFPREGVFVSNGTHWFVTQRNFYEPQIITTDNTFVSGNCDVVIGIVNNTVYDPLQPELDS

SEQ ID NO: 3316 - protein, 1147 aa, Artificial Sequence
  SARS-CoV-2/Germany/BavPat3/2020__EPI_ISL_414521 spike protein (1-1147)(Q965C_S1003C)
MFVFLVLLPLVSSQCVNLTTRTQLPPAYTNSFTRGVYYPDKVFRSSVLHSTQDLFLPFFSNVTWFHAIHVSGTNGTKRFDNPVLPFNDGVYFASTEKSNIIRGWIFGTTLDSKTQSLLIVNNATNVVIKVCEFQFCNDPFLGVYYHKNNKSWMESEFRVYSSANNCTFEYVSQPFLMDLEGKQGNFKNLREFVFKNIDGYFKIYSKHTPINLVRDLPQGFSALEPLVDLPIGINITRFQTLLALHRSYLTPGDSSSGWTAGAAAYYVGYLQPRTFLLKYNENGTITDAVDCALDPLSETKCTLKSFTVEKGIYQTSNFRVQPTESIVRFPNITNLCPFGEVFNATRFASVYAWNRKRISNCVADYSVLYNSASFSTFKCYGVSPTKLNDLCFTNVYADSFVIRGDEVRQIAPGQTGKIADYNYKLPDDFTGCVIAWNSNNLDSKVGGNYNYLYRLFRKSNLKPFERDISTEIYQAGSTPCNGVEGFNCYFPLQSYGFQPTNGVGYQPYRVVVLSFELLHAPATVCGPKKSTNLVKNKCVNFNFNGLTGTGVLTESNKKFLPFQQFGRDIADTTDAVRDPQTLEILDITPCSFGGVSVITPGTNTSNQVAVLYQDVNCTEVPVAIHADQLTPTWRVYSTGSNVFQTRAGCLIGAEHVNNSYECDIPIGAGICASYQTQTNSPRRARSVASQSIIAYTMSLGAENSVAYSNNSIAIPTNFTISVTTEILPVSMTKTSVDCTMYICGDSTECSNLLLQYGSFCTQLNRALTGIAVEQDKNTQQVFAQVKQIYKTPPIKDFGGFNFSQILPDPSKPSKRSFIEDLLFNKVTLADAGFIKQYGDCLGDIAARDLICAQKFNGLTVLPPLLTDEMIAQYTSALLAGTITSGWTFGAGAALQIPFAMQMAYRFNGIGVTQNVLYENQKLIANQFNSAIGKIQDSLSSTASALGKLQDVVNQNAQALNTLVKCLSSNFGAISSVLNDILSRLDKVEAEVQIDRLITGRLQCLQTYVTQQLIRAAEIRASANLAATKMSECVLGQSKRVDFCGKGYHLMSFPQSAPHGVVFLHVTYVPAQEKNFTTAPAICHDGKAHFPREGVFVSNGTHWFVTQRNFYEPQIITTDNTFVSGNCDVVIGIVNNTVYDPLQPELDS

SEQ ID NO: 3317 - protein, 1147 aa, Artificial Sequence
  SARS-CoV-2/France/HF1805/2020__EPI_ISL_414628 spike protein (1-1147)(Q965C_S1003C)
MFVFLVLLPLVSSQCVNLTTRTQLPPAYTNSFTRGVYYPDKVFRSSVLHSTQDLFLPFFSNVTWFHAIHVSGTNGTKRFDNPVLPFNDGVYFASTEKSNIIRGWIFGTTLDSKTQSLLIVNNATNVVIKVCEFQFCNDPFLGVYYHKNNKSWMESEFRVYSSANNCTFEYVSQPFLMDLEGKQGNFKNLREFVFKNIDGYFKIYSKHTPINLVRDLPQGFSALEPLVDLPIGINITRFQTLLALHRSYLTPGDSSSGWTAGAAAYYVGYLQPRTFLLKYNENGTITDAVDCALDPLSETKCTLKSFTVEKGIYQTSNFRVQPTESIVRFPNITNLCPFGEVFNATRFASVYAWNRKRISNCVADYSVLYNSASFSTFKCYGVSPTKLNDLCFTNVYADSFVIRGDEVRQIAPGQTGKIADYNYKLPDDFTGCVIAWNSNNLDSKVGGNYNYLYRLFRKSNLKPFERDISTEIYQAGSTPCNGVEGFNCYFPLQSYGFQPTNGVGYQPYRVVVLSFELLHAPATVCGPKKSTNLVKNKCVNFNFNGLTGTGVLTESNKKFLPFQQFGRDIADTTDAVRDPQTLEILDITPCSFGGVSVITPGTNTSNQVAVLYQGVNCTEVPVAIHADQLTPTWRVYSTGSNVFQTRAGCLIGAEHVNNSYECDIPIGAGICASYQTQTNSPRRARSVASQSIIAYTMSLGAENSVAYSNNSIAIPTNFTISVTTEILPVSMTKTSVDCTMYICGDSTECSNLLLQYGSFCTQLNRALTGIAVEQDKNTQEVFAQVKQIYKTPPIKDFGGFNFSQILPDPSKPSKRSFIEDLLFNKVTLADAGFIKQYGDCLGDIAARDLICAQKFNGLTVLPPLLTDEMIAQYTSALLAGTITSGWTFGAGAALQIPFAMQMAYRFNGIGVTQNVLYENQKLIANQFNSAIGKIQDSLSSTASALGKLQDVVNQNAQALNTLVKCLSSNFGAISSVLNDILSRLDKVEAEVQIDRLITGRLQCLQTYVTQQLIRAAEIRASANLAATKMSECVLGQSKRVDFCGKGYHLMSFPQSAPHGVVFLHVTYVPAQEKNFTTAPAICHDGKAHFPREGVFVSNGTHWFVTQRNFYEPQIITTDNTFVSGNCDVVIGVVNNTVYDPLQPELDS

SEQ ID NO: 3318 - protein, 1147 aa, Artificial Sequence
  SARS-CoV-2/Netherlands/ZuidHolland_9/2020__EPI_ISL_414445 spike protein (1-1147)(Q965C_S1003C)
MFVFLVLLPLVSSQCVNLTTRTQLPPAYTNSFTRGVYYPDKVFRSSVLHSTQDLFLPFFSNVTWFHAIHVSGTNGTKRFDNPVLPFNDGVYFASTEKSNIIRGWIFGTTLDSKTQSLLIVNNATNVVIKVCEFQFCNDPFLGVYYHKNNKSWMESEFRVYSSANNCTFEYVSQPFLMDLEGKQGNFKNLREFVFKNIDGYFKIYSKHTPINLVRDLPQGFSALEPLVDLPIGINITRFQTLLALHRSYLTPGDSSSGWTAGAAAYYVGYLQPRTFLLKYNENGTITDAVDCALDPLSETKCTLKSFTVEKGIYQTSNFRVQPTESIVRFPNITNLCPFGEVFNATRFASVYAWNRKRISNCVADYSVLYNSASFSTFKCYGVSPTKLNDLCFTNVYADSFVIRGDEVRQIAPGQTGKIADYNYKLPDDFTGCVIAWNSNNLDSKVGGNYNYLYRLFRKSNLKPFERDISTEIYQAGSTPCNGVEGFNCYFPLQSYGFQPTNGVGYQPYRVVVLSFELLHAPATVCGPKKSTNLVKNKCVNFNFNGLTGTGVLTESNKKFLPFQQFGRDIADTTDAVRDPQTLEILDITPCSFGGVSVITPGTNTSNQVAVLYQGVNCTEVPVAIHADQLTPTWRVYSTGSNVFQTRAGCLIGAEHVNNSYECDIPIGAGICASYQTQTNSPRRARSVASQSIIAYTMSLGAENSVAYSNNSIAIPTNFTISVTTEILPVSMTKTSVDCTMYICGDSTECSNLLLQYGSFCTQLNRALTGIAVEQDKNTQEVFAQVKQIYKTPPIKDFGGFNFSQILPDPSKPSKRSFIEDLLFNKVTLADAGFIKQYGDCLGDIAARDLICVQKFNGLTVLPPLLTDEMIAQYTSALLAGTITSGWTFGAGAALQIPFAMQMAYRFNGIGVTQNVLYENQKLIANQFNSAIGKIQDSLSSTASALGKLQDVVNQNAQALNTLVKCLSSNFGAISSVLNDILSRLDKVEAEVQIDRLITGRLQCLQTYVTQQLIRAAEIRASANLAATKMSECVLGQSKRVDFCGKGYHLMSFPQSAPHGVVFLHVTYVPAQEKNFTTAPAICHDGKAHFPREGVFVSNGTHWFVTQRNFYEPQIITTDNTFVSGNCDVVIGIVNNTVYDPLQPELDS

SEQ ID NO: 3319 - protein, 1147 aa, Artificial Sequence
  SARS-CoV-2/Finland/FIN03032020A/2020__EPI_ISL_413602 spike protein (1-1147)(Q965C_S1003C)
MFVFLVLLPLVSSQCVNLTTRTQLPPAYTNSFTRGVYYPDKVFRSSVLHSTQDLFLPFFSNVTWFHAIHVSGTNGTKRFDNPVLPFNDGVYFASTEKSNIIRGWIFGTTLDSKTQSLLIVNNATNVVIKVCEFQFCNDPFLGVYYHKNNKSWMESEFRVYSSANNCTFEYVSQPFLMDLEGKQGNFKNLREFVFKNIDGYFKIYSKHTPINLVRDLPQGFSALEPLVDLPIGINITRFQTLLALHRSYLTPGDSSSGWTAGAAAYYVGYLQPRTFLLKYNENGTITDAVDCALDPLSETKCTLKSFTVEKGIYQTSNFRVQPTESIVRFPNITNLCPFGEVFNATRFASVYAWNRKRISNCVADYSVLYNSASFSTFKCYGVSPTKLNDLCFTNVYADSFVIRGDEVRQIAPGQTGKIADYNYKLPDDFTGCVISWNSNNLDSKVGGNYNYLYRLFRKSNLKPFERDISTEIYQAGSTPCNGVEGFNCYFPLQSYGFQPTNGVGYQPYRVVVLSFELLHAPATVCGPKKSTNLVKNKCVNFNFNGLTGTGVLTESNKKFLPFQQFGRDIADTTDAVRDPQTLEILDITPCSFGGVSVITPGTNTSNQVAVLYQGVNCTEVPVAIHADQLTPTWRVYSTGSNVFQTRAGCLIGAEHVNNSYECDIPIGAGICASYQTQTNSPRRARSVASQSIIAYTMSLGAENSVAYSNNSIAIPTNFTISVTTEILPVSMTKTSVDCTMYICGDSTECSNLLLQYGSFCTQLNRALTGIAVEQDKNTQEVFAQVKQIYKTPPIKDFGGFNFSQILPDPSKPSKRSFIEDLLFNKVTLADAGFIKQYGDCLGDIAARDLICAQKFNGLTVLPPLLTDEMIAQYTSALLAGTITSGWTFGAGAALQIPFAMQMAYRFNGIGVTQNVLYENQKLIANQFNSAIGKIQDSLSSTASALGKLQDVVNQNAQALNTLVKCLSSNFGAISSVLNDILSRLDKVEAEVQIDRLITGRLQCLQTYVTQQLIRAAEIRASANLAATKMSECVLGQSKRVDFCGKGYHLMSFPQSAPHGVVFLHVTYVPAQEKNFTTAPAICHDGKAHFPREGVFVSNGTHWFVTQRNFYEPQIITTDNTFVSGNCDVVIGIVNNTVYDPLQPELDS

SEQ ID NO: 3320 - protein, 1147 aa, Artificial Sequence
  SARS-CoV-2/France/GE1977/2020__EPI_ISL_414632 spike protein (1-1147)(Q965C_S1003C)
MFVFLVLLPLVSSQCVNLTTRTQLPPAYTNSFTRGVYYPDKVFRSSVLHSTQDLFLPFFSNVTWFHAIHVSGTNGTKRFDNPVLPFNDGVYFASTEKSNIIRGWIFGTTLDSKTQSLLIVNNATNVVIKVCEFQFCNDPFLGVYYHKNNKSWMESEFRVYSSANNCTFEYVSQPFLMDLEGKQGNFKNLREFVFKNIDGYFKIYSKHTPINLVRDLPQGFSALEPLVDLPIGINITRFQTLLALHRSYLTPGDSSSGWTAGAAAYYVGYLQPRTFLLKYNENGTITDAVDCALDPLSETKCTLKSFTVEKGIYQTSNFRVQPTESIVRFPNITNLCPFGEVFNATRFASVYAWNRKRISNCVADYSVLYNSASFSTFKCYGVSPTKLNDLCFTNVYADSFVIRGDEVRQIAPGQTGKIADYNYKLPDDFTGCVIAWNSNNLDSKVGGNYNYLYRLFRKSNLKPFERDISTEIYQAGSTPCNGVEGFNCYFPLQSYGFQPTNGVGYQPYRVVVLSFELLHAPATVCGPKKSTNLVKNKCVNFNFNGLTGTGVLTESNKKFLPFQQFGRDIADTTDAVRDPQTLEILDITPCSFGGVSVITPGTNTSNQVAVLYQGVNCTEVPVAIHADQLTPTWRVYSTGSNVFQTRAGCLIGAEHVNNSYECDIPIGAGICASYQTQTNSPRRARSVASQSIIAYTMSLGAENSVAYSNNSIAIPTNFTISVTTEILPVSMTKTSVDCTMYICGDSTECSNLLLQYGSFCTQLNRALTGIAVEQDKNTQEVFAQVKQIYKTPPIKDFGGFNFSQILPDPSKPSKRSFIEDLLFNKVTLADAGFIKQYGDCLGDIAARDLICAQKFNGLTVLPPLLTDEMIAQYTSALLAGTITSGWTFGAGAALQIPFAMQMAYRFNGIGVTQNVLYENQKLIANQFNSAIGKIQDSLFSTASALGKLQDVVNQNAQALNTLVKCLSSNFGAISSVLNDILSRLDKVEAEVQIDRLITGRLQCLQTYVTQQLIRAAEIRASANLAATKMSECVLGQSKRVDFCGKGYHLMSFPQSAPHGVVFLHVTYVPAQEKNFTTAPAICHDGKAHFPREGVFVSNGTHWFVTQRNFYEPQIITTDNTFVSGNCDVVIGIVNNTVYDPLQPELDS

SEQ ID NO: 3321 - protein, 1147 aa, Artificial Sequence
  SARS-CoV-2/Finland/FIN-313/2020__EPI_ISL_414641 spike protein (1-1147)(Q965C_S1003C)
MFVFLVLLPLVSSQCVNLTTRTQLPPAYTNSFTRGVYYPDKVFRSSVLHSTQDLFLPFFSNVTWFHAIHVSGTNGTKRFDNPVLPFNDGVYFASTEKSNIIRGWIFGTTLDSKTQSLLIVNNATNVVIKVCEFQFCNDPFLGVYYHKNNKSWMESEFRVYSSANNCTFEYVSQPFLMDLEGKQGNFKNLREFVFKNIDGYFKIYSKHTPINLVRDLPQGFSALEPLVDLPIGINITRFKTLLALHRSYLTPGDSSSGWTAGAAAYYVGYLQPRTFLLKYNENGTITDAVDCALDPLSETKCTLKSFTVEKGIYQTSNFRVQPTESIVRFPNITNLCPFGEVFNATRFASVYAWNRKRISNCVADYSVLYNSASFSTFKCYGVSPTKLNDLCFTNVYADSFVIRGDEVRQIAPGQTGKIADYNYKLPDDFTGCVIAWNSNNLDSKVGGNYNYLYRLFRKSNLKPFERDISTEIYQAGSTPCNGVEGFNCYFPLQSYGFQPTNGVGYQPYRVVVLSFELLHAPATVCGPKKSTNLVKNKCVNFNFNGLTGTGVLTESNKKFLPFQQFGRDIADTTDAVRDPQTLEILDITPCSFGGVSVITPGTNTSNQVAVLYQGVNCTEVPVAIHADQLTPTWRVYSTGSNVFQTRAGCLIGAEHVNNSYECDIPIGAGICASYQTQTNSPRRARSVASQSIIAYTMSLGAENSVAYSNNSIAIPTNFTISVTTEILPVSMTKTSVDCTMYICGDSTECSNLLLQYGSFCTQLNRALTGIAVEQDKNTQEVFAQVKQIYKTPPIKDFGGFNFSQILPDPSKPSKRSFIEDLLFNKVTLADAGFIKQYGDCLGDIAARDLICAQKFNGLTVLPPLLTDEMIAQYTSALLAGTITSGWTFGAGAALQIPFAMQMAYRFNGIGVTQNVLYENQKLIANQFNSAIGKIQDSLSSTASALGKLQDVVNQNAQALNTLVKCLSSNFGAISSVLNDILSRLDKVEAEVQIDRLITGRLQCLQTYVTQQLIRAAEIRASANLAATKMSECVLGQSKRVDFCGKGYHLMSFPQSAPHGVVFLHVTYVPAQEKNFTTAPAICHDGKAHFPREGVFVSNGTHWFVTQRNFYEPQIITTDNTFVSGNCDVVIGIVNNTVYDPLQPELDS

SEQ ID NO: 3322 - protein, 1147 aa, Artificial Sequence
  SARS-CoV-2/Netherlands/ZuidHolland_2/2020__EPI_ISL_414556 spike protein (1-1147)(Q965C_S1003C)
MFVFLVLLPLVSSQCVNLTTRTQLPPAYTNSFTRGVYYPDKVFRSSVLHSTQDLFLPFFSNVTWFHAIHVSGTNGTKRFDNPVLPFNDGVYFASTEKSNIIRGWIFGTTLDSKTQSLLIVNNATNVVIKVCEFQFCNDPFLGVYYHKNNKSWMESEFRVYSSANNCTFEYVSQPFLMDLEGKQGNFKNLREFVFKNIDGYFKIYSKHTPINLVRDLPQGFSALEPLVDLPIGINITRFQTLLALHRSYLTPGDSSSGWTAGAAAYYVGYLQPRTFLLKYNENGTITDAVDCALDPLSETKCTLKSFTVEKGIYQTSNFRVQPTESIVRFPNITNLCPFGEVFNATRFASVYAWNRKRISNCVADYSVLYNSASFSTFKCYGVSPTKLNDLCFTNVYADSFVIRGDEVRQIAPGQTGKIADYNYKLPDDFTGCVIAWNSNNLDSKVGGNYNYLYRLFRKSNLKPFERDISTEIYQAGSTPCNGVEGFNCYFPLQSYGFQPTNGVGYQPYRVVVLSFELLHAPATVCGPKKSTNLVKNKCVNFNFNGLTGTGVLTESNKKFLPFQQFGRDIADTTDAVRDPQTLEILDITPCSFGGVSVITPGTNTSNQVAVLYQGVNCTEVPVAIHADQLTPTWRVYSTGSNVFQTRAGCLIGAEHVNNSYECDIPIGAGICASYQTQTNSPRRARSVASQSIIAYTMSLGAENSVAYSNNSIAIPTNFTISVTTEILPVSMTKTSVDCTMYICGDSTECSNLLLQYGSFCTQLNRALTGIALEQDKNTQEVFAQVKQIYKTPPIKDFGGFNFSQILPDPSKPSKRSFIEDLLFNKVTLADAGFIKQYGDCLGDIAARDLICAQKFNGLTVLPPLLTDEMIAQYTSALLAGTITSGWTFGAGAALQIPFAMQMAYRFNGIGVTQNVLYENQKLIANQFNSAIGKIQDSLSSTASALGKLQDVVNQNAQALNTLVKCLSSNFGAISSVLNDILSRLDKVEAEVQIDRLITGRLQCLQTYVTQQLIRAAEIRASANLAATKMSECVLGQSKRVDFCGKGYHLMSFPQSAPHGVVFLHVTYVPAQEKNFTTAPAICHDGKAHFPREGVFVSNGTHWFVTQRNFYEPQIITTDNTFVSGNCDVVIGIVNNTVYDPLQPELDS

SEQ ID NO: 3323 - protein, 1147 aa, Artificial Sequence
  SARS-CoV-2/USA/WA-UW31/2020__EPI_ISL_414618 spike protein (1-1147)(Q965C_S1003C)
MFVFLVLLPLVSSQCVNLTTRTQLPPAYTNSFTRGVYYPDKVFRSSVLHSTQDLFLPFFSNVTWFHAIHVSGTNGTKRFDNPVLPFNDGVYFASTEKSNIIRGWIFGTTLDSKTQSLLIVNNATNVVIKVCEFQFCNDPFLGVYYHKNNKSWMESEFRVYSSANNCTFEYVSQPFLMDLEGKQGNFKNLREFVFKNIDGYFKIYSKHTPINLVRDLPQGFSALEPLVDLPIGINITRFQTLLALHRSYLTPGDSSSGWTAGAAAYYVGYLQPRTFLLKYNENGTITDAVDCALDPLSETKCTLKSFTVEKGIYQTSNFRVQPTESIVRFPNITNLCPFGEVFNATRFASVYAWNRKRISNCVADYSVLYNSASFSTFKCYGVSPTKLNDLCFTNVYADSFVIRGDEVRQIAPGQTGKIADYNYKLPDDFTGCVIAWNSNNLDSKVGGNYNYLYRLFRKSNLKPFERDISTEIYQAGSTPCNGAEGFNCYFPLQSYGFQPTNGVGYQPYRVVVLSFELLHAPATVCGPKKSTNLVKNKCVNFNFNGLTGTGVLTESNKKFLPFQQFGRDIADTTDAVRDPQTLEILDITPCSFGGVSVITPGTNTSNQVAVLYQDVNCTEVPVAIHADQLTPTWRVYSTGSNVFQTRAGCLIGAEHVNNSYECDIPIGAGICASYQTQTNSPRRARSVASQSIIAYTMSLGAENSVAYSNNSIAIPTNFTISVTTEILPVSMTKTSVDCTMYICGDSTECSNLLLQYGSFCTQLNRALTGIAVEQDKNTQEVFAQVKQIYKTPPIKDFGGFNFSQILPDPSKPSKRSFIEDLLFNKVTLADAGFIKQYGDCLGDIAARDLICAQKFNGLTVLPPLLTDEMIAQYTSALLAGTITSGWTFGAGAALQIPFAMQMAYRFNGIGVTQNVLYENQKLIANQFNSAIGKIQDSLSSTASALGKLQDVVNQNAQALNTLVKCLSSNFGAISSVLNDILSRLDKVEAEVQIDRLITGRLQCLQTYVTQQLIRAAEIRASANLAATKMSECVLGQSKRVDFCGKGYHLMSFPQSAPHGVVFLHVTYVPAQEKNFTTAPAICHDGKAHFPREGVFVSNGTHWFVTQRNFYEPQIITTDNTFVSGNCDVVIGIVNNTVYDPLQPELDS

SEQ ID NO: 3324 - protein, 1147 aa, Artificial Sequence
  SARS-CoV-2/South Korea/SNU01/2020__EPI_ISL_411929 spike protein (1-1147)(Q965C_S1003C)
MFVFLVLLPLVSSQCVNLTTRTQLPPAYTNSFTRGVYYPDKVFRSSVLHSTQDLFLPFFSNVTWFHAIHVSGTNGTKRFDNPVLPFNDGVYFASTEKSNIIRGWIFGTTLDSKTQSLLIVNNATNVVIKVCEFQFCNDPFLGVYYHKNNKSWMESEFRVYSSANNCTFEYVSQPFLMDLEGKQGNFKNLREFVFKNIDGYFKIYSKHTPINLVRDLPQGFWALEPLVDLPIGINITRFQTLLALHRSYLTPGDSSSGWTAGAAAYYVGYLQPRTFLLKYNENGTITDAVDCALDPLSETKCTLKSFTVEKGIYQTSNFRVQPTESIVRFPNITNLCPFGEVFNATRFASVYAWNRKRISNCVADYSVLYNSASFSTFKCYGVSPTKLNDLCFTNVYADSFVIRGDEVRQIAPGQTGKIADYNYKLPDDFTGCVIAWNSNNLDSKVGGNYNYLYRLFRKSNLKPFERDISTEIYQAGSTPCNGVEGFNCYFPLQSYGFQPTNGVGYQPYRVVVLSFELLHAPATVCGPKKSTNLVKNKCVNFNFNGLTGTGVLTESNKKFLPFQQFGRDIADTTDAVRDPQTLEILDITPCSFGGVSVITPGTNTSNQVAVLYQDVNCTEVPVAIHADQLTPTWRVYSTGSNVFQTRAGCLIGAEHVNNSYECDIPIGAGICASYQTQTNSPRRARSVASQSIIAYTMSLGAENSVAYSNNSIAIPTNFTISVTTEILPVSMTKTSVDCTMYICGDSTECSNLLLQYGSFCTQLNRALTGIAVEQDKNTQEVFAQVKQIYKTPPIKDFGGFNFSQILPDPSKPSKRSFIEDLLFNKVTLADAGFIKQYGDCLGDIAARDLICAQKFNGLTVLPPLLTDEMIAQYTSALLAGTITSGWTFGAGAALQIPFAMQMAYRFNGIGVTQNVLYENQKLIANQFNSAIGKIQDSLSSTASALGKLQDVVNQNAQALNTLVKCLSSNFGAISSVLNDILSRLDKVEAEVQIDRLITGRLQCLQTYVTQQLIRAAEIRASANLAATKMSECVLGQSKRVDFCGKGYHLMSFPQSAPHGVVFLHVTYVPAQEKNFTTAPAICHDGKAHFPREGVFVSNGTHWFVTQRNFYEPQIITTDNTFVSGNCDVVIGIVNNTVYDPLQPELDS

SEQ ID NO: 3325 - protein, 1147 aa, Artificial Sequence
  SARS-CoV-2/China/WF0004/2020__EPI_ISL_413694 spike protein (1-1147)(Q965C_S1003C)
MFVFLVLLPLVSSQCVNLTTRTQLPPAYTNSFTRGVYYPDKVFRSSVLHSTQDLFLPFFSNVTWFHAIHVSGTNGTKRFDNPVLPFNDGVYFASTEKSNIIRGWIFGTTLDSKTQSLLIVNNATNVVIKVCEFQFCNDPFLGVYYHKNNKSWTESEFRVYSSANNCTFEYVSQPFLMDLEGKQGNFKNLREFVFKNIDGYFKIYSKHTPINLVRDLPQGFSALEPLVDLPIGINITRFQTLLALHRSYLTPGDSSSGWTAGAAAYYVGYLQPRTFLLKYNENGTITDAVDCALDPLSETKCTLKSFTVEKGIYQTSNFRVQPTESIVRFPNITNLCPFGEVFNATRFASVYAWNRKRISNCVADYSVLYNSASFSTFKCYGVSPTKLNDLCFTNVYADSFVIRGDEVRQIAPGQTGKIADYNYKLPDDFTGCVIAWNSNNLDSKVGGNYNYLYRLFRKSNLKPFERDISTEIYQAGSTPCNGVEGFNCYFPLQSYGFQPTNGVGYQPYRVVVLSFELLHAPATVCGPKKSTNLVKNKCVNFNFNGLTGTGVLTESNKKFLPFQQFGRDIADTTDAVRDPQTLEILDITPCSFGGVSVITPGTNTSNQVAVLYQDVNCTEVPVAIHADQLTPTWRVYSTGSNVFQTRAGCLIGAEHVNNSYECDIPIGAGICASYQTQTNSPRRARSVASQSIIAYTMSLGAENSVAYSNNSIAIPTNFTISVTTEILPVSMTKTSVDCTMYICGDSTECSNLLLQYGSFCTQLNRALTGIAVEQDKNTQEVFAQVKQIYKTPPIKDFGGFNFSQILPDPSKPSKRSFIEDLLFNKVTLADAGFIKQYGDCLGDIAARDLICAQKFNGLTVLPPLLTDEMIAQYTSALLAGTITSGWTFGAGAALQIPFAMQMAYRFNGIGVTQNVLYENQKLIANQFNSAIGKIQDSLSSTASALGKLQDVVNQNAQALNTLVKCLSSNFGAISSVLNDILSRLDKVEAEVQIDRLITGRLQCLQTYVTQQLIRAAEIRASANLAATKMSECVLGQSKRFDFCGKGYHLMSFPQSAPHGVVFLHVTYVPAQEKNFTTAPAICHDGKAHFPREGVFVSNGTHWFVTQRNFYEPQIITTDNTFVSGNCDVVIGIVNNTVYDPLQPELDS

SEQ ID NO: 3326 - protein, 1147 aa, Artificial Sequence
  SARS-CoV-2/China/WF0028/2020__EPI_ISL_413791 spike protein (1-1147)(Q965C_S1003C)
MFVFLVLLPLVSSQCVNLTTRTQLPPAYTNSFTRGVYYPDKVFRSSVLHSTQDLFLPFFSNVTWFHAIHVSGTNGTKRFDNPVLPFNDGVYFASTEKSNIIRGWIFGTTLDSKTQSLLIVNNATNVVIKVCEFQFCNDPFLGVYYHKNNKSWMESEFRVYSSANNCTFEYVSQPFLMDLEGKQGNFKNLREFVFKNIDGYFKIYSKHTPINLVRDLPQGFSALEPLVDLPIGINITRFQTLLALHRSYLTPGDSSSGWTAGAAAYYVGYLQPRTFLLKYNENGTITDAVDCALDPLSETKCTLKSFTVEKGIYQTSNFRVQPTESIVRFPNITNLCPFGEVFNATRFASVYAWNRKRISNCVADYSVLYNSASFSTFKCYGVSPTKLNDLCFTNVYADSFVIRGDEVRQIAPGQTGKIADYNYKLPDDFTGCVIAWNSNNLDSKVGGNYNYLYRLFRKSNLKPFERDISTEIYQAGSTPCNGVEGFNCYFPLQSYGFQPTNGVGYQPYRVVVLSFELLHAPATVCGPKKSTNLVKNKCVNFNFNGLTGTGVLTESNKKFLPFQQFGRDIADTTDAVRDPQTLEILDITPCSFGGVSVITPGTNTSNQVAVLYQDVNCTEVPVAIHADQLTPTWRVYSTGSNVFQTRAGCLIGAEHVNNSYECDIPIGAGICASYQTQTNSPRRARSVASQSIIAYTMSLGAENSVAYSNNSIAIPTNFTISVTTEILPVSMTKTSVDCTMYICGDSTECSNLLLQYGSFCTQLNRALTGIAVEQDKNTQEVFAQVKQIYKTPPIKDFGGFNFSQILPDPSKPSKRSFIEDLLFNKVTLADAGFIKQYGDCLGDIAARDLICAQKFNGLTVLPPLLTDEMIAQYTSALLAGTITSGWTFGAGAALQIPFAMQMAYRFNGIGVTQNVLYENQKLIANQFNSAIGKIQDSLSSTASALGKLQDVVNQNAQALNTLVKCLSSNFGAISSVLNDILSRLDKVEAEVQIDRLITGRLQCLQTYVTQQLIRAAEIRASANLAATKMSECVLGQSKRVDFCGKGYHLMSFPQSAPHGVVFLHVTYVPAQEKNFTTAPAICHDGKAHFPREGVFVSNGTHWFVTQRNFYEPQIITTDNTFVSGNCDVVIGIVNNTVYDPLQPELES

SEQ ID NO: 3327 - protein, 1147 aa, Artificial Sequence
  SARS-CoV-2/2019-nCoV/USA-CruiseA-18/2020__MT159716.1 spike protein (1-1147)(Q965C_S1003C)
MFVFLVLLPLVSSQCVNLTTRTQLPPAYTNSFTRGVYYPDKVFRSSVLHSTQDLFLPFFSNVTWFHAIHVSGTNGTKRFDNPVLPFNDGVYFASTEKSNIIRGWIFGTTLDSKTQSLLIVNNATNVVIKVCEFQFCNDPFLGVYYHKNNKSWMESELRVYSSANNCTFEYVSQPFLMDLEGKQGNFKNLREFVFKNIDGYFKIYSKHTPINLVRDLPQGFSALEPLVDLPIGINITRFQTLLALHRSYLTPGDSSSGWTAGAAAYYVGYLQPRTFLLKYNENGTITDAVDCALDPLSETKCTLKSFTVEKGIYQTSNFRVQPTESIVRFPNITNLCPFGEVFNATRFASVYAWNRKRISNCVADYSVLYNSASFSTFKCYGVSPTKLNDLCFTNVYADSFVIRGDEVRQIAPGQTGKIADYNYKLPDDFTGCVIAWNSNNLDSKVGGNYNYLYRLFRKSNLKPFERDISTEIYQAGSTPCNGVEGFNCYFPLQSYGFQPTNGVGYQPYRVVVLSFELLHAPATVCGPKKSTNLVKNKCVNFNFNGLTGTGVLTESNKKFLPFQQFGRDIADTTDAVRDPQTLEILDITPCSFGGVSVITPGTNTSNQVAVLYQDVNCTEVPVAIHADQLTPTWRVYSTGSNVFQTRAGCLIGAEHVNNSYECDIPIGAGICASYQTQTNSPRRARSVASQSIIAYTMSLGAENSVAYSNNSIAIPTNFTISVTTEILPVSMTKTSVDCTMYICGDSTECSNLLLQYGSFCTQLNRALTGIAVEQDKNTQEVFAQVKQIYKTPPIKDFGGFNFSQILPDPSKPSKRSFIEDLLFNKVTLADAGFIKQYGDCLGDIAARDLICAQKFNGLTVLPPLLTDEMIAQYTSALLAGTITSGWTFGAGAALQIPFAMQMAYRFNGIGVTQNVLYENQKLIANQFNSAIGKIQDSLSSTASALGKLQDVVNQNAQALNTLVKCLSSNFGAISSVLNDILSRLDKVEAEVQIDRLITGRLQCLQTYVTQQLIRAAEIRASANLAATKMSECVLGQSKRVDFCGKGYHLMSFPQSAPHGVVFLHVTYVPAQEKNFTTAPAICHDGKAHFPREGVFVSNGTHWFVTQRNFYEPQIITTDNTFVSGNCDVVIGIVNNTVYDPLQPELDS

SEQ ID NO: 3328 - protein, 1147 aa, Artificial Sequence
  SARS-CoV-2/SARS-CoV-2/Yunnan-01/human/2020/CHN__MT049951.1 spike protein (1-1147)(Q965C_S1003C)
MFVFLVLLPLVSSQCVNLTTRTQLPPANTNSFTRGVYYPDKVFRSSVLHSTQDLFLPFFSNVTWFHAIHVSGTNGTKRFDNPVLPFNDGVYFASTEKSNIIRGWIFGTTLDSKTQSLLIVNNATNVVIKVCEFQFCNDPFLGVYYHKNNKSWMESEFRVYSSANNCTFEYVSQPFLMDLEGKQGNFKNLREFVFKNIDGYFKIYSKHTPINLVRDLPQGFSALEPLVDLPIGINITRFQTLLALHRSYLTPGDSSSGWTAGAAAYYVGYLQPRTFLLKYNENGTITDAVDCALDPLSETKCTLKSFTVEKGIYQTSNFRVQPTESIVRFPNITNLCPFGEVFNATRFASVYAWNRKRISNCVADYSVLYNSASFSTFKCYGVSPTKLNDLCFTNVYADSFVIRGDEVRQIAPGQTGKIADYNYKLPDDFTGCVIAWNSNNLDSKVGGNYNYLYRLFRKSNLKPFERDISTEIYQAGSTPCNGVEGFNCYFPLQSYGFQPTNGVGYQPYRVVVLSFELLHAPATVCGPKKSTNLVKNKCVNFNFNGLTGTGVLTESNKKFLPFQQFGRDIADTTDAVRDPQTLEILDITPCSFGGVSVITPGTNTSNQVAVLYQDVNCTEVPVAIHADQLTPTWRVYSTGSNVFQTRAGCLIGAEHVNNSYECDIPIGAGICASYQTQTNSPRRARSVASQSIIAYTMSLGAENSVAYSNNSIAIPTNFTISVTTEILPVSMTKTSVDCTMYICGDSTECSNLLLQYGSFCTQLNRALTGIAVEQDKNTQEVFAQVKQIYKTPPIKDFGGFNFSQILPDPSKPSKRSFIEDLLFNKVTLADAGFIKQYGDCLGDIAARDLICAQKFNGLTVLPPLLTDEMIAQYTSALLAGTITSGWTFGAGAALQIPFAMQMAYRFNGIGVTQNVLYENQKLIANQFNSAIGKIQDSLSSTASALGKLQDVVNQNAQALNTLVKCLSSNFGAISSVLNDILSRLDKVEAEVQIDRLITGRLQCLQTYVTQQLIRAAEIRASANLAATKMSECVLGQSKRVDFCGKGYHLMSFPQSAPHGVVFLHVTYVPAQEKNFTTAPAICHDGKAHFPREGVFVSNGTHWFVTQRNFYEPQIITTDNTFVSGNCDVVIGIVNNTVYDPLQPELDS

SEQ ID NO: 3329 - protein, 1147 aa, Artificial Sequence
  SARS-CoV-2/USA/WA-UW292/2020__EPI_ISL_418077 spike protein (1-1147)(Q965C_S1003C)
MFVFLVLLPLVSSQCVNLTTRTQLPPAYTNSFTRGVYYPDKVFRSSVLHSTQDLFLPFFSNVTWFHAIHVSGTNGTKRFDNPVLPFNDGVYFASTEKSNIIRGWIFGTTLDSKTQSLLIVNNATNVVIKVCEFQFCNDPFLGVYYHKNNKSWMESEFRVYSSANNCTFEYVSQPFLMDLEGKQGNFKNLREFVFKNIDGYFKIYSKHTPINLVRDLPQGFSALEPLVDLPIGINITRFQTLLALHRSYLTPGDSSSGWTAGAAAYYVGYLQPRTFLLKYNENGTITDAVDCALDPLSETKCTLKSFTVEKGIYQTSNFRVQPTESIVRFPNITNLCPFGEVFNATRFASVYAWNRKRISNCVADYSVLYNSASFSTFKCYGVSPTKLNDLCFTNVYADSFVIRGDEVRQIAPGQTGKIADYNYKLPDDFTGCVIAWNSNNLDSKVGGNYNYLYRLFRKSNLKPFERDISTEIYQASSTPCNGVEGFNCYFPLQSYGFQPTNGVGYQPYRVVVLSFELLHAPATVCGPKKSTNLVKNKCVNFNFNGLTGTGVLTESNKKFLPFQQFGRDIADTTDAVRDPQTLEILDITPCSFGGVSVITPGTNTSNQVAVLYQDVNCTEVPVAIHADQLTPTWRVYSTGSNVFQTRAGCLIGAEHVNNSYECDIPIGAGICASYQTQTNSPRRARSVASQSIIAYTMSLGAENSVAYSNNSIAIPTNFTISVTTEILPVSMTKTSVDCTMYICGDSTECSNLLLQYGSFCTQLNRALTGIAVEQDKNTQEVFAQVKQIYKTPPIKDFGGFNFSQILPDPSKPSKRSFIEDLLFNKVTLADAGFIKQYGDCLGDIAARDLICAQKFNGLTVLPPLLTDEMIAQYTSALLAGTITSGWTFGAGAALQIPFAMQMAYRFNGIGVTQNVLYENQKLIANQFNSAIGKIQDSLSSTASALGKLQDVVNQNAQALNTLVKCLSSNFGAISSVLNDILSRLDKVEAEVQIDRLITGRLQCLQTYVTQQLIRAAEIRASANLAATKMSECVLGQSKRVDFCGKGYHLMSFPQSAPHGVVFLHVTYVPAQEKNFTTAPAICHDGKAHFPREGVFVSNGTHWFVTQRNFYEPQIITTDNTFVSGNCDVVIGIVNNTVYDPLQPELDS

SEQ ID NO: 3330 - protein, 1147 aa, Artificial Sequence
  SARS-CoV-2/Iceland/192/2020__EPI_ISL_417819 spike protein (1-1147)(Q965C_S1003C)
MFVFFVLLPLVSSQCVNLTTRTQLPPAYTNSFTRGVYYPDKVFRSSVLHSTQDLFLPFFSNVTWFHAIHVSGTNGTKRFDNPVLPFNDGVYFASTEKSNIIRGWIFGTTLDSKTQSLLIVNNATNVVIKVCEFQFCNDPFLGVYYHKNNKSWMESEFRVYSSANNCTFEYVSQPFLMDLEGKQGNFKNLREFVFKNIDGYFKIYSKHTPINLVRDLPQGFSALEPLVDLPIGINITRFQTLLALHRSYLTPGDSSSGWTAGAAAYYVGYLQPRTFLLKYNENGTITDAVDCALDPLSETKCTLKSFTVEKGIYQTSNFRVQPTESIVRFPNITNLCPFGEVFNATRFASVYAWNRKRISNCVADYSVLYNSASFSTFKCYGVSPTKLNDLCFTNVYADSFVIRGDEVRQIAPGQTGKIADYNYKLPDDFTGCVIAWNSNNLDSKVGGNYNYLYRLFRKSNLKPFERDISTEIYQAGSTPCNGVEGFNCYFPLQSYGFQPTNGVGYQPYRVVVLSFELLHAPATVCGPKKSTNLVKNKCVNFNFNGLTGTGVLTESNKKFLPFQQFGRDIADTTDAVRDPQTLEILDITPCSFGGVSVITPGTNTSNQVAVLYQGVNCTEVPVAIHADQLTPTWRVYSTGSNVFQTRAGCLIGAEHVNNSYECDIPIGAGICASYQTQTNSPRRARSVASQSIIAYTMSLGAENSVAYSNNSIAIPTNFTISVTTEILPVSMTKTSVDCTMYICGDSTECSNLLLQYGSFCTQLNRALTGIAVEQDKNTQEVFAQVKQIYKTPPIKDFGGFNFSQILPDPSKPSKRSFIEDLLFNKVTLADAGFIKQYGDCLGDIAARDLICAQKFNGLTVLPPLLTDEMIAQYTSALLAGTITSGWTFGAGAALQIPFAMQMAYRFNGIGVTQNVLYENQKLIANQFNSAIGKIQDSLSSTASALGKLQDVVNQNAQALNTLVKCLSSNFGAISSVLNDILSRLDKVEAEVQIDRLITGRLQCLQTYVTQQLIRAAEIRASANLAATKMSECVLGQSKRVDFCGKGYHLMSFPQSAPHGVVFLHVTYVPAQEKNFTTAPAICHDGKAHFPREGVFVSNGTHWFVTQRNFYEPQIITTDNTFVSGNCDVVIGIVNNTVYDPLQPELDS

SEQ ID NO: 3331 - protein, 1147 aa, Artificial Sequence
  SARS-CoV-2/Belgium/ULG-6939/2020__EPI_ISL_417020 spike protein (1-1147)(Q965C_S1003C)
MFVFLVLLPLVSSQCVNLTTRTQLPPAYTNSFTRGVYYPDKVFRSSVLHSTQDLFLPFFSNVTWFHAIHVSGTNGTKRFDNPVLPFNDGVYFASTEKSNIIRGWIFGTTLDSKTQSLLIVNNATNVVIKVCEFQFCNDPFLGVYYHKNNKSWMESEFRVYSSANNCTFEYVSQPFLMDLEGKQGNFKNLREFVFKNIDGYFKIYSKHTPINLVRDLPQGFSALEPLVDLPIGINITRFQTLLALHRSYLTPGDSSSGWTAGAAAYYVGYLQPRTFLLKYNENGTITDAVDCALDPLSETKCTLKSFTVEKGIYQTSNFRVQPTESIVRFPNITNLCPFGEVFNATRFASVYAWNRKRISNCVADYSVLYNSASFSTFKCYGVSPTKLNDLCFTNVYADSFVIRGDEVRQIAPGQTGKIADYNYKLPDDFTGCVIAWNSNNLDSKVGGNYNYLYRLFRKSNLKPFERDISTEIYQAGSTPCNGVEGFNCYFPLQSYGFQPTNGVGYQPYRVVVLSFELLHAPATVCGPKKSTNLVKNKCVNFNFNGLTGTGVLTESNKKFLPFQQFGRDIADTTDAVRDPQTLEILDITPCSFGGVSVITPGTNTSNQVAVLYQGVNCTEVPVAIHADQLTPTWRVYSTGSNVFQTRAGCLIGAEHVNNSYECDIPIGAGICASYQTQTNSPRRARSVASQSIIAYTMSLGAENSVVYSNNSIAIPTNFTISVTTEILPVSMTKTSVDCTMYICGDSTECSNLLLQYGSFCTQLNRALTGIAVEQDKNTQEVFAQVKQIYKTPPIKDFGGFNFSQILPDPSKPSKRSFIEDLLFNKVTLADAGFIKQYGDCLGDIAARDLICAQKFNGLTVLPPLLTDEMIAQYTSALLAGTITSGWTFGAGAALQIPFAMQMAYRFNGIGVTQNVLYENQKLIANQFNSAIGKIQDSLSSTASALGKLQDVVNQNAQALNTLVKCLSSNFGAISSVLNDILSRLDKVEAEVQIDRLITGRLQCLQTYVTQQLIRAAEIRASANLAATKMSECVLGQSKRVDFCGKGYHLMSFPQSAPHGVVFLHVTYVPAQEKNFTTAPAICHDGKAHFPREGVFVSNGTHWFVTQRNFYEPQIITTDNTFVSGNCDVVIGIVNNTVYDPLQPELDS

SEQ ID NO: 3332 - protein, 1147 aa, Artificial Sequence
  SARS-CoV-2/France/HF2496/2020__EPI_ISL_418231 spike protein (1-1147)(Q965C_S1003C)
MFVFLVLLPLVSSQCVNLTTRTQLPPAYTNSFTRGVYYPDKVFRSSVLHSTQDLFLPFFSNVTWFHAIHVSGTNGTKRFDNPVLPFNDGVYFASTEKSNIIRGWIFGTTLDSKTQSLLIVNNATNVVIKVCEFQFCNDPFLGVYYHKNNKSWMESEFRVYSSANNCTFEYVSQPFLMDLEGKQGNFKNLREFVFKNIDGYFKIYSKHTPINLVRDLPQGFSALEPLVDLPIGINITRFQTLLALHRSYLTPGDSSSGWTAGAAAYYVGYLQPRTFLLKYNENGTITDAVDCALDPLSETKCTLKSFTVEKGIYQTSNFRVQPTESIVRFPNITNLCPFGEVFNATRFASVYAWNRKRISNCVADYSVLYNSASFSTFKCYGVSPTKLNDLCFTNVYADSFVIRGDEVRQIAPGQTGKIADYNYKLPDDFTGCVIAWNSNNLDSKVGGNYNYLYRLFRKSNLKPFERDISTEIYQAGSTPCNGVEGFNCYFPLQSYGFQPTNGVGYQPYRVVVLSFELLHAPATVCGPKKSTNLVKNKCVNFNFNGLTGTGVLTESNKKFLPFQQFGRDIADTTDAVRDPQTLEILDITPCSFGGVSVITPGTNTSNQVAVLYQGVNCTEVPVAIHADQLTPTWRVYSTGSNVFQTRAGCLIGAEHVNNSYECDIPIGAGICASYQTQTNSPRRARSVASQSIIAYTMSLGAENSVAYSNNSIAIPTNFTISVTTEILPVSMTKTSVDCTMYICGDSTECSNLLLQYGSFCTQLNRALTGIAVEQDKNTQEVFAQVKQIYKTPPIKDFGGFNFSQILPDPSKPSKRSFIEDLLFNKVTLADAGFIKQYGDCLGDIVARDLICAQKFNGLTVLPPLLTDEMIAQYTSALLAGTITSGWTFGAGAALQIPFAMQMAYRFNGIGVTQNVLYENQKLIANQFNSAIGKIQDSLSSTASALGKLQDVVNQNAQALNTLVKCLSSNFGAISSVLNDILSRLDKVEAEVQIDRLITGRLQCLQTYVTQQLIRAAEIRASANLAATKMSECVLGQSKRVDFCGKGYHLMSFPQSAPHGVVFLHVTYVPAQEKNFTTAPAICHDGKAHFPREGVFVSNGTHWFVTQRNFYEPQIITTDNTFVSGNCDVVIGIVNNTVYDPLQPELDS

SEQ ID NO: 3333 - protein, 1147 aa, Artificial Sequence
  SARS-CoV-2/USA/WA-UW291/2020__EPI_ISL_418076 spike protein (1-1147)(Q965C_S1003C)
MFVFLVLLPLVSSQCVNLTTRTQLPPAYTNSFTRGVYYPDKVFRSSVLHSTQDLFLPFFSNVTWFHAIHVSGTNGTKRFDNPVLPFNDGVYFASTEKSNIIRGWIFGTTLDSKTQSLLIVNNATNVVIKVCEFQFCNDPFLGVYYHKNNKSWMESEFRVYSSANNCTFEYVSQPFLMDLEGKQGNFKNLREFVFKNIDGYFKIYSKHTPINLVRDLPQGFSALEPLVDLPIGINITRFQTLLALHRSYLTPGDSSSGWTAGAAAYYVGYLQPRTFLLKYNENGTITDAVDCALDPLSETKCTLKSFTVEKGIYQTSNFRVQPTESIVRFPNITNLCPFGEVFNATRFASVYAWNRKRISNCVADYSVLYNSASFSTFKCYGVSPTKLNDLCFTNVYADSFVIRGDEVRQIAPGQTGKIADYNYKLPDDFTGCVIAWNSNNLDSKVGGNYNYLYRLFRKSNLKPFERDISTEIYQAGSTPCNGVEGFNCYFPLQSYGFQPTNGVGYQPYRVVVLSFELLHAPATVCGPKKSTNLVKNKCVNFNFNGLTGTGVLTESNKKFLPFQQFGRDIADTTDAVRDPQTLEILDITPCSFGGVSVITPGTNTSNQVAVLYQGVNCTEVPVAIHADQLTPTWRVYSTGSNVFQTRAGCLIGAEHVNNSYECDIPIGAGICASYQTQTNSPRRARSVASQSIIAYTMSLGAENSVAYSNNSIAIPTNFTISVTTEILPVSMTKTSVDCTMYICGDSTECSNLLLQYGSFCTQLNRALTGIAVEQDKNTQEVFAQVKQIYKTPPIKDFGGFNFSQILPDPSKPSKRSFIEDLLFNKVTLADAGFIKQYGDCLGDIAARDLICAQKFNGLTVLPPLLTDEMIAQYTSALLAGTITSGWTFGAGAALQIPFAMQMAYRFNGIGVTQNVLYENQKLIANQFNSAIGKIQYSLSSTASALGKLQDVVNQNAQALNTLVKCLSSNFGAISSVLNDILSRLDKVEAEVQIDRLITGRLQCLQTYVTQQLIRAAEIRASANLAATKMSECVLGQSKRVDFCGKGYHLMSFPQSAPHGVVFLHVTYVPAQEKNFTTAPAICHDGKAHFPREGVFVSNGTHWFVTQRNFYEPQIITTDNTFVSGNCDVVIGIVNNTVYDPLQPELDS

SEQ ID NO: 3334 - protein, 1147 aa, Artificial Sequence; identical to SEQ ID NO: 3297
  SARS-CoV-2/Portugal/PT0034/2020__EPI_ISL_418019 spike protein (1-1147)(Q965C_S1003C)

SEQ ID NO: 3335 - protein, 1147 aa, Artificial Sequence; identical to SEQ ID NO: 3289
  SARS-CoV-2/Iceland/202/2020__EPI_ISL_417750 spike protein (1-1147)(Q965C_S1003C)

SEQ ID NO: 3336 - protein, 1147 aa, Artificial Sequence
  SARS-CoV-2/USA/WA-UW261/2020__EPI_ISL_418046 spike protein (1-1147)(Q965C_S1003C)
MFVFLVLLPLVSSQCVNLTTRTQLPPAYTNSFTRGVYYPDKVFRSSVLHSTQDLFLPFFSNVTWFHAIHVSGTNGTKRFDNPVLPFNDGVYFASTEKSNIIRGWIFGTTLDSKTQSLLIVNNATNVVIKVCEFQFCNDPFLGVYYHKNNKSWMESEFRVYSSANNCTFEYVSQPFLMDLEGKQGNFKNLREFVFKNIDGYFKIYSKHTPINLVRDLPQGFSALEPLVDLPIGINITRFQTLLALHRSYLTPGDSSSGWTAGAAAYYVGYLQPRTFLLKYNENGTITDAVDCALDPLSETKCTLKSFTVEKGIYQTSNFRVQPTESIVRFPNITNLCPFGEVFNATRFTSVYAWNRKRISNCVADYSVLYNSASFSTFKCYGVSPTKLNDLCFTNVYADSFVIRGDEVRQIAPGQTGKIADYNYKLPDDFTGCVIAWNSNNLDSKVGGNYNYLYRLFRKSNLKPFERDISTEIYQAGSTPCNGVEGFNCYFPLQSYGFQPTNGVGYQPYRVVVLSFELLHAPATVCGPKKSTNLVKNKCVNFNFNGLTGTGVLTESNKKFLPFQQFGRDIADTTDAVRDPQTLEILDITPCSFGGVSVITPGTNTSNQVAVLYQDVNCTEVPVAIHADQLTPTWRVYSTGSNVFQTRAGCLIGAEHVNNSYECDIPIGAGICASYQTQTNSPRRARSVASQSIIAYTMSLGAENSVAYSNNSIAIPTNFTISVTTEILPVSMTKTSVDCTMYICGDSTECSNLLLQYGSFCTQLNRALTGIAVEQDKNTQEVFAQVKQIYKTPPIKDFGGFNFSQILPDPSKPSKRSFIEDLLFNKVTLADAGFIKQYGDCLGDIAARDLICAQKFNGLTVLPPLLTDEMIAQYTSALLAGTITSGWTFGAGAALQIPFAMQMAYRFNGIGVTQNVLYENQKLIANQFNSAIGKIQDSLSSTASALGKLQDVVNQNAQALNTLVKCLSSNFGAISSVLNDILSRLDKVEAEVQIDRLITGRLQCLQTYVTQQLIRAAEIRASANLAATKMSECVLGQSKRVDFCGKGYHLMSFPQSAPHGVVFLHVTYVPAQEKNFTTAPAICHDGKAHFPREGVFVSNGTHWFVTQRNFYEPQIITTDNTFVSGNCDVVIGIVNNTVYDPLQPELDS

SEQ ID NO: 3337 - protein, 1147 aa, Artificial Sequence
  SARS-CoV-2/Portugal/PT0035/2020__EPI_ISL_418020 spike protein (1-1147)(Q965C_S1003C)
MFVFLVLLPLVSSQCVNLTTRTQLPPAYTNSFTRGVYYPDKVFRSSVLHSTQDLFLPFFSNVTWFHAIHVSGTNGTKRFDNPVLPFNDGVYFASTEKSNIIRGWIFGTTLDSKTQSLLIVNNATNVVIKVCEFQFCNDPFLGVYYHKNNKSWMESEFRVYSSANNCTFEYVSQPFLMDLEGKQGNFKNLREFVFKNIDGYFKIYSKHTPINLVRDLPQGFSALEPLVDLPIGINITRFQTLLALHRSYLTPGDSSSGWTAGAAAYYVGYLQPRTFLLKYNENGTITDAVDCALDPLSETKCTLKSFTVEKGIYQTSNFRVQPTESIVRFPNITNLCPFGEVFNATRFASVYAWNRKRISNCVADYSVLYNSASFSTFKCYGVSPTKLNDLCFTNVYADSFVIRGDEVRQIAPGQTGKIADYNYKLPDDFTGCVIAWNSNNLDSKVGGNYNYLYRLFRKSNLKPFERDISTEIYQAGSTPCNGVEGFNCYFPLQSYGFQPTNGVGYQPYRVVVLSFELLHAPATVCGPKKSTNLVKNKCVNFNFNGLTGTGVLTESNKKFLPFQQFGRDIADTTDAVRDPQTLEILDITPCSFGGVSVITPGTNTSNQVAVLYQDVNCTEVPVAIHADQLTPTWRVYSTGSNVFQTRAGCLIGAEHVNNSYECDIPIGAGICASYQTQTNSPRRARSVASQSIIAYTMSLGAENSVAYSNNSIAIPTNFTISVTTEILPVSMTKTSVDCTMYICGDSTECSNLLLQYGSFCTQLNRALTGIAVEQDKNTQEVFAQVKQIYKTPPIKDFGGFNFSQILPDPSKPSKRSFIEDLLFNKVTLADAGFIKQYGDCLGDISARDLICAQKFNGLTVLPPLLTDEMIAQYTSALLAGTITSGWTFGAGAALQIPFAMQMAYRFNGIGVTQNVLYENQKLIANQFNSAIGKIQDSLSSTASALGKLQDVVNQNAQALNTLVKCLSSNFGAISSVLNDILSRLDKVEAEVQIDRLITGRLQCLQTYVTQQLIRAAEIRASANLAATKMSECVLGQSKRVDFCGKGYHLMSFPQSAPHGVVFLHVTYVPAQEKNFTTAPAICHDGKAHFPREGVFVSNGTHWFVTQRNFYEPQIITTDNTFVSGNCDVVIGIVNNTVYDPLQPELDS

SEQ ID NO: 3338 - protein, 1147 aa, Artificial Sequence
  SARS-CoV-2/USA/NY-NYUMC7/2020__EPI_ISL_418192 spike protein (1-1147)(Q965C_S1003C)
MFVFLVLLPLVSSQCVNLTTRTQLPPAYTNSFTRGVYYPDKVFRSSVLHSTQDLFLPFFSNVTWFHAIHVSGTNGTKRFDNPVLPFNDGVYFASTEKSNIIRGWIFGTTLDSKTQSLLIVNNATNVVIKVCEFQFCNDPFLGVYHHKNNKSWMESEFRVYSSANNCTFEYVSQPFLMDLEGKQGNFKNLREFVFKNIDGYFKIYSKHTPINLVRDLPQGFSALEPLVDLPIGINITRFQTLLALHRSYLTPGDSSSGWTAGAAAYYVGYLQPRTFLLKYNENGTITDAVDCALDPLSETKCTLKSFTVEKGIYQTSNFRVQPTESIVRFPNITNLCPFGEVFNATRFASVYAWNRKRISNCVADYSVLYNSASFSTFKCYGVSPTKLNDLCFTNVYADSFVIRGDEVRQIAPGQTGKIADYNYKLPDDFTGCVIAWNSNNLDSKVGGNYNYLYRLFRKSNLKPFERDISTEIYQAGSTPCNGVEGFNCYFPLQSYGFQPTNGVGYQPYRVVVLSFELLHAPATVCGPKKSTNLVKNKCVNFNFNGLTGTGVLTESNKKFLPFQQFGRDIADTTDAVRDPQTLEILDITPCSFGGVSVITPGTNTSNQVAVLYQGVNCTEVPVAIHADQLTPTWRVYSTGSNVFQTRAGCLIGAEHVNNSYECDIPIGAGICASYQTQTNSPRRARSVASQSIIAYTMSLGAENSVAYSNNSIAIPTNFTISVTTEILPVSMTKTSVDCTMYICGDSTECSNLLLQYGSFCTQLNRALTGIAVEQDKNTQEVFAQVKQIYKTPPIKDFGGFNFSQILPDPSKPSKRSFIEDLLFNKVTLADAGFIKQYGDCLGDIAARDLICAQKFNGLTVLPPLLTDEMIAQYTSALLAGTITSGWTFGAGAALQIPFAMQMAYRFNGIGVTQNVLYENQKLIANQFNSAIGKIQDSLSSTASALGKLQDVVNQNAQALNTLVKCLSSNFGAISSVLNDILSRLDKVEAEVQIDRLITGRLQCLQTYVTQQLIRAAEIRASANLAATKMSECVLGQSKRVDFCGKGYHLMSFPQSAPHGVVFLHVTYVPAQEKNFTTAPAICHDGKAHFPREGVFVSNGTHWFVTQRNFYEPQIITTDNTFVSGNCDVVIGIVNNTVYDPLQPELDS

SEQ ID NO: 3339 - protein, 1147 aa, Artificial Sequence
  SARS-CoV-2/Iceland/189/2020__EPI_ISL_417709 spike protein (1-1147)(Q965C_S1003C)
MFVFLVLLPLVSSQCVNLTTRTQLPPAYTNSFTRGVYYPDKVFRSSVLHSTQDLFLPFFSNVTWFHAIHVSGTNGTKRFDNPVLPFNDGVYFASTEKSNIIRGWIFGTTLDSKTQSLLIVNNATNVVIKVCEFQFCNDPFLGVYYHKNNKSWMESEFRVYSSANNCTFEYVSQPFLMDLEGKQGNFKNLREFVFKNIDGYFKIYSKHTPINLVRDLPQGFSALEPLVDLPIGINITRFQTLLALHRSYLTPGDSSSGWTAGAAAYYVGYLQPRTFLLKYNENGTITDAVDCALDPLSETKCTLKSFTVEKGIYQTSNFRVQPTESIVRFPNITNLCPFGEVFNATRFASVYAWNRKRISNCVADYSVLYNSASFSTFKCYGVSPTKLNDLCFTNVYADSFVIRGDEVRQIAPGQTGKIADYNYKLPDDFTGCVIAWNSNNLDSKVGGNYNYLYRLFRKSNLKPFERDISTEIYQAGSTPCNGVEGFNCYFPLQSYGFQPTNGVGYQPYRVVVLSFELLHAPATVCGPKKSTNLVKNKCVNFNFNGLTGTGVLTESNKKFLPFQQFGRDIADTTDAVRDPQTLEILDITPCSFGGVSVITPGTNTSNQVAVLYQGVNCTEVPVAIHADQLTPTWRVYSTGSNVFQTRAGCLIGAEHVNNSYECDIPIGAGICASYQTQTNSPRRARSVASQSIIAYTMSLGAENSVAYSNNSIAIPTNFTISVTTEILPVSMTKTSVDCTMYICGDSTECSNLLLQYGSFCTQLNRALTGIAVEQDKNTQEVFAQVKQIYKTPPIKDFGGFNFSQILPDPSKPSKRSFIEDLLFNKVTLADAGFTKQYGDCLGDIAARDLICAQKFNGLTVLPPLLTDEMIAQYTSALLAGTITSGWTFGAGAALQIPFAMQMAYRFNGIGVTQNVLYENQKLIANQFNSAIGKIQDSLSSTASALGKLQDVVNQNAQALNTLVKCLSSNFGAISSVLNDILSRLDKVEAEVQIDRLITGRLQCLQTYVTQQLIRAAEIRASANLAATKMSECVLGQSKRVDFCGKGYHLMSFPQSAPHGVVFLHVTYVPAQEKNFTTAPAICHDGKAHFPREGVFVSNGTHWFVTQRNFYEPQIITTDNTFVSGNCDVVIGIVNNTVYDPLQPELDS

SEQ ID NO: 3340 - protein, 1147 aa, Artificial Sequence
  SARS-CoV-2/Australia/NSW56/2020__EPI_ISL_417408 spike protein (1-1147)(Q965C_S1003C)
MFVFLVLLPLVSSQCVNLTTRTQLPPAYTNSFTRGVYYPDKVFRSSVLHSTQDLFLPFFSNVTWFHAIHVSGTNGTKRFDNPVLPFNDGVYFASTEKSNIIRGWIFGTTLDSKTQSLLIVNNATNVVIKVCEFQFCNDPFLGVYYHKNNKSWMESEFRVYSSANNCTFEYVSQPFLMDLEGKQGNFKNLREFVFKNIDGYFKIYSKHTPINLVRDLPQGFSALEPLVDLPIGINITRFQTLLALHRSYLTPGDSSSGWTAGAAAYYVGYLQPRTFLLKYNENGTITDAVDCALDPLSETKCTLKSFTVEKGIYQTSNFRVQPTESIVRFPNITNLCPFGEVFNATRFASVYAWNRKRISNCVADYSVLYNSASFSTFKCYGVSPTKLNDLCFTNVYADSFVIRGDEVRQIAPGQTGKIADYNYKLPDDFTGCVIAWNSNNLDSKVGGNYNYLYRLFRKSNLKPFERDISTEIYQAGSTPCNGVEGFNCYFPLQSYGFQPTNGVGYQPYRVVVLSFELLHAPATVCGPKKSTNLVKNKCVNFNFNGLTGTGVLTESNKKFLPFQQFGRDIADTTDAVRDPQTLEILDITPCSFGGVSVITPGTNTSNQVAVLYQDVNCTEVPVAIHADQLTPTWRVYSTGSNVFQTRAGCLIGAEHVNNSYECDIPIGAGICASYQTQTNSPRRARSVASQSIIAYTMSLGAENSVAYSNNSIAIPTNFTISVTTEILPVSMTKTSVDCTMYICGDSTECSNLLLQYGSFCTQLNRALTGIAVEQDKNTQEVFAQVKQIYKTPPIKDFGGFNFSQILPDSSKPSKRSFIEDLLFNKVTLADAGFIKQYGDCLGDIAARDLICAQKFNGLTVLPPLLTDEMIAQYTSALLAGTITSGWTFGAGAALQIPFAMQMAYRFNGIGVTQNVLYENQKLIANQFNSAIGKIQDSLSSTASALGKLQDVVNQNAQALNTLVKCLSSNFGAISSVLNDILSRLDKVEAEVQIDRLITGRLQCLQTYVTQQLIRAAEIRASANLAATKMSECVLGQSKRVDFCGKGYHLMSFPQSAPHGVVFLHVTYVPAQEKNFTTAPAICHDGKAHFPREGVFVSNGTHWFVTQRNFYEPQIITTDNTFVSGNCDVVIGIVNNTVYDPLQPELDS

SEQ ID NO: 3341 - protein, 1147 aa, Artificial Sequence
  SARS-CoV-2/Iceland/280/2020__EPI_ISL_417608 spike protein (1-1147)(Q965C_S1003C)
MFVFLVLLPLVSSQCVNLTTRTQLPPAYTNSFTRGVYYPDKVFRSSVLHSTQDLFLPFFSNVTWFHAIHVSGTNGTKRFDNPVLPFNDGVYFASTEKSNIIRGWIFGTTLDSKTQSLLIVNNATNVVIKVCEFQFCNDPFLGVYYHKNNKSWMESEFRVYSSANNCTFEYVSQPFLMDLEGKQGNFKNLREFVFKNIDGYFKIYSKHTPINLVRDLPQGFSALEPLVDLPIGINITRFQTLLALHRSYLTPGDSSSGWTAGAAAYYVGYLQPRTFLLKYNENGTITDAVDCALDPLSETKCTLKSFTVEKGIYQTSNFRVQPTESIVRFPNITNLCPFGEVFNATRFASVYAWNRKRISNCVADYSVLYNSASFSTFKCYGVSPTKLNDLCFTNVYADSFVIRGDEVRQIAPGQTGKIADYNYKLPDDFTGCVIAWNSNNLDSKVGGNYNYLYRLFRKSNLKPFERDISTEIYQAGSTPCNGVEGFNCYFPLQSYGFQPTNGVGYQPYRVVVLSFELLHAPATVCGPKKSTNLVKNKCVNFNFNGLTGTGVLTESNKKFLPFQQFGRDIADTTDAVRDPQTLEILDITPCSFGGVSVITPGTNTSNQVAVLYQGVNCTEVPVAIHADQLTPTWRVYSTGSNVFQTRAGCLIGAEHVNNSYECDIPIGAGICASYHTQTNSPRRARSVASQSIIAYTMSLGAENSVAYSNNSIAIPTNFTISVTTEILPVSMTKTSVDCTMYICGDSTECSNLLLQYGSFCTQLNRALTGIAVEQDKNTQEVFAQVKQIYKTPPIKDFGGFNFSQILPDPSKPSKRSFIEDLLFNKVTLADAGFIKQYGDCLGDIAARDLICAQKFNGLTVLPPLLTDEMIAQYTSALLAGTITSGWTFGAGAALQIPFAMQMAYRFNGIGVTQNVLYENQKLIANQFNSAIGKIQDSLSSTASALGKLQDVVNQNAQALNTLVKCLSSNFGAISSVLNDILSRLDKVEAEVQIDRLITGRLQCLQTYVTQQLIRAAEIRASANLAATKMSECVLGQSKRVDFCGKGYHLMSFPQSAPHGVVFLHVTYVPAQEKNFTTAPAICHDGKAHFPREGVFVSNGTHWFVTQRNFYEPQIITTDNTFVSGNCDVVIGIVNNTVYDPLQPELDS

SEQ ID NO: 3342 - protein, 1147 aa, Artificial Sequence; identical to SEQ ID NO: 3297
  SARS-CoV-2/Iceland/247/2020__EPI_ISL_417575 spike protein (1-1147)(Q965C_S1003C)

SEQ ID NO: 3343 - protein, 1147 aa, Artificial Sequence
  SARS-CoV-2/Iceland/238/2020__EPI_ISL_417566 spike protein (1-1147)(Q965C_S1003C)
MFVFLVLLPLVSSQCVNLTTRTQLPPAYTNSFTRGVYYPDKVFRSSVLHSTQDLFLPFFSNVTWFHAIHVSGTNGTKRFDNPVLPFNDGVYFASTEKSNIIRGWIFGTTLDSKTQSLLIVNNATNVVIKVCEFQFCNDPFLGVYYHKNNKSWMESEFRVYSSANNCTFEYVSQPFLMDLEGKQGNFKNLREFVFKNIDGYFKIYSKHTPINLVRDLPQGFSALEPLVDLPIGINITRFQTLLALHRSYLTPGDSSSGWTAGAAAYYVGYLQPRTFLLKYNENGTITDAVDCALDPLSETKCTLKSFTVEKGIYQTSNFRVQPTESIVRFPNITNLCPFGEVFNATRFASVYAWNRKRISNCVADYSVLYNSASFSTFKCYGVSPTKLNDLCFTNVYADSFVIRGDEVRQIAPGQTGKIADYNYKLPDDFTGCVIAWNSNNLDSKVGGNYNYLYRLFRKSNLKPFERDISTEIYQAGSTPCNGVEGFNCYFPLQSYGFQPTNGVGYQPYRVVVLSFELLHAPATVCGPKKSTNLVKNKCVNFNFNGLTGTGVLTESNKKFLPFQQFGRDIADTTDAVRDPQTLEILDITPCSFGGVSVITPGTNTSNQVAVLYQGVNCTEVPVAIHADQLTPTWRVYSTGSNVFQTRAGCLIGAEHVNNSYECDIPIGAGICASYQTQTNSPRRARSVASQSIIAYTMSLGAENSVAYSNNSIAIPTNFTISVTTEILPVSMTKTSVDCTMYICGDSTECSNLLLQYGSFCTQLNRALTGIAVEQDKNTQEVFAQVKQIYKTPPIKDFGGFNFSQILPDPSKPSKRSFIEDLLFNKVTLADVGFIKQYGDCLGDIAARDLICAQKFNGLTVLPPLLTDEMIAQYTSALLAGTITSGWTFGAGAALQIPFAMQMAYRFNGIGVTQNVLYENQKLIANQFNSAIGKIQDSLSSTASALGKLQDVVNQNAQALNTLVKCLSSNFGAISSVLNDILSRLDKVEAEVQIDRLITGRLQCLQTYVTQQLIRAAEIRASANLAATKMSECVLGQSKRVDFCGKGYHLMSFPQSAPHGVVFLHVTYVPAQEKNFTTAPAICHDGKAHFPREGVFVSNGTHWFVTQRNFYEPQIITTDNTFVSGNCDVVIGIVNNTVYDPLQPELDS

SEQ ID NO: 3344 - protein, 1147 aa, Artificial Sequence
  SARS-CoV-2/Greece/16/2020__EPI_ISL_418265 spike protein (1-1147)(Q965C_S1003C)
MFVFLVLLPLVSSQCVNLTTRTQLPPAYTNSFTRGVYYPDKVFRSSVLHSTQDLFLPFFSNVTWFHAIHVSGTNGTKRFDNPVLPFNDGVYFASTEKSNIIRGWIFGTTLDSKTQSLLIVNNATNVVIKVCEFQFCNDPFLGVYYHKNNKSWMESEFRVYSSANNCTFEYVSQPFLMDLEGKQGNFKNLREFVFKNVDGYFKIYSKHTPINLVRDLPQGFSALEPLVDLPIGINITRFQTLLALHRSYLTPGDSSSGWTAGAAAYYVGYLQPRTFLLKYNENGTITDAVDCALDPLSETKCTLKSFTVEKGIYQTSNFRVQPTESIVRFPNITNLCPFGEVFNATRFASVYAWNRKRISNCVADYSVLYNSASFSTFKCYGVSPTKLNDLCFTNVYADSFVIRGDEVRQIAPGQTGKIADYNYKLPDDFTGCVIAWNSNNLDSKVGGNYNYLYRLFRKSNLKPFERDISTEIYQAGSTPCNGVEGFNCYFPLQSYGFQPTNGVGYQPYRVVVLSFELLHAPATVCGPKKSTNLVKNKCVNFNFNGLTGTGVLTESNKKFLPFQQFGRDIADTTDAVRDPQTLEILDITPCSFGGVSVITPGTNTSNQVAVLYQDVNCTEVPVAIHADQLTPTWRVYSTGSNVFQTRAGCLIGAEHVNNSYECDIPIGAGICASYQTQTNSPRRARSVASQSIIAYTMSLGAENSVAYSNNSIAIPTNFTISVTTEILPVSMTKTSVDCTMYICGDSTECSNLLLQYGSFCTQLNRALTGIAVEQDKNTQEVFAQVKQIYKTPPIKDFGGFNFSQILPDPSKPSKRSFIEDLLFNKVTLADAGFIKQYGDCLGDIAARDLICAQKFNGLTVLPPLLTDEMIAQYTSALLAGTITSGWTFGAGAALQIPFAMQMAYRFNGIGVTQNVLYENQKLIANQFNSAIGKIQDSLSSTASALGKLQDVVNQNAQALNTLVKCLSSNFGAISSVLNDILSRLDKVEAEVQIDRLITGRLQCLQTYVTQQLIRAAEIRASANLAATKMSECVLGQSKRVDFCGKGYHLMSFPQSAPHGVVFLHVTYVPAQEKNFTTAPAICHDGKAHFPREGVFVSNGTHWFVTQRNFYEPQIITTDNTFVSGNCDVVIGIVNNTVYDPLQPELDS

SEQ ID NO: 3345 - protein, 1147 aa, Artificial Sequence
  SARS-CoV-2/Iceland/319/2020__EPI_ISL_417648 spike protein (1-1147)(Q965C_S1003C)
MFVFLVLLPLVSSQCVNLTTRTQLPPAYTNSFTRGVYYPDKVFRSSVLHSTQDLFLPFFSNVTWFHAIHVSGTNGTKRFDNPVLPFNDGVYFASTEKSNIIRGWIFGTTLDSKTQSLLIVNNATNVVIKVCEFQFCNDPFLGVYYHKNNKSWMESEFRVYSSANNCTFEYVSQPFLIDLEGKQGNFKNLREFVFKNIDGYFKIYSKHTPINLVRDLPQGFSALEPLVDLPIGINITRFQTLLALHRSYLTPGDSSSGWTAGAAAYYVGYLQPRTFLLKYNENGTITDAVDCALDPLSETKCTLKSFTVEKGIYQTSNFRVQPTESIVRFPNITNLCPFGEVFNATRFASVYAWNRKRISNCVADYSVLYNSASFSTFKCYGVSPTKLNDLCFTNVYADSFVIRGDEVRQIAPGQTGKIADYNYKLPDDFTGCVIAWNSNNLDSKVGGNYNYLYRLFRKSNLKPFERDISTEIYQAGSTPCNGVEGFNCYFPLQSYGFQPTNGVGYQPYRVVVLSFELLHAPATVCGPKKSTNLVKNKCVNFNFNGLTGTGVLTESNKKFLPFQQFGRDIADTTDAVRDPQTLEILDITPCSFGGVSVITPGTNTSNQVAVLYQGVNCTEVPVAIHADQLTPTWRVYSTGSNVFQTRAGCLIGAEHVNNSYECDIPIGAGICASYQTQTNSPRRARSVASQSIIAYTMSLGAENSVAYSNNSIAIPTNFTISVTTEILPVSMTKTSVDCTMYICGDSTECSNLLLQYGSFCTQLNRALTGIAVEQDKNTQEVFAQVKQIYKTPPIKDFGGFNFSQILPDPSKPSKRSFIEDLLFNKVTLADAGFIKQYGDCLGDIAARDLICAQKFNGLTVLPPLLTDEMIAQYTSALLAGTITSGWTFGAGAALQIPFAMQMAYRFNGIGVTQNVLYENQKLIANQFNSAIGKIQDSLSSTASALGKLQDVVNQNAQALNTLVKCLSSNFGAISSVLNDILSRLDKVEAEVQIDRLITGRLQCLQTYVTQQLIRAAEIRASANLAATKMSECVLGQSKRVDFCGKGYHLMSFPQSAPHGVVFLHVTYVPAQEKNFTTAPAICHDGKAHFPREGVFVSNGTHWFVTQRNFYEPQIITTDNTFVSGNCDVVIGIVNNTVYDPLQPELDS

SEQ ID NO: 3346 - protein, 1147 aa, Artificial Sequence
  SARS-CoV-2/Congo/94/2020__EPI_ISL_417947 spike protein (1-1147)(Q965C_S1003C)
MFVFLVLLPLVSSQCVNLTTRTQLPPAYTNSFTRGVYYPDKVFRSSVLHSTQDLFLPFFSNVTWFHAIHVSGTNGTKRFDNPVLPFNDGVYFASTEKSNIIRGWIFGTTLDSKTQSLLIVNNATNVVIKVCEFQFCNDPFLGVYYHKNNKSWMESEFRVYSSANNCTFEYVSQPFLMDLEGKQGNFKNLREFVFKNIDGYFKIYSKHTPINLVRDLPQGFSALEPLVDLPIGINITRFQTLLALHRSYLTPGDSSSGWTAGAAAYYVGYLQPRTFLLKYNENGTITDAVDCALDPLSETKCTLKSFTVEKGIYQTSNFRVQPTESIVRFPNITNLCPFGEVFNATRFASVYAWNRKRISNCVADYSVLYNSASFSTFKCYGVSPTKLNDLCFTNVYADSFVIRGDEVRQIAPGQTGKIADYNYKLPDDFTGCVIAWNSNNLDSKVGGNYNYLYRLFRKSNLKPFERDISTEIYQAGSTPCNGVEGFNCYFPLQSYGFQPTNGVGYQPYRVVVLSFELLHAPATVCGPKKSTNLVKNKCVNFNFNGLTGTGVLTESNKKFLPFQQFGRDIADTTDAVRDPQTLEILDITPCSFGGVSVITPGTNTSNQVAVLYQGVNCTEVPVAIHADQLTPTWRVYSTGSNVFQTRAGCLIGAEHVNNSYECDIPIGAGICASYQTQTNSPRRARSVASQSIIAYTMSLGAENSVAYSNNSIAIPTNFTISVTTEILPVSMTKTSVDCTMYICGDSTECSNLLLQYGSFCTQLNRALTGIAVEQDKNTQEVFAQVKQIYKTPPIKDFGGFNFSQILPDPSKPSKRSFIEDILFNKVTLADAGFIKQYGDCLGDIAARDLICAQKFNGLTVLPPLLTDEMIAQYTSALLAGTITSGWTFGAGAALQIPFAMQMAYRFNGIGVTQNVLYENQKLIANQFNSAIGKIQDSLSSTASALGKLQDVVNQNAQALNTLVKCLSSNFGAISSVLNDILSRLDKVEAEVQIDRLITGRLQCLQTYVTQQLIRAAEIRASANLAATKMSECVLGQSKRVDFCGKGYHLMSFPQSAPHGVVFLHVTYVPAQEKNFTTAPAICHDGKAHFPREGVFVSNGTHWFVTQRNFYEPQIITTDNTFVSGNCDVVIGIVNNTVYDPLQPELDS

SEQ ID NO: 3347 - protein, 1147 aa, Artificial Sequence
  SARS-CoV-2/Congo/158/2020__EPI_ISL_417950 spike protein (1-1147)(Q965C_S1003C)
MFVFLVLLPLVSSQCVNLTTRTQLPPAYTNSFTRGVYYPDKVFRSSVLHSTQDLFLPFFSNVTWFHAIHVSGTNGTKRFDNPVLPFNDGVYFASTEKSNIIRGWIFGTTLDSKTQSLLIVNNATNVVIKVCEFQFCNDPFLGVYYHKNNKSWMESEFRVYSSANNCTFEYVSQPFLMDLEGKQGNFKNLREFVFKNIDGYFKIYSKHTPINLVRDLPQGFSALEPLVDLPIGINITRFQTLLALHRSYLTPGDSSSGWTAGAAAYYVGYLQPRTFLLKYNENGTITDAVDCALDPLSETKCTLKSFTVEKGIYQTSNFRVQPTESIVRFPNITNLCPFGEVFNATRFASVYAWNRKRISNCVADYSVLYNSASFSTFKCYGVSPTKLNDLCFTNVYADSFVIRGDEVRQIAPGQTGKIADYNYKLPDDFTGCVIAWNSNNLDSKVGGNYNYLYRLFRKSNLKPFERDISTEIYQAGSTPCNGVEGFNCYFPLQSYGFQPTNGVGYQPYRVVVLSFELLHAPATVCGPKKSTNLVKNKCVNFNFNGLTGTGVLTESNKKFLPFQQFGRDIADTTDAVRDPQTLEILDITPCSFGGVSVITPGTNTSNQVAVLYQDVNCTEVPVAIHADQLTPTWRVYSTGSNVFQTRAGCLIGAEHVNNSYECDIPIGAGICASYQTQTNSPRRARSVASQSIIAYTMSLGAENSVAYSNNSIAIPTNFTISVTTEILPVSMTKTSVDCTMYICGDSTECSNLLLQYGSFCTQLNRALTGIAVEQDKNTQEVFAQVKQIYKTPPIKDFGGFNFSQILPDPSKPSKRSFIEDLLFNKVTLADAGFIKQYGDCLGDIAARDLICAQKFNGLTVLPPLLTDEMIAQYTSALLAGTITSGWTFGAGAALQIPFAMQMAYRFNGIGVTQNVLYENQKLIANQFNSAIGKIQDSLSSTASALGKLQDVVNQNAQALNTLVKCLSSNFGAISSVLNDILSRLDKVEAEVQIDRLITGRLQCLQTYVTQQLIRAAEIRASANLAATKMSECVLGQSKRVDFCGKGYHLMSFPQSAPHGVVFLHVTYVPAQEKNFTTAPAICHDGKAHFPREGVFVSNGTHWFVTQRNFYEPQIITTDNTFLSGNCDVVIGIVNNTVYDPLQPELDS

SEQ ID NO: 3348 - protein, 1147 aa, Artificial Sequence
  SARS-CoV-2/USA/UT-00034/2020__EPI_ISL_417977 spike protein (1-1147)(Q965C_S1003C)
MFVFLVLLPLVSSQCVNLTTRTQLPPAYTNSFTRGVYYPDKVFRSSVLHSTQDLFLPFFSNVTWFHAIHVSGTNGTKRFDNPVLPFNDGVYFASTEKSNIIRGWIFGTTLDSKTQSLLIVNNATNVVIKVCEFQFCNDPFLGVYYYKNNKSWMESEFRVYSSANNCTFEYVSQPFLMDLEGKQGNFKNLREFVFKNIDGYFKIYSKHTPINLVRDLPQGFSALEPLVDLPIGINITRFQTLLALHRSYLTPGDSSSGWTAGAAAYYVGYLQPRTFLLKYNENGTITDAVDCALDPLSETKCTLKSFTVEKGIYQTSNFRVQPTESIVRFPNITNLCPFGEVFNATRFASVYAWNRKRISNCVADYSVLYNSASFSTFKCYGVSPTKLNDLCFTNVYADSFVIRGDEVRQIAPGQTGKIADYNYKLPDDFTGCVIAWNSNNLDSKVGGNYNYLYRLFRKSNLKPFERDISTEIYQAGSTPCNGVEGFNCYFPLQSYGFQPTNGVGYQPYRVVVLSFELLHAPATVCGPKKSTNLVKNKCVNFNFNGLTGTGVLTESNKKFLPFQQFGRDIADTTDAVRDPQTLEILDITPCSFGGVSVITPGTNTSNQVAVLYQGVNCTEVPVAIHADQLTPTWRVYSTGSNVFQTRAGCLIGAEHVNNSYECDIPIGAGICASYQTQTNSPRRARSVASQSIIAYTMSLGAENSVAYSNNSIAIPTNFTISVTTEILPVSMTKTSVDCTMYICGDSTECSNLLLQYGSFCTQLNRALTGIAVEQDKNTQEVFAQVKQIYKTPPIKDFGGFNFSQILPDPSKPSKRSFIEDLLFNKVTLADAGFIKQYGDCLGDIAARDLICAQKFNGLTVLPPLLTDEMIAQYTSALLAGTITSGWTFGAGAALQIPFAMQMAYRFNGIGVTQNVLYENQKLIANQFNSAIGKIQDSLSSTASALGKLQDVVNQNAQALNTLVKCLSSNFGAISSVLNDILSRLDKVEAEVQIDRLITGRLQCLQTYVTQQLIRAAEIRASANLAATKMSECVLGQSKRVDFCGKGYHLMSFPQSAPHGVVFLHVTYVPAQEKNFTTAPAICHDGKAHFPREGVFVSNGTHWFVTQRNFYEPQIITTDNTFVSGNCDVVIGIVNNTVYDPLQPELDS

SEQ ID NO: 3349 - protein, 1147 aa, Artificial Sequence
  SARS-CoV-2/USA/UT-00033/2020__EPI_ISL_417976 spike protein (1-1147)(Q965C_S1003C)
MFVFLVLLPLVSSQCVNLTTRTQLPPAYTNSFTRGVYYPDKVFRSSVLHSTQDLFLPFFSNVTWFHAIHVSGTNGTKRFDNPVLPFNDGVYFASTEKSNIIRGWIFGTTLDSKTQSLLIVNNATNVVIKVCEFQFCNDPFLGVYYHKNNKSWMESEFRVYSSANNCTFEYVSQPFLMDLEGKQGNFKNLREFVFKNIDGYFKIYSKHTPINLVRDLPQGFSALEPLVDLPIGINITRFQTLLALHRSYLTPGDSSSGLTAGAAAYYVGYLQPRTFLLKYNENGTITDAVDCALDPLSETKCTLKSFTVEKGIYQTSNFRVQPTESIVRFPNITNLCPFGEVFNATRFASVYAWNRKRISNCVADYSVLYNSASFSTFKCYGVSPTKLNDLCFTNVYADSFVIRGDEVRQIAPGQTGKIADYNYKLPDDFTGCVIAWNSNNLDSKVGGNYNYLYRLFRKSNLKPFERDISTEIYQAGSTPCNGVEGFNCYFPLQSYGFQPTNGVGYQPYRVVVLSFELLHAPATVCGPKKSTNLVKNKCVNFNFNGLTGTGVLTESNKKFLPFQQFGRDIADTTDAVRDPQTLEILDITPCSFGGVSVITPGTNTSNQVAVLYQGVNCTEVPVAIHADQLTPTWRVYSTGSNVFQTRAGCLIGAEHVNNSYECDIPIGAGICASYQTQTNSPRRARSVASQSIIAYTMSLGAENSVAYSNNSIAIPTNFTISVTTEILPVSMTKTSVDCTMYICGDSTECSNLLLQYGSFCTQLNRALTGIAVEQDKNTQEVFAQVKQIYKTPPIKDFGGFNFSQILPDPSKPSKRSFIEDLLFNKVTLADAGFIKQYGDCLGDIAARDLICAQKFNGLTVLPPLLTDEMIAQYTSALLAGTITSGWTFGAGAALQIPFAMQMAYRFNGIGVTQNVLYENQKLIANQFNSAIGKIQDSLSSTASALGKLQDVVNQNAQALNTLVKCLSSNFGAISSVLNDILSRLDKVEAEVQIDRLITGRLQCLQTYVTQQLIRAAEIRASANLAATKMSECVLGQSKRVDFCGKGYHLMSFPQSAPHGVVFLHVTYVPAQEKNFTTAPAICHDGKAHFPREGVFVSNGTHWFVTQRNFYEPQIITTDNTFVSGNCDVVIGIVNNTVYDPLQPELDS

SEQ ID NO: 3350 - protein, 1147 aa, Artificial Sequence
  SARS-CoV-2/USA/WI-13/2020__EPI_ISL_417516 spike protein (1-1147)(Q965C_S1003C)
MFVFLVLLPLVSSQCVNLTTRTQLPPAYTNSFTRGVYYPDKVFRSSVLHSTQDLFLPFFSNVTWFHAIHVSGTNGTKRFDNPVLPFNDGVYFASTEKSNIIRGWIFGTTLDSKTQSLLIVNNATNVVIKVCEFQFCNDPFLGVYYHKNNKSWMESEFRVYSSANNCTFEYVSQPFLMDLEGKQGNFKNLREFVFKNIDGYFKIYSKHTPINLVRDLPQGFSALEPLVDLPIGINITRFQTLLALHRSYLTPGDSSSGWTAGAAAYYVGYLQPRTFLLKYNENGTITDAVDCALDPLSETKCTLKSFTVEKGIYQTSNFRVLPTESIVRFPNITNLCPFGEVFNATRFASVYAWNRKRISNCVADYSVLYNSASFSTFKCYGVSPTKLNDLCFTNVYADSFVIRGDEVRQIAPGQTGKIADYNYKLPDDFTGCVIAWNSNNLDSKVGGNYNYLYRLFRKSNLKPFERDISTEIYQAGSTPCNGVEGFNCYFPLQSYGFQPTNGVGYQPYRVVVLSFELLHAPATVCGPKKSTNLVKNKCVNFNFNGLTGTGVLTESNKKFLPFQQFGRDIADTTDAVRDPQTLEILDITPCSFGGVSVITPGTNTSNQVAVLYQGVNCTEVPVAIHADQLTPTWRVYSTGSNVFQTRAGCLIGAEHVNNSYECDIPIGAGICASYQTQTNSPRRARSVASQSIIAYTMSLGAENSVAYSNNSIAIPTNFTISVTTEILPVSMTKTSVDCTMYICGDSTECSNLLLQYGSFCTQLNRALTGIAVEQDKNTQEVFAQVKQIYKTPPIKDFGGFNFSQILPDPSKPSKRSFIEDLLFNKVTLADAGFIKQYGDCLGDIAARDLICAQKFNGLTVLPPLLTDEMIAQYTSALLAGTITSGWTFGAGAALQIPFAMQMAYRFNGIGVTQNVLYENQKLIANQFNSAIGKIQDSLSSTASALGKLQDVVNQNAQALNTLVKCLSSNFGAISSVLNDILSRLDKVEAEVQIDRLITGRLQCLQTYVTQQLIRAAEIRASANLAATKMSECVLGQSKRVDFCGKGYHLMSFPQSAPHGVVFLHVTYVPAQEKNFTTAPAICHDGKAHFPREGVFVSNGTHWFVTQRNFYEPQIITTDNTFVSGNCDVVIGIVNNTVYDPLQPELDS

SEQ ID NO: 3351 - protein, 1146 aa, Artificial Sequence
  SARS-CoV-2/India/1-27/2020__EPI_ISL_413522 spike protein (1-1146)(Q964C_S1002C)
MFVFLVLLPLVSSQCVNLTTRTQLPPAYTNSFTRGVYYPDKVFRSSVLHSTQDLFLPFFSNVTWFHAIHVSGTNGTKRFDNPVLPFNDGVYFASTEKSNIIRGWIFGTTLDSKTQSLLIVNNATNVVIKVCEFQFCNDPFLGVYHKNNKSWMESEFRVYSSANNCTFEYVSQPFLMDLEGKQGNFKNLREFVFKNIDGYFKIYSKHTPINLVRDLPQGFSALEPLVDLPIGINITRFQTLLALHRSYLTPGDSSSGWTAGAAAYYVGYLQPRTFLLKYNENGTITDAVDCALDPLSETKCTLKSFTVEKGIYQTSNFRVQPTESIVRFPNITNLCPFGEVFNATRFASVYAWNRKRISNCVADYSVLYNSASFSTFKCYGVSPTKLNDLCFTNVYADSFVIRGDEVIQIAPGQTGKIADYNYKLPDDFTGCVIAWNSNNLDSKVGGNYNYLYRLFRKSNLKPFERDISTEIYQAGSTPCNGVEGFNCYFPLQSYGFQPTNGVGYQPYRVVVLSFELLHAPATVCGPKKSTNLVKNKCVNFNFNGLTGTGVLTESNKKFLPFQQFGRDIADTTDAVRDPQTLEILDITPCSFGGVSVITPGTNTSNQVAVLYQDVNCTEVPVAIHADQLTPTWRVYSTGSNVFQTRAGCLIGAEHVNNSYECDIPIGAGICASYQTQTNSPRRARSVASQSIIAYTMSLGAENSVAYSNNSIAIPTNFTISVTTEILPVSMTKTSVDCTMYICGDSTECSNLLLQYGSFCTQLNRALTGIAVEQDKNTQEVFAQVKQIYKTPPIKDFGGFNFSQILPDPSKPSKRSFIEDLLFNKVTLADAGFIKQYGDCLGDIAARDLICAQKFNGLTVLPPLLTDEMIAQYTSALLAGTITSGWTFGAGAALQIPFAMQMAYRFNGIGVTQNVLYENQKLIANQFNSAIGKIQDSLSSTASALGKLQDVVNQNAQALNTLVKCLSSNFGAISSVLNDILSRLDKVEAEVQIDRLITGRLQCLQTYVTQQLIRAAEIRASANLAATKMSECVLGQSKRVDFCGKGYHLMSFPQSAPHGVVFLHVTYVPAQEKNFTTAPAICHDGKAHFPREGVFVSNGTHWFVTQRNFYEPQIITTDNTFVSGNCDVVIGIVNNTVYDPLQPELDS

SEQ ID NO: 3352 - protein, 1141 aa, Artificial Sequence
  SARS-CoV-2/pangolin/Guangxi/P4L/2017__EPI_ISL_410538 spike protein (1-1141)(Q959C_S997C)
MFVFLFVLPLVSSQCVNLTTRTGIPPGYTNSSTRGVYYPDKVFRSSILHLTQDLFLPFFSNVTWFNTINYQGGFKKFDNPVLPFNDGVYFASTEKSNIIRGWIFGTTLDARTQSLLIVNNATNVVIKVCEFQFCTDPFLGVYYHNNNKTWVENEFRVYSSANNCTFEYISQPFLMDLEGKQGNFKNLREFVFKNVDGYFKIYSKHTPIDLVRDLPRGFAALEPLVDLPIGINITRFQTLLALHRSYLTPGNLESGWTTGAAAYYVGYLQQRTFLLSYNQNGTITDAVDCSLDPLSETKCTLKSLTVEKGIYQTSNFRVQPTISIVRFPNITNLCPFGEVFNASKFASVYAWNRKRISNCVADYSVLYNSTSFSTFKCYGVSPTKLNDLCFTNVYADSFVVKGDEVRQIAPGQTGVIADYNYKLPDDFTGCVIAWNSVKQDALTGGNYGYLYRLFRKSKLKPFERDISTEIYQAGSTPCNGQVGLNCYYPLERYGFHPTTGVNYQPFRVVVLSFELLNGPATVCGPKLSTTLVKDKCVNFNFNGLTGTGVLTTSKKQFLPFQQFGRDISDTTDAVRDPQTLEILDITPCSFGGVSVITPGTNTSNQVAVLYQDVNCTEVPMAIHAEQLTPAWRVYSAGANVFQTRAGCLVGAEHVNNSYECDIPVGAGICASYHSMSSLRSVNQRSIIAYTMSLGAENSVAYSNNSIAIPTNFTISVTTEILPVSMTKTSVDCTMYICGDSIECSNLLLQYGSFCTQLNRALTGIAVEQDKNTQEVFAQVKQIYKTPPIKDFGGFNFSQILPDPSKPSKRSFIEDLLFNKVTLADAGFIKQYGDCLGDIAARDLICAQKFNGLTVLPPLLTDEMIAQYTSALLAGTITSGWTFGAGAALQIPFAMQMAYRFNGIGVTQNVLYENQKLIANQFNSAIGKIQDSLSSTASALGKLQDVVNQNAQALNTLVKCLSSNFGAISSVLNDILSRLDKVEAEVQIDRLITGRLQCLQTYVTQQLIRAAEIRASANLAATKMSECVLGQSKRVDFCGKGYHLMSFPQSAPHGVVFLHVTYVPAQEKNFTTAPAICHEGKAHFPREGVFVSNGTHWFITQRNFYEPQIITTDNTFVSGSCDVVIGIVNNTVYDPLQPELDS

SEQ ID NO: 3353 - protein, 1141 aa, Artificial Sequence
  SARS-CoV-2/pangolin/Guangxi/P5L/2017__EPI_ISL_410540 spike protein (1-1141)(Q959C_S997C)
MFVFLFVLPLVSSQCVNLTTRTGIPPGYTNSSTRGVYYPDKVFRSSILHLTQDLFLPFFSNVTWFNTINYQGGFKKFDNPVLPFNDGVYFASTEKSNIIRGWIFGTTLDARTQSLLIVNNATNVVIKVCEFQFCTDPFLGVYYHNNNKTWVENEFRVYSSANNCTFEYISQPFLMDLEGKQGNFKNLREFVFKNVDGYFKIYSKHTPIDLVRDLPRGFAALEPLVDLPIGINITRFQTLLALHRSYLTPGKLESGWTTGAAAYYVGYLQQRTFLLSYNQNGTITDAVDCSLDPLSETKCTLKSLTVEKGIYQTSNFRVQPTISIVRFPNITNLCPFGEVFNASKFASVYAWNRKRISNCVADYSVLYNSTSFSTFKCYGVSPTKLNDLCFTNVYADSFVVKGDEVRQIAPGQTGVIADYNYKLPDDFTGCVIAWNSVKQDALTGGNYGYLYRLFRKSKLKPFERDISTEIYQAGSTPCNGQVGLNCYYPLERYGFHPTTGVNYQPFRVVVLSFELLNGPATVCGPKLSTTLVKDKCVNFNFNGLTGTGVLTTSKKQFLPFQQFGRDISDTTDAVRDPQTLEILDITPCSFGGVSVITPGTNTSNQVAVLYQDVNCTEVPMAIHAEQLTPAWRVYSAGANVFQTRAGCLVGAEHVNNSYECDIPVGAGICASYHSMSSFRSVNQRSIIAYTMSLGAENSVAYSNNSIAIPTNFTISVTTEILPVSMTKTSVDCTMYICGDSIECSNLLLQYGSFCTQLNRALTGIAVEQDKNTQEVFAQVKQIYKTPPIKDFGGFNFSQILPDPSKPSKRSFIEDLLFNKVTLADAGFIKQYGDCLGDIAARDLICAQKFNGLTVLPPLLTDEMIAQYTSALLAGTITSGWTFGAGAALQIPFAMQMAYRFNGIGVTQNVLYENQKLIANQFNSAIGKIQDSLSSTASALGKLQDVVNQNAQALNTLVKCLSSNFGAISSVLNDILSRLDKVEAEVQIDRLITGRLQCLQTYVTQQLIRAAEIRASANLAATKMSECVLGQSKRVDFCGKGYHLMSFPQSAPHGVVFLHVTYVPAQEKNFTTAPAICHEGKAHFPREGVFVSNGTHWFITQRNFYEPQIITTDNTFVSGSCDVVIGIVNNTVYDPLQPELDS

SEQ ID NO: 3354 - protein, 1141 aa, Artificial Sequence
  SARS-CoV-2/pangolin/Guangxi/P5E/2017__EPI_ISL_410541 spike protein (1-1141)(Q959C_S997C)
MFVFLFVLPLVSSQCVNLTTRTGIPPGYTNSSTRGVYYPDKVFRSSILHLTQDLFLPFFSNVTWFNTITYQGGSKKFDNPVLPFNDGVYFASTEKSNIIRGWIFGTTLDARTQSLLIVNNATNVVIKVCEFQFCTDPFLGVYYHNNNKTWVENEFRVYSSANNCTFEYISQPFLMDLEGKQGNFKNLREFVFKNVDGYFKIYSKHTPIDLVRDLPRGFAALEPLVDLPIGINITRFQTLLALHRSYLTPGKLESGWTTGAAAYYVGYLQQRTFLLSYNQNGTITDAVDCSLDPLSETKCTLKSLTVEKGIYQTSNFRVQPTISIVRFPNITNLCPFGEVFNASKFASVYAWNRKRISNCVADYSVLYNSTSFSTFKCYGVSPTKLNDLCFTNVYADSFVVKGDEVRQIAPGQTGVIADYNYKLPDDFTGCVIAWNSVKQDALTGDNYGYLYRLFRKSKLKPFERDISTEIYQAGSTPCNGQVGLNCYYPLERYGFHPTTGVNYQPFRVVVLSFELLNGPATVCGPKLSTTLVKDKCVNFNFNGLTGTGVLTTSKKQFLPFQQFGRDISDTTDAVRDPQTLEILDITPCSFGGVSVITPGTNTSNQVAVLYQDVNCTEVPMAIHAEQLTPAWRVYSAGANVFQTRAGCLVGAEHVNNSYECDIPVGAGICASYHSMSSFRSVNQRSIIAYTMSLGAENSVAYSNNSIAIPTNFTISVTTEILPVSMTKTSVDCTMYICGDSIECSNLLLQYGSFCTQLNRALTGIAVEQDKNTQEVFAQVKQIYKTPPIKDFGGFNFSQILPDPSKPSKRSFIEDLLFNKVTLADAGFIKQYGDCLGDIAARDLICAQKFNGLTVLPPLLTDEMIAQYTSALLAGTITSGWTFGAGAALQIPFAMQMAYRFNGIGVTQNVLYENQKLIANQFNSAIGKIQDSLSSTASALGKLQDVVNQNAQALNTLVKCLSSNFGAISSVLNDILSRLDKVEAEVQIDRLITGRLQCLQTYVTQQLIRAAEIRASANLAATKMSECVLGQSKRVDFCGKGYHLMSFPQSAPHGVVFLHVTYVPAQEKNFTTAPAICHEGKAHFPREGVFVSNGTHWFITQRNFYEPQIITTDNTFVSGSCDVVIGIVNNTVYDPLQPELDS

SEQ ID NO: 3355 - protein, 1139 aa, Artificial Sequence
  SARS-CoV-2/pangolin/Guangxi/P1E/2017__EPI_ISL_410539 spike protein (1-1139)(Q957C_S995C)
MFVFLFVLPLVSSQCVNLTTRTGIQPGYTNSSTRGVYYPDKVFRSSILHLTQDLFLPFFSNVTWFNTINYQGGFKKFDNPVLPFNDGVYFASTEKSNIIRGWIFGTTLDARTQSLLIVNNATNVVIKVCEFQFCTDPFLGVYYHNNNKTWVENEFRVYSSANNCTFEYISQPFLMDLEGKQGNFKNLREFVFKNVDGYFKIYSKHTPIDLVRDLPRGFAALEPLVDLPIGINITRFQTLLALHRSYLTPGKLESGWTTGAAAYYVGYLQQRTFLLSYNQNGTITDAVDCSLDPLSETKCTLKSLTVEKGIYQTSNFRVQPTISIVRFPNITNLCPFGEVFNASKFASVYAWNRKRISNCVADYSVLYNSTSFSTFKCYGVSPTKLNDLCFTNVYADSFVVKGDEVRQIAPGQTGVIADYNYKLPDDFTGCVIAWNSVKQDALTGGNYLYRLFRKSKLKPFERDISTEIYQAGSTPCNGQVGLNCYYPLERYGFHPTTGVNYQPFRVVVLSFELLNGPATVCGPKLSTTLVKDKCVNFNFNGLTGTGVLTTSKKQFLPFQQFGRDISDTTDAVRDPQTLEILDITPCSFGGVSVITPGTNTSNQVAVLYQDVNCTEVPMAIHAEQLTPAWRVYSAGANVFQTRAGCLVGAEHVNNSYECDIPVGAGICASYHSMSSLRSVNQRSIIAYTMSLGAENSVAYSNNSIAIPTNFTISVTTEILPVSMTKTSVDCTMYICGDSIECSNLLLQYGSFCTQLNRALTGIAVEQDKNTQEVFAQVKQIYKTPPIKDFGGFNFSQILPDPSKPSKRSFIEDLLFNKVTLADAGFIKQYGDCLGDIAARDLICAQKFNGLTVLPPLLTDEMIAQYTSALLAGTITSGWTFGAGAALQIPFAMQMAYRFNGIGVTQNVLYENQKLIANQFNSAIGKIQDSLSSTASALGKLQDVVNQNAQALNTLVKCLSSNFGAISSVLNDILSRLDKVEAEVQIDRLITGRLQCLQTYVTQQLIRAAEIRASANLAATKMSECVLGQSKRVDFCGKGYHLMSFPQSAPHGVVFLHVTYVPAQEKNFTTAPAICHEGKAHFPREGVFVSNGTHWFITQRNFYEPQIITTDNTFVSGSCDVVIGIVNNTVYDPLQPELDS

SEQ ID NO: 3356 - protein, 1147 aa, Artificial Sequence
  SARS-CoV-2/Wuhan/WIV05/2019__EPI_ISL_402128 spike protein (1-1147)(F970C_G999C)
MFVFLVLLPLVSSQCVNLTTRTQLPPAYTNSFTRGVYYPDKVFRSSVLHSTQDLFLPFFSNVTWFHAIHVSGTNGTKRFDNPVLPFNDGVYFASTEKSNIIRGWIFGTTLDSKTQSLLIVNNATNVVIKVCEFQFCNDPFLGVYYHKNNKSWMESEFRVYSSANNCTFEYVSQPFLMDLEGKQGNFKNLREFVFKNIDGYFKIYSKHTPINLVRDLPQGFSALEPLVDLPIGINITRFQTLLALHRSYLTPGDSSSGWTAGAAAYYVGYLQPRTFLLKYNENGTITDAVDCALDPLSETKCTLKSFTVEKGIYQTSNFRVQPTESIVRFPNITNLCPFGEVFNATRFASVYAWNRKRISNCVADYSVLYNSASFSTFKCYGVSPTKLNDLCFTNVYADSFVIRGDEVRQIAPGQTGKIADYNYKLPDDFTGCVIAWNSNNLDSKVGGNYNYLYRLFRKSNLKPFERDISTEIYQAGSTPCNGVEGFNCYFPLQSYGFQPTNGVGYQPYRVVVLSFELLHAPATVCGPKKSTNLVKNKCVNFNFNGLTGTGVLTESNKKFLPFQQFGRDIADTTDAVRDPQTLEILDITPCSFGGVSVITPGTNTSNQVAVLYQDVNCTEVPVAIHADQLTPTWRVYSTGSNVFQTRAGCLIGAEHVNNSYECDIPIGAGICASYQTQTNSPRRARSVASQSIIAYTMSLGAENSVAYSNNSIAIPTNFTISVTTEILPVSMTKTSVDCTMYICGDSTECSNLLLQYGSFCTQLNRALTGIAVEQDKNTQEVFAQVKQIYKTPPIKDFGGFNFSQILPDPSKPSKRSFIEDLLFNKVTLADAGFIKQYGDCLGDIAARDLICAQKFNGLTVLPPLLTDEMIAQYTSALLAGTITSGWTFGAGAALQIPFAMQMAYRFNGIGVTQNVLYENQKLIANQFNSAIGKIQDSLSSTASALGKLQDVVNQNAQALNTLVKQLSSNCGAISSVLNDILSRLDKVEAEVQIDRLITCRLQSLQTYVTQQLIRAAEIRASANLAATKMSECVLGQSKRVDFCGKGYHLMSFPQSAPHGVVFLHVTYVPAQEKNFTTAPAICHDGKAHFPREGVFVSNGTHWFVTQRNFYEPQIITTDNTFVSGNCDVVIGIVNNTVYDPLQPELDS

SEQ ID NO: 3357 - protein, 1143 aa, Artificial Sequence
  SARS-CoV-2/bat/Yunnan/RaTG13/2013__EPI_ISL_402131 spike protein (1-1143)(F966C_G995C)
MFVFLVLLPLVSSQCVNLTTRTQLPPAYTNSSTRGVYYPDKVFRSSVLHLTQDLFLPFFSNVTWFHAIHVSGTNGIKRFDNPVLPFNDGVYFASTEKSNIIRGWIFGTTLDSKTQSLLIVNNATNVVIKVCEFQFCNDPFLGVYYHKNNKSWMESEFRVYSSANNCTFEYVSQPFLMDLEGKQGNFKNLREFVFKNIDGYFKIYSKHTPINLVRDLPPGFSALEPLVDLPIGINITRFQTLLALHRSYLTPGDSSSGWTAGAAAYYVGYLQPRTFLLKYNENGTITDAVDCALDPLSETKCTLKSFTVEKGIYQTSNFRVQPTDSIVRFPNITNLCPFGEVFNATTFASVYAWNRKRISNCVADYSVLYNSTSFSTFKCYGVSPTKLNDLCFTNVYADSFVITGDEVRQIAPGQTGKIADYNYKLPDDFTGCVIAWNSKHIDAKEGGNFNYLYRLFRKANLKPFERDISTEIYQAGSKPCNGQTGLNCYYPLYRYGFYPTDGVGHQPYRVVVLSFELLNAPATVCGPKKSTNLVKNKCVNFNFNGLTGTGVLTESNKKFLPFQQFGRDIADTTDAVRDPQTLEILDITPCSFGGVSVITPGTNASNQVAVLYQDVNCTEVPVAIHADQLTPTWRVYSTGSNVFQTRAGCLIGAEHVNNSYECDIPIGAGICASYQTQTNSRSVASQSIIAYTMSLGAENSVAYSNNSIAIPTNFTISVTTEILPVSMTKTSVDCTMYICGDSTECSNLLLQYGSFCTQLNRALTGIAVEQDKNTQEVFAQVKQIYKTPPIKDFGGFNFSQILPDPSKPSKRSFIEDLLFNKVTLADAGFIKQYGDCLGDIAARDLICAQKFNGLTVLPPLLTDEMIAQYTSALLAGTITSGWTFGAGAALQIPFAMQMAYRFNGIGVTQNVLYENQKLIANQFNSAIGKIQDSLSSTASALGKLQDVVNQNAQALNTLVKQLSSNCGAISSVLNDILSRLDKVEAEVQIDRLITCRLQSLQTYVTQQLIRAAEIRASANLAATKMSECVLGQSKRVDFCGKGYHLMSFPQSAPHGVVFLHVTYVPAQEKNFTTAPAICHDGKAHFPREGVFVSNGTHWFVTQRNFYEPQIITTDNTFVSGSCDVVIGIVNNTVYDPLQPELDS

SEQ ID NO: 3358 - protein, 1147 aa, Artificial Sequence
  SARS-CoV-2/Wuhan/HBCDC-HB-01/2019__EPI_ISL_402132 spike protein (1-1147)(F970C_G999C)
MFVFLVLLPLVSSQCVNLTTRTQLPPAYTNSITRGVYYPDKVFRSSVLHSTQDLFLPFFSNVTWFHAIHVSGTNGTKRFDNPVLPFNDGVYFASTEKSNIIRGWIFGTTLDSKTQSLLIVNNATNVVIKVCEFQFCNDPFLGVYYHKNNKSWMESEFRVYSSANNCTFEYVSQPFLMDLEGKQGNFKNLREFVFKNIDGYFKIYSKHTPINLVRDLPQGFSALEPLVDLPIGINITRFQTLLALHRSYLTPGDSSSGWTAGAAAYYVGYLQPRTFLLKYNENGTITDAVDCALDPLSETKCTLKSFTVEKGIYQTSNFRVQPTESIVRFPNITNLCPFGEVFNATRFASVYAWNRKRISNCVADYSVLYNSASFSTFKCYGVSPTKLNDLCFTNVYADSFVIRGDEVRQIAPGQTGKIADYNYKLPDDFTGCVIAWNSNNLDSKVGGNYNYLYRLFRKSNLKPFERDISTEIYQAGSTPCNGVEGFNCYFPLQSYGFQPTNGVGYQPYRVVVLSFELLHAPATVCGPKKSTNLVKNKCVNFNFNGLTGTGVLTESNKKFLPFQQFGRDIADTTDAVRDPQTLEILDITPCSFGGVSVITPGTNTSNQVAVLYQDVNCTEVPVAIHADQLTPTWRVYSTGSNVFQTRAGCLIGAEHVNNSYECDIPIGAGICASYQTQTNSPRRARSVASQSIIAYTMSLGAENSVAYSNNSIAIPTNFTISVTTEILPVSMTKTSVDCTMYICGDSTECSNLLLQYGSFCTQLNRALTGIAVEQDKNTQEVFAQVKQIYKTPPIKDFGGFNFSQILPDPSKPSKRSFIEDLLFNKVTLADAGFIKQYGDCLGDIAARDLICAQKFNGLTVLPPLLTDEMIAQYTSALLAGTITSGWTFGAGAALQIPFAMQMAYRFNGIGVTQNVLYENQKLIANQFNSAIGKIQDSLSSTASALGKLQDVVNQNAQALNTLVKQLSSNCGAISSVLNDILSRLDKVEAEVQIDRLITCRLQSLQTYVTQQLIRAAEIRASANLAATKMSECVLGQSKRVDFCGKGYHLMSFPQSAPHGVVFLHVTYVPAQEKNFTTAPAICHDGKAHFPREGVFVSNGTHWFVTQRNFYEPQIITTDNTFVSGNCDVVIGIVNNTVYDPLQPELDS

SEQ ID NO: 3359 - protein, 1147 aa, Artificial Sequence
  SARS-CoV-2/Guangdong/20SF028/2020__EPI_ISL_403936 spike protein (1-1147)(F970C_G999C)
MFVFLVLLPLVSSQCVNLTTRTQLPPAYTNSFTRGVYYPDKVFRSSVLYSTQDLFLPFFSNVTWFHAIHVSGTNGTKRFDNPVLPFNDGVYFASTEKSNIIRGWIFGTTLDSKTQSLLIVNNATNVVIKVCEFQFCNDPFLGVYYHKNNKSWMESEFRVYSSANNCTFEYVSQPFLMDLEGKQGNFKNLREFVFKNIDGYFKIYSKHTPINLVRDLPQGFSALEPLVDLPIGINITRFQTLLALHRSYLTPGDSSSGWTAGAAAYYVGYLQPRTFLLKYNENGTITDAVDCALDPLSETKCTLKSFTVEKGIYQTSNFRVQPTESIVRFPNITNLCPFGEVFNATRFASVYAWNRKRISNCVADYSVLYNSASFSTFKCYGVSPTKLNDLCFTNVYADSFVIRGDEVRQIAPGQTGKIADYNYKLPDDFTGCVIAWNSNNLDSKVGGNYNYLYRLFRKSNLKPFERDISTEIYQAGSTPCNGVEGFNCYFPLQSYGFQPTNGVGYQPYRVVVLSFELLHAPATVCGPKKSTNLVKNKCVNFNFNGLTGTGVLTESNKKFLPFQQFGRDIADTTDAVRDPQTLEILDITPCSFGGVSVITPGTNTSNQVAVLYQDVNCTEVPVAIHADQLTPTWRVYSTGSNVFQTRAGCLIGAEHVNNSYECDIPIGAGICASYQTQTNSPRRARSVASQSIIAYTMSLGAENSVAYSNNSIAIPTNFTISVTTEILPVSMTKTSVDCTMYICGDSTECSNLLLQYGSFCTQLNRALTGIAVEQDKNTQEVFAQVKQIYKTPPIKDFGGFNFSQILPDPSKPSKRSFIEDLLFNKVTLADAGFIKQYGDCLGDIAARDLICAQKFNGLTVLPPLLTDEMIAQYTSALLAGTITSGWTFGAGAALQIPFAMQMAYRFNGIGVTQNVLYENQKLIANQFNSAIGKIQDSLSSTASALGKLQDVVNQNAQALNTLVKQLSSNCGAISSVLNDILSRLDKVEAEVQIDRLITCRLQSLQTYVTQQLIRAAEIRASANLAATKMSECVLGQSKRVDFCGKGYHLMSFPQSAPHGVVFLHVTYVPAQEKNFTTAPAICHDGKAHFPREGVFVSNGTHWFVTQRNFYEPQIITTDNTFVSGNCDVVIGIVNNTVYDPLQPELDS

SEQ ID NO: 3360 - protein, 1147 aa, Artificial Sequence
  SARS-CoV-2/Shenzhen/SZTH-001/2020__EPI_ISL_406592 spike protein (1-1147)(F970C_G999C)
MFVFLVLLPLVSSQCVNLTTRTQLPPAYTNSFTRGVYYPDKVFRSSVLHSTQDLFLPFFSNVTWFHAIHVSGTNGTKRFDNPVLPFNDGVYFASTEKSNIIRGWIFGTTLDSKTQSLLIVNNATNVVIKVCEFQFCNDPFLGVYYHKNNKSWMESEFRVYSSANNCTFEYVSQPFLMDLEGKQGNFKNLREFVFKNIDGYFKIYSKHTPINLVRDLPQGFSALEPLVDLPIGINITRFQTLLALHRSYLTPGDSSSGWTAGAAAYYVGYLQPRTFLLKYNENGTITDAVDCALDPLSETKCTLKSFTVEKGIYQTSNFRVQPTESIVRFPNITNLCPFGEVFNATRFASVYAWNRKRISNCVADYSVLYNSASFSTFKCYGVSPTKLNDLCFTNVYADSFVIRGDEVRQIAPGQTGKIADYNYKLPDDFTGCVIAWNSNNLDSKVGGNYNYLYRLFRKSNLKPFERDISTEIYQAGSTPCNGVEGFNCYFPLQSYGFQPTNGVGYQPYRVVVLSFELLHAPATVCGPKKSTNLVKNKCVNFNFNGLTGTGVLTESNKKFLPFQQFGRDIADTTDAVRDPQTLEILDITPCSFGGVSVITPGTNTSNQVAVLYQDVNCTEVPVAIHADQLTPTWRVYSTGSNVFQTRAGCLIGAEHVNNSYECDIPIGAGICASYQTQTNSPRRARSVASQSIIAYTMSLGAENSVAYSNNSIAIPTNFTISVTTEILPVSMTKTSVDCTMYICGDSTECSNLLLQYGSFCTQLNRALTGIAVEQDKNTQEVFAQVKQIYKTPPIKDFGGFNFSQILPDPSKPSKRSFIEDLLFNKVTLADAGFIKQYGDCLGDIAARDLICAQKFNGLTVLPPLLTDEMIAQYTSALLAGTITSGWTFGAGAALQIPFAMQMAYRFNGIGVTQNVLYENQKLIANQFNSAIGKIQDSLSSTASALGKLQDVVNQNAQALNTLVKQLSSNCGAISSVLNDILSRLDKVEAEVQIDRLITCRLQSLQTYVTQQLIRAAEIRASANLAATKMSECVLGQSKRVDFCGKGYHLMSFPQSAPHGVVFLHVTYVPAQEKNFTTAPAICHDGKAHFPREGVFVSNGTHWFVTQRNFYEPQIITTDNTFVSGNCDVLIGIVNNTVYDPLQPELDS

SEQ ID NO: 3361 - protein, 1147 aa, Artificial Sequence
  SARS-CoV-2/Shenzhen/SZTH-004/2020__EPI_ISL_406595 spike protein (1-1147)(F970C_G999C)
MFVFLVLLPLVSSQCVNLTTRTQLPPAYTNSFTRGVYYPDKVFRSSVLHSTQDLFLPFFSNVTWFHAIHVSGTNGTKRFDNPVLPFNDGVYFASTEKSNIIRGWIFGTTLDSKTQSLLIVNNATNVVIKVCEFQFCNDPFLGVYYHKNNKSWMESEFRVYSSANNCTFEYVSQPFLMDLEGKQGNFKNLREFVFKNIDGYFKIYSKHTPINLVRDLPQGFSALEPLVDLPIGINITRFQTLLALHRSYLTPGDSSSGWTAGAAAYYVGYLQPRTFLLKYNENGTITDAVDCALDPLSETKCTLKSFTVEKGIYQTSNFRVQPTESIVRFPNITNLCPFGEVFNATRFASVYAWDRKRISNCVAYYSVLYNSASFSTFKCYGVSPTKLNDLCFTNVYADSFVIRGDEVRQIAPGQTGKIADYNYKLPDDFTGCVIAWNSNNLDSKVGGNYNYLYRLFRKSNLKPFERDISTEIYQAGSTPCNGVEGFNCYFPLQSYGFQPTNGVGYQPYRVVVLSFELLHAPATVCGPKKSTNLVKNKCVNFNFNGLTGTGVLTESNKKFLPFQQFGRDIADTTDAVRDPQTLEILDITPCSFGGVSVITPGTNTSNQVAVLYQDVNCTEVPVAIHADQLTPTWRVYSTGSNVFQTRAGCLIGAEHVNNSYECDIPIGAGICASYQTQTNSPRRARSVASQSIIAYTMSLGAENSVAYSNNSIAIPTNFTISVTTEILPVSMTKTSVDCTMYICGDSTECSNLLLQYGSFCTQLNRALTGIAVEQDKNTQEVFAQVKQIYKTPPIKDFGGFNFSQILPDPSKPSKRSFIEDLLFNKVTLADAGFIKQYGDCLGDIAARDLICAQKFNGLTVLPPLLTDEMIAQYTSALLAGTITSGWTFGAGAALQIPFAMQMAYRFNGIGVTQNVLYENQKLIANQFNSAIGKIQDSLSSTASALGKLQDVVNQNAQALNTLVKQLSSNCGAISSVLNDILSRLDKVEAEVQIDRLITCRLQSLQTYVTQQLIRAAEIRASANLAATKMSECVLGQSKRVDFCGKGYHLMSFPQSAPHGVVFLHVTYVPAQEKNFTTAPAICHDGKAHFPREGVFVSNGTHWFVTQRNFYEPQIITTDNTFVSGNCDVVIGIVNNTVYDPLQPELDS

SEQ ID NO: 3362 - protein, 1147 aa, Artificial Sequence
  SARS-CoV-2/France/IDF0372/2020__EPI_ISL_406596 spike protein (1-1147)(F970C_G999C)
MFVFLVLLPLVSSQCVNLTTRTQLPPAYTNSFTRGVYYPDKVFRSSVLHSTQDLFLPFFSNVTWFHAIHVSGTNGTKRFDNPVLPFNDGVYFASTEKSNIIRGWIFGTTLDSKTQSLLIVNNATNVVIKVCEFQFCNDPFLGVYYHKNNKSWMESEFRVYSSANNCTFEYVSQPFLMDLEGKQGNFKNLREFVFKNIDGYFKIYSKHTPINLVRDLPQGFSALEPLVDLPIGINITRFQTLLALHRSYLTPGDSSSGWTAGAAAYYVGYLQPRTFLLKYNENGTITDAVDCALDPLSETKCTLKSFTVEKGIYQTSNFRVQPTESIVRFPNITNLCPFGEVFNATRFASVYAWNRKRISNCVADYSFLYNSASFSTFKCYGVSPTKLNDLCFTNVYADSFVIRGDEVRQIAPGQTGKIADYNYKLPDDFTGCVIAWNSNNLDSKVGGNYNYLYRLFRKSNLKPFERDISTEIYQAGSTPCNGVEGFNCYFPLQSYGFQPTNGVGYQPYRVVVLSFELLHAPATVCGPKKSTNLVKNKCVNFNFNGLTGTGVLTESNKKFLPFQQFGRDIADTTDAVRDPQTLEILDITPCSFGGVSVITPGTNTSNQVAVLYQDVNCTEVPVAIHADQLTPTWRVYSTGSNVFQTRAGCLIGAEHVNNSYECDIPIGAGICASYQTQTNSPRRARSVASQSIIAYTMSLGAENSVAYSNNSIAIPTNFTISVTTEILPVSMTKTSVDCTMYICGDSTECSNLLLQYGSFCTQLNRALTGIAVEQDKNTQEVFAQVKQIYKTPPIKDFGGFNFSQILPDPSKPSKRSFIEDLLFNKVTLADAGFIKQYGDCLGDIAARDLICAQKFNGLTVLPPLLTDEMIAQYTSALLAGTITSGWTFGAGAALQIPFAMQMAYRFNGIGVTQNVLYENQKLIANQFNSAIGKIQDSLSSTASALGKLQDVVNQNAQALNTLVKQLSSNCGAISSVLNDILSRLDKVEAEVQIDRLITCRLQSLQTYVTQQLIRAAEIRASANLAATKMSECVLGQSKRVDFCGKGYHLMSFPQSAPHGVVFLHVTYVPAQEKNFTTAPAICHDGKAHFPREGVFVSNGTHWFVTQRNFYEPQIITTDNTFVSGNCDVVIGIVNNTVYDPLQPELDS

SEQ ID NO: 3363 - protein, 1147 aa, Artificial Sequence
  SARS-CoV-2/Australia/VIC01/2020__EPI_ISL_406844 spike protein (1-1147)(F970C_G999C)
MFVFLVLLPLVSSQCVNLTTRTQLPPAYTNSFTRGVYYPDKVFRSSVLHSTQDLFLPFFSNVTWFHAIHVSGTNGTKRFDNPVLPFNDGVYFASTEKSNIIRGWIFGTTLDSKTQSLLIVNNATNVVIKVCEFQFCNDPFLGVYYHKNNKSWMESEFRVYSSANNCTFEYVSQPFLMDLEGKQGNFKNLREFVFKNIDGYFKIYSKHTPINLVRDLPQGFSALEPLVDLPIGINITRFQTLLALHRRYLTPGDSSSGWTAGAAAYYVGYLQPRTFLLKYNENGTITDAVDCALDPLSETKCTLKSFTVEKGIYQTSNFRVQPTESIVRFPNITNLCPFGEVFNATRFASVYAWNRKRISNCVADYSVLYNSASFSTFKCYGVSPTKLNDLCFTNVYADSFVIRGDEVRQIAPGQTGKIADYNYKLPDDFTGCVIAWNSNNLDSKVGGNYNYLYRLFRKSNLKPFERDISTEIYQAGSTPCNGVEGFNCYFPLQSYGFQPTNGVGYQPYRVVVLSFELLHAPATVCGPKKSTNLVKNKCVNFNFNGLTGTGVLTESNKKFLPFQQFGRDIADTTDAVRDPQTLEILDITPCSFGGVSVITPGTNTSNQVAVLYQDVNCTEVPVAIHADQLTPTWRVYSTGSNVFQTRAGCLIGAEHVNNSYECDIPIGAGICASYQTQTNSPRRARSVASQSIIAYTMSLGAENSVAYSNNSIAIPTNFTISVTTEILPVSMTKTSVDCTMYICGDSTECSNLLLQYGSFCTQLNRALTGIAVEQDKNTQEVFAQVKQIYKTPPIKDFGGFNFSQILPDPSKPSKRSFIEDLLFNKVTLADAGFIKQYGDCLGDIAARDLICAQKFNGLTVLPPLLTDEMIAQYTSALLAGTITSGWTFGAGAALQIPFAMQMAYRFNGIGVTQNVLYENQKLIANQFNSAIGKIQDSLSSTASALGKLQDVVNQNAQALNTLVKQLSSNCGAISSVLNDILSRLDKVEAEVQIDRLITCRLQSLQTYVTQQLIRAAEIRASANLAATKMSECVLGQSKRVDFCGKGYHLMSFPQSAPHGVVFLHVTYVPAQEKNFTTAPAICHDGKAHFPREGVFVSNGTHWFVTQRNFYEPQIITTDNTFVSGNCDVVIGIVNNTVYDPLQPELDS

SEQ ID NO: 3364 - protein, 1147 aa, Artificial Sequence
  SARS-CoV-2/Germany/BavPat1/2020__EPI_ISL_406862 spike protein (1-1147)(F970C_G999C)
MFVFLVLLPLVSSQCVNLTTRTQLPPAYTNSFTRGVYYPDKVFRSSVLHSTQDLFLPFFSNVTWFHAIHVSGTNGTKRFDNPVLPFNDGVYFASTEKSNIIRGWIFGTTLDSKTQSLLIVNNATNVVIKVCEFQFCNDPFLGVYYHKNNKSWMESEFRVYSSANNCTFEYVSQPFLMDLEGKQGNFKNLREFVFKNIDGYFKIYSKHTPINLVRDLPQGFSALEPLVDLPIGINITRFQTLLALHRSYLTPGDSSSGWTAGAAAYYVGYLQPRTFLLKYNENGTITDAVDCALDPLSETKCTLKSFTVEKGIYQTSNFRVQPTESIVRFPNITNLCPFGEVFNATRFASVYAWNRKRISNCVADYSVLYNSASFSTFKCYGVSPTKLNDLCFTNVYADSFVIRGDEVRQIAPGQTGKIADYNYKLPDDFTGCVIAWNSNNLDSKVGGNYNYLYRLFRKSNLKPFERDISTEIYQAGSTPCNGVEGFNCYFPLQSYGFQPTNGVGYQPYRVVVLSFELLHAPATVCGPKKSTNLVKNKCVNFNFNGLTGTGVLTESNKKFLPFQQFGRDIADTTDAVRDPQTLEILDITPCSFGGVSVITPGTNTSNQVAVLYQGVNCTEVPVAIHADQLTPTWRVYSTGSNVFQTRAGCLIGAEHVNNSYECDIPIGAGICASYQTQTNSPRRARSVASQSIIAYTMSLGAENSVAYSNNSIAIPTNFTISVTTEILPVSMTKTSVDCTMYICGDSTECSNLLLQYGSFCTQLNRALTGIAVEQDKNTQEVFAQVKQIYKTPPIKDFGGFNFSQILPDPSKPSKRSFIEDLLFNKVTLADAGFIKQYGDCLGDIAARDLICAQKFNGLTVLPPLLTDEMIAQYTSALLAGTITSGWTFGAGAALQIPFAMQMAYRFNGIGVTQNVLYENQKLIANQFNSAIGKIQDSLSSTASALGKLQDVVNQNAQALNTLVKQLSSNCGAISSVLNDILSRLDKVEAEVQIDRLITCRLQSLQTYVTQQLIRAAEIRASANLAATKMSECVLGQSKRVDFCGKGYHLMSFPQSAPHGVVFLHVTYVPAQEKNFTTAPAICHDGKAHFPREGVFVSNGTHWFVTQRNFYEPQIITTDNTFVSGNCDVVIGIVNNTVYDPLQPELDS

SEQ ID NO: 3365 - protein, 1147 aa, Artificial Sequence
  SARS-CoV-2/Wuhan/HBCDC-HB-02/2020__EPI_ISL_412978 spike protein (1-1147)(F970C_G999C)
MFVFLVLLPLVSSQCVNLTTRTQLPPAYTNSFTRGVYYPDKVFRSSVLHSTQDLFLPFFSNVTWFHAIHVSGTNGTKRFDNPVLPFNDGVYFASTEKSNIIRGWIFGTTLDSKTQSLLIVNNATNVVIKVCEFQFCNDPFLGVYYHKNNKSWMESEFRVYSSANNCTFEYVSQPFLMDLEGKQGNFKNLREFVFKNIDGYFKIYSKHTPINLVRDLPQGFSALEPLVDLPIGINITRFQTLLALHRSYLTPGDSSSGWTAGAAAYYVGYLQPRTFLLKYNENGTITDAVDCALDPLSETKCTLKSFTVEKGIYQTSNFRVQPTESIVRFPNITNLCPFGEVFNATRFASVYAWNRKRISNCVADYSVLYNSASFSTFKCYGVSPTKLNDLCFTNVYADSFVIRGDEVRQIAPGQTGKIADYNYKLPDDFTGCVIAWNSNNLDSKVGGNYNYLYRLFRKSNLKPFERDISTEIYQAGSTPCNGVEGFNCYFPLQSYGFQPTNGVGYQPYRVVVLSFELLHAPATVCGPKKSTNLVKNKCVNFNFNGLTGTGVLTESNKKFLPFQQFGRDIADTTDAVRDPQTLEILDITPCSFGGVSVITPGTNTSNQVAVLYQDVNCTEVPVAIHADQLTPTWRVYSTGSNVFQTRAGCLIGAEHVNNSYECDIPIGAGICASYQTQTNSPRRARSVASQSIIAYTMSLGAENSVAYSNNSIAIPTNFTISVTTEILPVSMTKTSVDCTMYICGDSTECSNFLLQYGSFCTQLNRALTGIAVEQDKNTQEVFAQVKQIYKTPPIKDFGGFNFSQILPDPSKPSKRSFIEDLLFNKVTLADAGFIKQYGDCLGDIAARDLICAQKFNGLTVLPPLLTDEMIAQYTSALLAGTITSGWTFGAGAALQIPFAMQMAYRFNGIGVTQNVLYENQKLIANQFNSAIGKIQDSLSSTASALGKLQDVVNQNAQALNTLVKQLSSNCGAISSVLNDILSRLDKVEAEVQIDRLITCRLQSLQTYVTQQLIRAAEIRASANLAATKMSECVLGQSKRVDFCGKGYHLMSFPQSAPHGVVFLHVTYVPAQEKNFTTAPAICHDGKAHFPREGVFVSNGTHWFVTQRNFYEPQIITTDNTFVSGNCDVVIGIVNNTVYDPLQPELDS

SEQ ID NO: 3366 - protein, 1147 aa, Artificial Sequence
  SARS-CoV-2/Australia/QLD02/2020__EPI_ISL_407896 spike protein (1-1147)(F970C_G999C)
MFVFLVLLPLVSSQCVNLTTRTQLPPAYTNSFTRGVYYPDKVFRSSVLHSTQDLFLPFFSNVTWFHAIHVSGTNGTKRFDNPVLPFNDGVYFASTEKSNIIRGWIFGTTLDSKTQSLLIVNNATNVVIKVCEFQFCNDPFLGVYYHKNNKSWMESEFRVYSSANNCTFEYVSQPFLMDLEGKQGNFKNLREFVFKNIDGYFKIYSKHTPINLVRDLPQGFSALEPLVDLPIGINITRFQTLLALHRSYLTPGDSSSGWTAGAAAYYVGYLQPRTFLLKYNENGTITDAVDCALDPLSETKCTLKSFTVEKGIYQTSNFRVQPTESIVRFPNITNLCPFGEVFNATRFASVYAWNRKRISNCVADYSVLYNSASFSTFKCYGVSPTKLNDLCFTNVYADSFVIRGDEVRQIAPGQTGKIADYNYKLPDDFTGCVIAWNSNNLDSKVGGNYNYLYRLFRKSNLKPFERDISTEIYQAGSTPCNGVEGFNCYFPLQSYGFQPTNGVGYQPYRVVVLSFELLHAPATVCGPKKSTNLVKNKCVNFNFNGLTGTGVLTESNKKFLPFQQFGRDIADTTDAVRDPQTLEILDITPCSFGGVSVITPGTNTSNQVAVLYQDVNCTEVPVAIHADQLTPTWRVYSTGSNVFQTRAGCLIGAEHVNNSYECDIPIGAGICASYQTQTNSPRRARSVASQSIIAYTMSLGAENSVAYSNNSIAIPTNFTISVTTEILPVSMTKTSVDCTMYICGDSTECSNLLLQYGSFCTQLNRALTGIAVEQDKNTQEVFAQVKQIYKTPPIKDFGGFNFSQILPDPSKPSKRSFIEDLLFNKVTLADAGFIKQYGDCLGDIAARDLICAQKFNGLTVLPPLLTDEMIAQYTSALLAGTITSGWTFGAGAALQIPFAMQMAYRFNGIGVTQNVLYENQKLIANQFNSAIGKIQDSLSSTASALGKLQDVVNQNAQALNTLVKQLSSNCGAISSVLNDILSRLDKVEAEVQIDRLITCRLQSLQTYVTQQLIRAAEIRASANLAATKMSECVLGQSKRVDFCGKGYHLMSFPQSAPHGVVFLHVTYVPAQEKNFTTAPAICHDGKAHFPREGVFVSNGTHWFVTQRNFYEPQIITTDNTFVSGNCDVVIGIVNNTVYDPLQLELDS

SEQ ID NO: 3367 - protein, 1147 aa, Artificial Sequence
  SARS-CoV-2/India/1-31/2020__EPI_ISL_413523 spike protein (1-1147)(F970C_G999C)
MFVFLVLLPLVSSQCVNLTTRTQLPPAYTNSFTRGVYYPDKVFRSSVLHSTQDLFLPFFSNVTWFHAIHVSGTNGTKRFDNPVLPFNDGVYFASTEKSNIIRGWIFGTTLDSKTQSLLIVNNATNVVIKVCEFQFCNDPFLGVYYHKNNKSWMESEFRVYSSANNCTFEYVSQPFLMDLEGKQGNFKNLREFVFKNIDGYFKIYSKHTPINLVRDLPQGFSALEPLVDLPIGINITRFQTLLALHRSYLTPGDSSSGWTAGAAAYYVGYLQPRTFLLKYNENGTITDAVDCALDPLSETKCTLKSFTVEKGIYQTSNFRVQPTESIVRFPNITNLCPFGEVFNATRFASVYAWNRKRISNCVADYSVLYNSASFSTFKCYGVSPTKLNDLCFTNVYADSFVIRGDEVRQIAPGQTGKIADYNYKLPDDFTGCVIAWNSNNLDSKVGGNYNYLYRLFRKSNLKPFERDISTEIYQAGSTPCNGVEGFNCYFPLQSYGFQPTNGVGYQPYRVVVLSFELLHAPATVCGPKKSTNLVKNKCVNFNFNGLTGTGVLTESNKKFLPFQQFGRDIADTTDAVRDPQTLEILDITPCSFGGVSVITPGTNTSNQVAVLYQDVNCTEVPVAIHADQLTPTWRVYSTGSNVFQTRAGCLIGAEHVNNSYECDIPIGAGICASYQTQTNSPRRARSVASQSIIAYTMSLGAENSVAYSNNSIAIPTNFTISVTTEILPVSMTKTSVDCTMYICGDSTECSNLLLQYGSFCTQLNRALTGIAVEQDKNTQEVFAQVKQIYKTPPIKDFGGFNFSQILPDPSKPSKRSFIEDLLFNKVTLADAGFIKQYGDCLGDIAARDLICAQKFNGLTVLPPLLTDEMIAQYTSALLAGTITSGWTFGAGAALQIPFAMQMAYRFNGIGVTQNVLYENQKLIANQFNSVIGKIQDSLSSTASALGKLQDVVNQNAQALNTLVKQLSSNCGAISSVLNDILSRLDKVEAEVQIDRLITCRLQSLQTYVTQQLIRAAEIRASANLAATKMSECVLGQSKRVDFCGKGYHLMSFPQSAPHGVVFLHVTYVPAQEKNFTTAPAICHDGKAHFPREGVFVSNGTHWFVTQRNFYEPQIITTDNTFVSGNCDVVIGIVNNTVYDPLQPELDS

SEQ ID NO: 3368 - protein, 1147 aa, Artificial Sequence
  SARS-CoV-2/Guangdong/GD2020087-P0008/2020__EPI_ISL_413863 spike protein (1-1147)(F970C_G999C)
MFVFLVLLPLVSSQCVNLTTRTQLPPAYTNSFTRGVYYPDKVFRSSVLHSTQDLFLPFFSNVTWFHAIHVSGTNGTKRFDNPVLPFNDGVYFASTEKSNIIRGWIFGTTLDSKTQSLLIVNNATNVVIKVCEFQFCNDPFLGVYYHKNNKSWMESEFRVYSSANNCTFEYVSQPFLMDLEGKQGNFKNLREFVFKNIDGYFKIYSKHTPINLVRDLPQGFSALEPLVDLPIGINITRFQTLLALHRSYLTPGDSSSGWTAGAAAYYVGYLQPRTFLLKYNENGTITDAVDCALDPLSETKCTLKSFTVEKGIYQTSNFRVQPTESIVRFPNITNLCPFGEVFNATRFASVYAWNRKRISNCVADYSVLYNSASFSTFKCYGVSPTKLNDLCFTNVYADSFVIRGDEVREIAPGQTGKIADYNYKLPDDFTGCVIAWNSNNLDSKVGGNYNYLYRLFRKSNLKPFERDISTEIYQAGSTPCNGVEGFNCYFPLQSYGFQPTNGVGYQPYRVVVLSFELLHAPATVCGPKKSTNLVKNKCVNFNFNGLTGTGVLTESNKKFLPFQQFGRDIADTTDAVRDPQTLEILDITPCSFGGVSVITPGTNTSNQVAVLYQDVNCTEVPVAIHADQLTPTWRVYSTGSNVFQTRAGCLIGAEHVNNSYECDIPIGAGICASYQTQTNSPRRARSVASQSIIAYTMSLGAENSVAYSNNSIAIPTNFTISVTTEILPVSMTKTSVDCTMYICGDSTECSNLLLQYGSFCTQLNRALTGIAVEQDKNTQEVFAQVKQIYKTPPIKDFGGFNFSQILPDPSKPSKRSFIEDLLFNKVTLADAGFIKQYGDCLGDIAARDLICAQKFNGLTVLPPLLTDEMIAQYTSALLAGTITSGWTFGAGAALQIPFAMQMAYRFNGIGVTQNVLYENQKLIANQFNSAIGKIQDSLSSTASALGKLQDVVNQNAQALNTLVKQLSSNCGAISSVLNDILSRLDKVEAEVQIDRLITCRLQSLQTYVTQQLIRAAEIRASANLAATKMSECVLGQSKRVDFCGKGYHLMSFPQSAPHGVVFLHVTYVPAQEKNFTTAPAICHDGKAHFPREGVFVSNGTHWFVTQRNFYEPQIITTDNTFVSGNCDVVIGIVNNTVYDPLQPELDS

SEQ ID NO: 3369 - protein, 1147 aa, Artificial Sequence
  SARS-CoV-2/Sweden/01/2020__EPI_ISL_411951 spike protein (1-1147)(F970C_G999C)
MFVFLVLLPLVSSQCVNLTTRTQLPPAYTNSFTRGVYYPDKVFRSSVLHSTQDLFLPFFSNVTWFHAIHVSGTNGTKRFDNPVLPFNDGVYFASTEKSNIIRGWIFGTTLDSKTQSLLIVNNATNVVIKVCEFQFCNDPFLGVYYHKNNKSWMESEFRVYSSANNCTFEYVSQPFLMDLEGKQGNFKNLREFVFKNIDGYFKIYSKHTPINLVRDLPQGFSALEPLVDLPIGINITRFQTLLALHRSYLTPGDSSSGWTAGAAAYYVGYLQPRTFLLKYNENGTITDAVDCALDPLSETKCTLKSFTVEKGIYQTSNFRVQPTESIVRFPNITNLCPFGEVFNATRFASVYAWNRKRISNCVADYSVLYNSASFSTFKCYGVSPTKLNDLCFTNVYADSFVIRGDEVRQIAPGQTGKIADYNYKLPDDFTGCVIAWNSNNLDSKVGGNYNYLYRLFRKSNLKPFERDISTEIYQAGSTPCNGVEGFNCYFPLQSYGFQPTNGVGYQPYRVVVLSFELLHAPATVCGPKKSTNLVKNKCVNFNFNGLTGTGVLTESNKKFLPFQQFGRDIADTTDAVRDPQTLEILDITPCSFGGVSVITPGTNTSNQVAVLYQDVNCTEVPVAIHADQLTPTWRVYSTGSNVFQTRAGCLIGAEHVNNSYECDIPIGAGICASYQTQTNSPRRARSVASQSIIAYTMSLGAENSVAYSNNSIAIPTNFTISVTTEILPVSMTKTSVDCTMYICGDSTECSNLLLQYGSFCTQLNRALTGIAVEQDKNTQEVFAQVKQIYKTPPIKDCGGFNFSQILPDPSKPSKRSFIEDLLFNKVTLADAGFIKQYGDCLGDIAARDLICAQKFNGLTVLPPLLTDEMIAQYTSALLAGTITSGWTFGAGAALQIPFAMQMAYRFNGIGVTQNVLYENQKLIANQFNSAIGKIQDSLSSTASALGKLQDVVNQNAQALNTLVKQLSSNCGAISSVLNDILSRLDKVEAEVQIDRLITCRLQSLQTYVTQQLIRAAEIRASANLAATKMSECVLGQSKRVDFCGKGYHLMSFPQSAPHGVVFLHVTYVPAQEKNFTTAPAICHDGKAHFPREGVFVSNGTHWFVTQRNFYEPQIITTDNTFVSGNCDVVIGIVNNTVYDPLQPELDS

SEQ ID NO: 3370 - protein, 1147 aa, Artificial Sequence
  SARS-CoV-2/Tianmen/HBCDC-HB-07/2020__EPI_ISL_412983 spike protein (1-1147)(F970C_G999C)
MFVFLVLLPLVSSQCVNLTTRTQLPPAYTNSFTRGVYYPDKVFRSSVLHSTQDLFLPFFSNVTWFHAIHVSGTNGTKRFDNPVLPFNDGVYFASTEKSNIIRGWIFGTTLDSKTQSLLIVNNATNVVIKVCEFQFCNDPFLGVYYHKNNKSWMESEFRVYSSANNCTFEYVSQPFLMDLEGKQGNFKNLREFVFKNIDGYFKIYSKHTPINLVRDLPQGFSALEPLVDLPIGINITRFQTLLALHRSYLTPGDSSSGWTAGAAAYYVGYLQPRTFLLKYNENGTITDAVDCALDPLSETKCTLKSFTVEKGIYQTSNFRVQPTESIVRFPNITNLCPFGEVFNATRFASVYAWNRKRISNCVADYSVLYNSASFSTFKCYGVSPTKLNDLCFTNVYADSFVIRGDEVRQIAPGQTGKIADYNYKLPDDFTGCVIAWNSNNLDSKVGGNYNYLYRLFRKSNLKPFERDISTEIYQAGSTPCNGVEGFNCYFPLQSYGFQPTNGVGYQPYRVVVLSFELLHAPATVCGPKKSTNLVKNKCVNFNFNGLTGTGVLTESNKKFLPFQQFGRDIADTTDAVRDPQTLEILDITPCSFGGVSVITPGTNTSNQVAVLYQDLNCTEVPVAIHADQLTPTWRVYSTGSNVFQTRAGCLIGAEHVNNSYECDIPIGAGICASYQTQTNSPRRARSVASQSIIAYTMSLGAENSVAYSNNSIAIPTNFTISVTTEILPVSMTKTSVDCTMYICGDSTECSNLLLQYGSFCTQLNRALTGIAVEQDKNTQEVFAQVKQIYKTPPIKDFGGFNFSQILPDPSKPSKRSFIEDLLFNKVTLADAGFIKQYGDCLGDIAARDLICAQKFNGLTVLPPLLTDEMIAQYTSALLAGTITSGWTFGAGAALQIPFAMQMAYRFNGIGVTQNVLYENQKLIANQFNSAIGKIQDSLSSTASALGKLQDVVNQNAQALNTLVKQLSSNCGAISSVLNDILSRLDKVEAEVQIDRLITCRLQSLQTYVTQQLIRAAEIRASANLAATKMSECVLGQSKRVDFCGKGYHLMSFPQSAPHGVVFLHVTYVPAQEKNFTTAPAICHDGKAHFPREGVFVSNGTHWFVTQRNFYEPQIITTDNTFVSGNCDVVIGIVNNTVYDPLQPELDS

SEQ ID NO: 3371 - protein, 1147 aa, Artificial Sequence
  SARS-CoV-2/Hong Kong/case42_VM20002493/2020__EPI_ISL_414527 spike protein (1-1147)(F970C_G999C)
MFVFLVLLPLVSSQCVNLTTRTQLPPAYTNSFTRGVYYPDKVFRSSVLHSTQDLFLPFFSNVTWFHAIHVSGTNGTKRFDNPVLPFNDGVYFASTEKSNIIRGWIFGTTLDSKTQSLLIVNNATNVVIKVCEFQFCNDPFLGVYYHKNNKSWMESEFRVYSSANNCTFEYVSQPFLMDLEGKQGNFKNLREFVFKNIDGYFKIYSKHTPINLVRDLPQGFSALEPLVDLPIGINITRFQTLLALHRSYLTPGDSSSGWTAGAAAYYVGYLQPRTFLLKYNENGTITDAVDCALDPLSETKCTLKSFTVEKGIYQTSNFRVQPTESIVRFPNITNLCPFGEVFNATRFASVYAWNRKRISNCVADYSVLYNSASFSTFKCYGVSPTKLNDLCFTNVYADSFVIRGDEVRQIAPGQTGKIADYNYKLPDDFTGCVIAWNSNNLDSKVGGNYNYLYRLFRKSNLKPFERDISTEIYQAGSTPCNGVEGFNCYFPLQSYGFQPTNGVGYQPYRVVVLSFELLHAPATVCGPKKSTNLVKNKCVNFNFNGLTGTGVLTESNKKFLPFQQFGRDIADTTDAVRDPQTLEILDITPCSFGGVSVITPGTNTSNQVAVLYQDVNCTEVPVAIHADQLTPTWRVYSTGSNVFQTRAGCLIGAEHVNNSYECDIPIGAGICASYQTQTNSPRRARSVASQSIIAYTMSLGAENSVAYSNNSIAIPTNFAISVTTEILPVSMTKTSVDCTMYICGDSTECSNLLLQYGSFCTQLNRALTGIAVEQDKNTQEVFAQVKQIYKTPPIKDFGGFNFSQILPDPSKPSKRSFIEDLLFNKVTLADAGFIKQYGDCLGDIAARDLICAQKFNGLTVLPPLLTDEMIAQYTSALLAGTITSGWTFGAGAALQIPFAMQMAYRFNGIGVTQNVLYENQKLIANQFNSAIGKIQDSLSSTASALGKLQDVVNQNAQALNTLVKQLSSNCGAISSVLNDILSRLDKVEAEVQIDRLITCRLQSLQTYVTQQLIRAAEIRASANLAATKMSECVLGQSKRVDFCGKGYHLMSFPQSAPHGVVFLHVTYVPAQEKNFTTAPAICHDGKAHFPREGVFVSNGTHWFVTQRNFYEPQIITTDNTFVSGNCDVVIGIVNNTVYDPLQPELDS

SEQ ID NO: 3372 - protein, 1147 aa, Artificial Sequence
  SARS-CoV-2/USA/CruiseA-23/2020__EPI_ISL_414482 spike protein (1-1147)(F970C_G999C)
MFVFLVLLPLVSSQCVNLTTRTQLPPAYTNSFTRGVYYPDKVFRSSVLHSTQDLFLPFFSNVTWFHAIHVSGTNGTKRFDNPVLPFNDGVYFASTEKSNIIRGWIFGTTLDSKTQSLLIVNNATNVVIKVCEFQFCNDPFLGVYYHKNNKSWMESEFRVYSSANNCTFEYVSQPFLMDLEVKQGNFKNLREFVFKNIDGYFKIYSKHTPINLVRDLPQGFSALEPLVDLPIGINITRFQTLLALHRSYLTPGDSSSGWTAGAAAYYVGYLQPRTFLLKYNENGTITDAVDCALDPLSETKCTLKSFTVEKGIYQTSNFRVQPTESIVRFPNITNLCPFGEVFNATRFASVYAWNRKRISNCVADYSVLYNSASFSTFKCYGVSPTKLNDLCFTNVYADSFVIRGDEVRQIAPGQTGKIADYNYKLPDDFTGCVIAWNSNNLDSKVGGNYNYLYRLFRKSNLKPFERDISTEIYQAGSTPCNGVEGFNCYFPLQSYGFQPTNGVGYQPYRVVVLSFELLHAPATVCGPKKSTNLVKNKCVNFNFNGLTGTGVLTESNKKFLPFQQFGRDIADTTDAVRDPQTLEILDITPCSFGGVSVITPGTNTSNQVAVLYQDVNCTEVPVAIHADQLTPTWRVYSTGSNVFQTRAGCLIGAEHVNNSYECDIPIGAGICASYQTQTNSPRRARSVASQSIIAYTMSLGAENSVAYSNNSIAIPTNFTISVTTEILPVSMTKTSVDCTMYICGDSTECSNLLLQYGSFCTQLNRALTGIAVEQDKNTQEVFAQVKQIYKTPPIKDFGGFNFSQILPDPSKPSKRSFIEDLLFNKVTLADAGFIKQYGDCLGDIAARDLICAQKFNGLTVLPPLLTDEMIAQYTSALLAGTITSGWTFGAGAALQIPFAMQMAYRFNGIGVTQNVLYENQKLIANQFNSAIGKIQDSLSSTASALGKLQDVVNQNAQALNTLVKQLSSNCGAISSVLNDILSRLDKVEAEVQIDRLITCRLQSLQTYVTQQLIRAAEIRASANLAATKMSECVLGQSKRVDFCGKGYHLMSFPQSAPHGVVFLHVTYVPAQEKNFTTAPAICHDGKAHFPREGVFVSNGTHWFVTQRNFYEPQIITTDNTFVSGNCDVVIGIVNNTVYDPLQPELDS

SEQ ID NO: 3373 - protein, 1147 aa, Artificial Sequence
  SARS-CoV-2/Hong Kong/case85_VM20002868/2020__EPI_ISL_414519 spike protein (1-1147)(F970C_G999C)
MFVFLVLVPLVSSQCVNLTTRTQLPPAYTNSFTRGVYYPDKVFRSSVLHSTQDLFLPFFSNVTWFHAIHVSGTNGTKRFDNPVLPFNDGVYFASTEKSNIIRGWIFGTTLDSKTQSLLIVNNATNVVIKVCEFQFCNDPFLGVYYHKNNKSWMESEFRVYSSANNCTFEYVSQPFLMDLEGKQGNFKNLREFVFKNIDGYFKIYSKHTPINLVRDLPQGFSALEPLVDLPIGINITRFQTLLALHRSYLTPGDSSSGWTAGAAAYYVGYLQPRTFLLKYNENGTITDAVDCALDPLSETKCTLKSFTVEKGIYQTSNFRVQPTESIVRFPNITNLCPFGEVFNATRFASVYAWNRKRISNCVADYSVLYNSASFSTFKCYGVSPTKLNDLCFTNVYADSFVIRGDEVRQIAPGQTGKIADYNYKLPDDFTGCVIAWNSNNLDSKVGGNYNYLYRLFRKSNLKPFERDISTEIYQAGSTPCNGVEGFNCYFPLQSYGFQPTNGVGYQPYRVVVLSFELLHAPATVCGPKKSTNLVKNKCVNFNFNGLTGTGVLTESNKKFLPFQQFGRDIADTTDAVRDPQTLEILDITPCSFGGVSVITPGTNTSNQVAVLYQDVNCTEVPVAIHADQLTPTWRVYSTGSNVFQTRAGCLIGAEHVNNSYECDIPIGAGICASYQTQTNSPRRARSVASQSIIAYTMSLGAENSVAYSNNSIAIPTNFTISVTTEILPVSMTKTSVDCTMYICGDSTECSNLLLQYGSFCTQLNRALTGIAVEQDKNTQEVFAQVKQIYKTPPIKDFGGFNFSQILPDPSKPSKRSFIEDLLFNKVTLADAGFIKQYGDCLGDIAARDLICAQKFNGLTVLPPLLTDEMIAQYTSALLAGTITSGWTFGAGAALQIPFAMQMAYRFNGIGVTQNVLYENQKLIANQFNSAIGKIQDSLSSTASALGKLQDVVNQNAQALNTLVKQLSSNCGAISSVLNDILSRLDKVEAEVQIDRLITCRLQSLQTYVTQQLIRAAEIRASANLAATKMSECVLGQSKRVDFCGKGYHLMSFPQSAPHGVVFLHVTYVPAQEKNFTTAPAICHDGKAHFPREGVFVSNGTHWFVTQRNFYEPQIITTDNTFVSGNCDVVIGIVNNTVYDPLQPELDS

SEQ ID NO: 3374 - protein, 1147 aa, Artificial Sequence; identical to SEQ ID NO: 3364
  SARS-CoV-2/England/200990660/2020__EPI_ISL_414523 spike protein (1-1147)(F970C_G999C)

SEQ ID NO: 3375 - protein, 1147 aa, Artificial Sequence
  SARS-CoV-2/Australia/NSW09/2020__EPI_ISL_413595 spike protein (1-1147)(F970C_G999C)
MFVFLVLLPLVSSQCVNLTTRTQLPPAYTNSFTRGVYYPDKVFRSSVLHSTQDLFLPFFSNVTWFHAIHVSGTNGTKRFDNPVLPFNDGVYFASTEKSNIIRGWIFGTTLDSKTQSLLIVNNATNVVIKVCEFQFCNDPFLGVYYHKNNKSWMESEFRVYSSANNCTFEYVSQPFLMDLEGKQGNFKNLREFVFKNIDGYFKIYSKHTPINLVRDLPQGFSALEPLVDLPIGINITRFQTLLALHRSYLTPGDSSSGWTAGAAAYYVGYLQPRTFLLKYNENGTITDAVDCALDPLSETKCTLKSFTVEKGIYQTSNFRVQPTESIVRFPNITNLCPFGEVFNATRFASVYAWNRKRISNCVADYSVLYNSASFSTFKCYGVSPTKLNDLCFTNVYADSFVIRGDEVRQIAPGQTGKIADYNYKLPDDFTGCVIAWNSNNLDSKVGGNYNYLYRLFRKSNLKPFERDISTEIYQAGSTPCNGVEGFNCYFPLQSYGFQPTNGVGYQPYRVVVLSFELLHAPATVCGPKKSTNLVKNKCVNFNFNGLTGTGVLTESNKKFLPFQQFGRDIADTTDAVRDPQTLEILDITPCSFGGVSVITPGTNTSNQVAVLYQDVNCTEVPVAIHADQLTPTWRVYSTGSNVFQTRAGCLIGAEHVNNSYECDIPIGAGICASYQTQTNSPRRARSVASQSIIAYTMSLGAENSVAYSNNSIAIPTNFTISVTTEILPVSMTKTSVDCTMYICGDSTECSNLLLQYGSFCTQLNRALTGIAVEQDKNTQEVFAQVKQIYKTPPIKDFGGFNFSQILPDPSKPSKRSFIEDLLFNKVTLADAGFIKQYGDCLGDIAARDLICAQKFNGLTVLPPLLTDEMIAQYTSALLAGTITSGWTFGAGAALQIPFAMQMAYRFNGIGVTQNVLYENQKLIANQFNSAIGKIQDSLSFTASALGKLQDVVNQNAQALNTLVKQLSSNCGAISSVLNDILSRLDKVEAEVQIDRLITCRLQSLQTYVTQQLIRAAEIRASANLAATKMSECVLGQSKRVDFCGKGYHLMSFPQSAPHGVVFLHVTYVPAQEKNFTTAPAICHDGKAHFPREGVFVSNGTHWFVTQRNFYEPQIITTDNTFVSGNCDVVIGIVNNTVYDPLQPELDS

SEQ ID NO: 3376 - protein, 1147 aa, Artificial Sequence; identical to SEQ ID NO: 3356
  SARS-CoV-2/Australia/NSW10/2020__EPI_ISL_413596 spike protein (1-1147)(F970C_G999C)

SEQ ID NO: 3377 - protein, 1147 aa, Artificial Sequence
  SARS-CoV-2/Switzerland/1000477797/2020__EPI_ISL_413023 spike protein (1-1147)(F970C_G999C)
MFVFLVLLPLVSSQCVNLTTRTQLPPAYTNSFTRGVYYPDKVFRSSVLHSTQDLFLPFFSNVTWFHAIHVSGTNGTKRFDNPVLPFNDGVYFASTEKSNIIRGWIFGTTLDSKTQSLLIVNNATNVVIKVCEFQFCNDPFLGVYYHKNNKSWMESEFRVYSSANNCTFEYVSQPFLMDLEGKQGNFKNLREFVFKNIDGYFNIYSKHTPINLVRDLPQGFSALEPLVDLPIGINITRFQTLLALHRSYLTPGDSSSGWTAGAAAYYVGYLQPRTFLLKYNENGTITDAVDCALDPLSETKCTLKSFTVEKGIYQTSNFRVQPTESIVRFPNITNLCPFGEVFNATRFASVYAWNRKRISNCVADYSVLYNSASFSTFKCYGVSPTKLNDLCFTNVYADSFVIRGDEVRQIAPGQTGKIADYNYKLPDDFTGCVIAWNSNNLDSKVGGNYNYLYRLFRKSNLKPFERDISTEIYQAGSTPCNGVEGFNCYFPLQSYGFQPTNGVGYQPYRVVVLSFELLHAPATVCGPKKSTNLVKNKCVNFNFNGLTGTGVLTESNKKFLPFQQFGRDIADTTDAVRDPQTLEILDITPCSFGGVSVITPGTNTSNQVAVLYQGVNCTEVPVAIHADQLTPTWRVYSTGSNVFQTRAGCLIGAEHVNNSYECDIPIGAGICASYQTQTNSPRRARSVASQSIIAYTMSLGAENSVAYSNNSIAIPTNFTISVTTEILPVSMTKTSVDCTMYICGDSTECSNLLLQYGSFCTQLNRALTGIAVEQDKNTQEVFAQVKQIYKTPPIKDFGGFNFSQILPDPSKPSKRSFIEDLLFNKVTLADAGFIKQYGDCLGDIAARDLICAQKFNGLTVLPPLLTDEMIAQYTSALLAGTITSGWTFGAGAALQIPFAMQMAYRFNGIGVTQNVLYENQKLIANQFNSAIGKIQDSLSSTASALGKLQDVVNQNAQALNTLVKQLSSNCGAISSVLNDILSRLDKVEAEVQIDRLITCRLQSLQTYVTQQLIRAAEIRASANLAATKMSECVLGQSKRVDFCGKGYHLMSFPQSAPHGVVFLHVTYVPAQEKNFTTAPAICHDGKAHFPREGVFVSNGTHWFVTQRNFYEPQIITTDNTFVSGNCDVVIGIVNNTVYDPLQPELDS

SEQ ID NO: 3378 - protein, 1147 aa, Artificial Sequence
  SARS-CoV-2/Belgium/BA-02291/2020__EPI_ISL_415159 spike protein (1-1147)(F970C_G999C)
MFVFLVLLPLVSSQCVNLTTRTQLPPAYTNSFTRGVYYPDKVFRSSVLHSTQDLFLPFFSNVTWFHAIHVSGTNGTKRFDNPVLPFNDGVYFASTEKSNIIRGWIFGTTLDSKTQSLLIVNNATNVVIKVCEFQFCNDPFLGVYYHKNNKSWMESEFRVYSSANNCTFEYVSQPFLMDLEGKQGNFKNLREFVFKNIDGYFKIYSKHTPINLVRDLPQGFSALEPLVDLPIGINITRFQTLLALHRSYLTPGDSSSGWTAGAAAYYVGYLQPRTFLLKYNENGTITDAVDCALDPLSETKCTLKSFTVEKGIYQTSNFRVQPTESIVRFPNITNLCPFGEVFNATRFASVYAWNRKRISNCVADYSVLYNSASFSTFKCYGVSPTKLNDLCFTNVYADSFVIRGDEVRQIAPGQTGKIADYNYKLPDDFTGCVIAWNSNNLDSKVGGNYNYLYRLFRRSNLKPFERDISTEIYQAGSTPCNGVEGFNCYFPLQSYGFQPTNGVGYQPYRVVVLSFELLPAPATVCGPKKSTNLVKNKCVNFNFNGLTGTGVLTESNKKFLPFQQFGRDIADTTDAVRDPQTLEILDITPCSFGGVSVITPGTNTSNQVAVLYQGVNCTEVPVAIHADQLTPTWRVYSTGSNVFQTRAGCLIGAEHVNNSYECDIPIGAGICASYQTQTNSPRRARSVASQSIIAYTMSLGAENSVAYSNNSIAIPTNFTISVTTEILPVSMTKTSVDCTMYICGDSTECSNLLLQYGSFCTQLNRALTGIAVEQDKNTQEVFAQVKQIYKTPPIKDFGGFNFSQILPDPSKPSKRSFIEDLLFNKVTLADAGFIKQYGDCLGDIAARDLICAQKFNGLTVLPPLLTDEMIAQYTSALLAGTITSGWTFGAGAALQIPFAMQMAYRFNGIGVTQNVLYENQKLIANQFNSAIGKIQDSLSSAAPALGKLQDVVNQNAQALNTLVKQLSSNCGAISSVLNDILSRLDKVEAEVQIDRLITCRLQSLQTYVTQQLIRAAEIRASANLAATKMSECVLGQSKRVDFCGKGYHLMSFPQSAPHGVVFLHVTYVPAQEKNFTTAPAICHDGKAHFPREGVFVSNGTHWFVTQRNFYEPQIITTDNTFVSGNCDVVIGIVNNTVYDPLQPELDS

SEQ ID NO: 3379 - protein, 1147 aa, Artificial Sequence
  SARS-CoV-2/USA/WA8-UW5/2020__EPI_ISL_413486 spike protein (1-1147)(F970C_G999C)
MFVFLVLLPLVSSQCVNLTTRTQLPPAYTNSFTRGVYYPDKVFRSSVLHSTQDLFLPFFSNVTWFHAIHVSGTNGTKRFDNPVLPFNDGVYFASTEKSNIIRGWIFGTTLDSKTQSLLIVNNATNVVIKVCEFQFCNDPFLGVYYHKNNKSWMESEFRVYSSANNCTFEYVSQPFLMDLEGKQGNFKNLREFVFKNIDGYFKIYSKHTPINLVRDLPQGFSALEPLVDLPIGINITRFQTLLALHRSYLTPGDSSSGWTAGAAAYYVGYLQPRTFLLKYNENGTITDAVDCALDPLSETKCTLKSFTVEKGIYQTSNFRVQPTESIVRFPNITNLCPFGEVFNATRFASVYAWNRKRISNCVADYSVLYNSASFSTFKCYGVSPTKLNDLCFTNVYADSFVIRGDEVRQIAPGQTGKIADYNYKLPDDFTGCVIAWNSNNLDSKVGGNYNYLYRLFRKSNLKPFERDISTEIYQAGSTPCNGVEGFNCYFPLQSYGFQPTNGVGYQPYRVVVLSFELLHAPATVCGPKKSTNLVKNKCVNFNFNGLTGTGVLTESNKKFLPFQQFGRDIADTTDAVRDPQTLEILDITPCSFGGVSVITPGTNTSNQVAVLYQDVNCTEVPVAIHADQLTPTWRVYSTGSNVFQTRAGCLIGAEYVNNSYECDIPIGAGICASYQTQTNSPRRARSVASQSIIAYTMSLGAENSVAYSNNSIAIPTNFTISVTTEILPVSMTKTSVDCTMYICGDSTECSNLLLQYGSFCTQLNRALTGIAVEQDKNTQEVFAQVKQIYKTPPIKDFGGFNFSQILPDPSKPSKRSFIEDLLFNKVTLADAGFIKQYGDCLGDIAARDLICAQKFNGLTVLPPLLTDEMIAQYTSALLAGTITSGWTFGAGAALQIPFAMQMAYRFNGIGVTQNVLYENQKLIANQFNSAIGKIQDSLSSTASALGKLQDVVNQNAQALNTLVKQLSSNCGAISSVLNDILSRLDKVEAEVQIDRLITCRLQSLQTYVTQQLIRAAEIRASANLAATKMSECVLGQSKRVDFCGKGYHLMSFPQSAPHGVVFLHVTYVPAQEKNFTTAPAICHDGKAHFPREGVFVSNGTHWFVTQRNFYEPQIITTDNTFVSGNCDVVIGIVNNTVYDPLQPELDS

SEQ ID NO: 3380 - protein, 1147 aa, Artificial Sequence
  SARS-CoV-2/England/20102000506/2020__EPI_ISL_415147 spike protein (1-1147)(F970C_G999C)
MFVFLVLLPLVSSQCVNLTTRTQLPPAYTNSFTRGVYYPDKVFRSSVLHSTQDLFLPFFSNVTWFHAIHVSGTNGTKRFDNPVLPFNDGVYFASTEKSNIIRGWIFGTTLDSKTQSLLIVNNATNVVIKVCEFQFCNDPFLGVYYHKNNKSWMESEFRVYSSANNCTFEYVSQPFLMDLEGKQGNFKNLREFVFKNIDGYFKIYSKHTPINLVRDLPQGFSALEPLVDLPIGINITRFQTLLALHRSYLTPGDSSSGWTAGAAAYYVGYLQPRTFLLKYNENGTITDAVDCALDPLSETKCTLKSFTVEKGIYQTSNFRVQPTESIVRFPNITNLCPFGEVFNATRFASVYAWNRKRISNCVADYSVLYNSASFSTFKCYGVSPTKLNDLCFTNVYADSFVIRGDEVRQIAPGQTGKIADYNYKLPDDFTGCVIAWNSNNLDSKVGGNYNYLYRLFRKSNLKPFERDISTEIYQAGSTPCNGVEGFNCYFPLQSYGFQPTNGVGYQPYRVVVLSFELLHAPATVCGPKKSTNLVKNKCVNFNFNGLTGTGVLTESNKKFLPFQQFGRDIADTTDAVRDPQTLEILDITPCSFGGVSVITPGTNTSNQVAVLYQGVNCTEVPVAIHADQLTPTWRVYSTGSNVFQTRAGCLIGAEHVNNSYECDIPIGAGICASYQTQTNSPRRARSVASQSIIAYTMSLGAENSVAYSNNSIAIPTNFTISVTTEILPVSMTKTSVDCTMYICGDSTECSNLLLQYGSFCTQLNRALTGIAVEQDKNTQEVFAQVKQIYKTPPIKDFGGFNFSQILPDPSKPSKRSFIEDLLFNKVTLADAGFIKQYGYCLGDIAARDLICAQKFNGLTVLPPLLTDEMIAQYTSALLAGTITSGWTFGAGAALQIPFAMQMAYRFNGIGVTQNVLYENQKLIANQFNSAIGKIQDSLSSTASALGKLQDVVNQNAQALNTLVKQLSSNCGAISSVLNDILSRLDKVEAEVQIDRLITCRLQSLQTYVTQQLIRAAEIRASANLAATKMSECVLGQSKRVDFCGKGYHLMSFPQSAPHGVVFLHVTYVPAQEKNFTTAPAICHDGKAHFPREGVFVSNGTHWFVTQRNFYEPQIITTDNTFVSGNCDVVIGIVNNTVYDPLQPELDS

SEQ ID NO: 3381 - protein, 1147 aa, Artificial Sequence
  SARS-CoV-2/Belgium/VAG-03013/2020__EPI_ISL_415155 spike protein (1-1147)(F970C_G999C)
MFVFLVLLPLVSSQCVNLTTRTQLPPAYTNSFTRGVYYPDKVFRSSVLHSTQDLFLPFFSNVTWFHAIHVSGTNGTKRFDNPVLPFNDGVYFASTEKSNIIRGWIFGTTLDSKTQSLLIVNNATNVVIKVCEFQFCNDPFLGVYYHKNNKSWMESEFRVYSSANNCTFEYVSQPFLMDLEGKQGNFKNLREFVFKNIDGYFKIYSKHTPINLVRDLPQGFSALEPLVDLPIGINITRFQTLLALHRSYLTPGDSSSGWTAGAAAYYVGYLQPRTFLLKYNENGTITDAVDCALDPLSETKCTLKSFTVEKGIYQTSNFRVQPTESIVRFPNITNLCPFGEVFNATRFASVYAWNRKRISNCVADYSVLYNSASFSTFKCYGVSPTKLNDLCFTNVYADSFVIRGDEVRQIAPGQTGKIADYNYKLPDDFTGCVIAWNSNNLDSKVGGNYNYLYRLFRKSNLKPFERDISTEIYQAGSTPCNGVEGFNCYFPLQSYGFQPTNGVGYQPYRVVVLSFELLHAPATVCGPKKSTNLVKNKCVNFNFNGLTGTGVLTESNKKFLPFQQFGRDIADTTDAVRDPQTLEILDITPCSFGGVSVITPGTNTSNQVAVLYQGVNCTEVPVAIHADQLTPTWRVYSTGSNVFQTRAGCLIGAEHVNNSYECDIPIGAGICASYQTQTNSPRRARSVASQSIIAYTMSLGAENSVAYSNNSIAIPTNFTISVTTEILPVSMTKTSVDCTMYICGDSTECSNLLLQYGSFCTQLNRALTGIAVEQDKNTQEVFAQVKQIYKTPPIKDFGGFNFSQILPDPSKPSKRSFIEDLLFNKVTLADAGFIKQYGDCLGDIAARDLICAQKFNGLTVLPPLLTDEMIAQYTSALLAGTITSGWTFGAGAALQIPFAMQMAYRFNGIGVTQNVLYENQKLIANQFNSAIGKIQDSLSSTATALGKLQDVVNQNAQALNTLVKQLSSNCGAISSVLNDILSRLDKVEAEVQIDRLITCRLQSLQTYVTQQLIRAAEIRASANLAATKMSECVLGQSKRVDFCGKGYHLMSFPQSAPHGVVFLHVTYVPAQEKNFTTAPAICHDGKAHFPREGVFVSNGTHWFVTQRNFYEPQIITTDNTFVSGNCDVVIGIVNNTVYDPLQPELDS
